United States Patent Application Publication US 2007/0054278 A1 - sequence listing, part 100

SEQ ID NO: 97565 - DNA, 26677 bp, Homo sapiens
gttctggacgcggtcctggcgcgggaacctgagctggagccggcgacccccgcccgccaccagcccgcgccccgcagagcgcacgctcaagagcgcgaacacccagcgtctgctctgtgctgacggcgttctttatcagctcatttaatttttagatttgttggcccattcgacgttcacaatgttcagaaatgtacgctggacaaataaatagggcaagagcacgagctcaccgatttaaaaattccacacagcattgcaaaggttttctggagcctcgtcatcaaagttgacccaggaagaagtagaggcttccatgtgggacactgttatttctaatctactttgaaaccgcagggcaggcagggagggaggaaggagaaagaagcagcaggccaggtctgcaggcaggaagaggagagccggccggcagccgccgcctcgctgaggtctgaagccaggaggctgggagaatgcgcagataaagacgagccagacctccagaccgcaaccctcctctccctagagagggaacaggccgctttctgcttatgctgaactcggggctctggagacaggaagcgtggaggagacagcagaggtgaggctgggagataggatttcagtgggtctcttcccccttcccggtctcaggacatccaccccagcgggacatcagagactccctctctggaggtcaccagctgcagctgagcaaagccctgaagcgagcagtgtccgcagcttccgacgcctcagcgtgggtgaggggacctcggtggacgaagccacctgtaccccggcggttgaacaggaggggaaagcgctcccgggaggagcctgcgggcccagaggcggaacggtgggggtgggggcggcgactcctgctcagaagcagccccgcccatccccataaactctcccgcacagtcgccgagaggccggattcctgggcgactcagtgcgcctcgctcggcaggcaacgcgcgggggccatcgccctaatcctgatctcatccttcggatgctattactataatattactgttagtttattatttggccatcgccgacgtggctagcgcccgtaactgtcccggggcgtgttatgcaccccccgctccgtgccagggacgcggactcacccctgtccctgtgcgcatggaacgcggggaggtcgcctctgcccgagaactcgtccttgtagtccagcagcgcttccttcaccgccttgtagccgtgcatcaccaccatgcgctgcgagcccacgtacagcgtgaacaccggcccgaagcgctgggccaactgcggagacccgtggctagaagtcaggcccgccgcgcggcgaggaggtgcggggctctaagccacacccctgccgggcgggtattgctgttgctctagagaacccagagggacgtggggaaaagctgtctttgtccagcccgaggtgggggagaccctcccctcaagaggctgctgcgtctgcagggcgctcggggggttccagctgctctgctccccacccgcctggactccgcggacaactccgcggcaactccgcggactccggctcctcacgtcccttccctcaggcgcgcccaccaaccaccccgttgcccgcttccggaatcaaggttctggacccggttctggcgcgggagcccgagctggagcaggcgacccccgcccgccgtcagcctgcgccccacagagcgcacgcgcaagagcgcaaacacccagcgcctgctccgtgctgacggcgttatcagttcatttaacgtttaggtttgttggcccattcagtgttcacaacagtcgtaggcggcaggtattggtgccacacgggctggcccaacacttcacgtttcaactcgtgctttggcaaacacaggcggacgcccagcgagtgcgcatctggccgccagcccggttatcctggcgtcgcagcagcccggcctcgccggcctccccatcatcagccccaggacaaggcaccggcgggggcctccggggcctggcacgcaggctccgggctccagctgcaccacaggcgacacattttgagtgtcgctccaggatgctatcaattcaggtaattcacaacaggctggtattgaacaaccacaatttgtctgcaaatgagttgaatacacacataccagatccaattgctgagttattctccctaaaatcaacactatttctcttacccgggtgaaggacttgggaatattcttcaattccaactggaagaggttcccgatgatgggaagcgggaaagggcctgggggcagattccagctgctgtgcacctgcctccacatggacaccagcaggaggaaggccgcccacaccagcagggccacggtgactccgagggcagacatggtgccgctggggccctgctgccagcccgggaggacaatcctgtggaaacggaaggtttttataatgtgttctgagaaggagggtgacccaccaaccaatgccctcttgctactcgtctatcccaaattactggtttattattagctgctgttggccatcgtttcaaaggctgattcccgcaatggtggcccccaggggttccagccagtgacctggtgaggatggagttggactgtgtcaacaccctggttgctagcacctgtcactgtgccagcaaacacatccaggaacatgttgccaacccatagttaagaacgtggggtgaggtaccgtcctgccctttggcactggttagacaacggggaactccagccacatccccatgcatttgtttggagtagggtttatgtaatacaactccaaccccatgccgaccacctctagacacggtaccggccctcctggtgcaacagcctcttgatgtctgatgaggaggtttgtctgagcagcccccagtagtacctgaatcaccacctgccacatgaatggggccagaaggaaaattcaacatcggaattcgattccactttctcaagttaactggaaaattccatggaagaaaaataaaaggaaagagtgagtcaaccaattctgagaaagttaatctctgttttcattttttttaaaggtatatattctggctgtagaaaattaagaaaaattgttctttggaattattccaaatttaaattcttaaaaaattacattagagttttattggatttgttttacattagggtaaatttagaagacgattttaaagatatcttgtctttgttgatcccgggacacaatagagctccacattgactagcttcttctttcatgtattaattattttcttcatacagaccctcttccaccttctatgaaggtagtccataggtattttgtggagcttttttgtgtgtgtggttagaatgaagagaatgtttttcattctgtcttctaactggcaatatatagaagttcttaattcataggttgcaattttgtacttttatattaacaatgaatctttatgtataatagaaaatatgatgagaaatgaagaaaataaaagtcatttacaatccagccaaatcacttgtggattttgagttatgccattctatacttgtatttatacaaaaatgagactacatactatatattgcattctaacccagtttttctcttgacaatttattagccacataagcaagtcattggttgtgctgcacctaacactgcacctctcctgaaccaagaaggggcgttggcctctggcagaggcttcaggggcctttgcttccctctggtttttggcacccctcgaggtgagaactgacaatgtagactcgactggctcacgggtgggttagcctgccgcctcctcctctctttcctttccagtggccagtgtgaggtggcagggacaattccctgggcagaaacagctgtccagacccctgaaccctgttgtcctgtgtgggcccagccaggcctggccgggacagacacccattggggtccacaagtttcctcgattactggttccttcttctagtgcttgagagcagcagagtcagctccccacagactgaaattgaagccttggctttggtggggtgagaacaggaagcatcagggtggagaggcagagcaggcctctggctcccctgggctgaggacaccttgtctgtgcagctcacctgagtgtgcacatcccaggcgggacccgcgtgccctggagagtctgtgcctcacagggatgcagctgtggtctgagtcctctggccataatactgttagatgcccaaccaacatcaaattttatatacgggaacacctcgtttgaaaataatgacatttctgtgtgcttcttttcagaagccggggcttttatttgttttgcatctgtcccattggcaggacactctaggacaaggtgaaataatcaggatgacagagtgcctgtgcctctgcccgtgacaaggtgaaataatcaggacgacagagtgcctgtgcctgtgacaaggtgaaataatcaggacgacagggtgcctgtgcctgtgacaaggtgaaataatcaggacgacagggtgcctgtgcctctgtccgtgacaaggtgaaataatcaggacgacagggtgcctgtgcctctgcccgtgacaaggtgaaataatcaggacgacagggtgcctgtgcctctgcctgtgcccgtggcagggtgttcttcaggcttccatcacgtctgctgttggctgggtgtggcaaagaggtgactgtattgggacaattttcttctttctctagataactaacagtgtttatcagggatgagagttgggttaatgaaatctttttttgattgagacaatcctgtgatttttctccatagacctgctagtatgatgctagaagaaaacactgtctcacaatgtaccataaaattaccataaatttttatattgtatcataaaagtacctcatagttccacatcacaaccaactcgttcatggagtgatactcttttaacaccctaaggattcaacttgttaatagtatttttagtaattttgcatctatacccacaaataaaatcgggctataatttttgtgttatattaggttcttgcataaaaattgcactattctagaaatcattgcaaaacccctgtcttctctgtgactggggatactttatactgtaggggaattttctgtgcttcaaaattttaatagaactcactagtaaagcaatatagagaagatttactggaattaaataattgtttataaagattagaaagataattttaattggggaagtaaaatatctccttttaacgaatgcaaacaacacaaaagtgggtgaagtggaaactgcgagtcccaaattcaccctacaaaggcagcttccatattttaaaccccattgagaaggaaagattctgctaattctctttttattatttgcagttttaattttgtacctactaaaatactttttggcacttactttaattctgtgtataatgtgcatttgagttactagtgttctttgactttgacccaagagacttcctttagtatttcttatgacaggcttgtgaattctctcggtgttgtttatccaagaatgtcttaatttctctttctttttgacatttgatcttagccaaaaggctgacatattttaaattttaattaataaattaatgggggagggtaccagaaaacctgctagacaaattctaaagagctgtaatacttctctctttttggaagaatgttttctggatatagaattcttggttagcagtgtttttcttcagtgccctgactgtgtcatctcactgcctgctggtcccatggcttctggtcaacaagtgctgttattttatcaagggctgatttacctgacgactcatttggtttcggcggaacaggttcctgctattttatccagggctgatttacctgatgactcatttcggtttcgggtgaacaggcgctgctattttatcaaggtctgatttacctgacaactcattttggttttgggtgaacaggttcctgctgttttatcaagggctgatttacctgacgactcatttcagttttgggtgaacaggttcctgctattttatcgagggctgatttacctgacgactcatctcactcttgctgcttccaggactcccagtttccctttgattgtttgactacagtgtgtgcaggtatggctctcctttcatttattcyattttgagaataaatgaataaatgacaataaatgaatattcatttattaagcttttggatatgtagatggatctttttcatcaaatttggggaatttacacccattatttcttcaaatagtatttttgtccccttattttctctctttctgtgattcccattgtacctgttagatacccttgatgatgtcccaaaggtctctgaggctccattcatttttcaacactttagctggtgttcacattgcagttctggaggaacagattttcagagcttcttatcctgccattctagaagtgcttctcttgtctatcctatttatcaggaaaatgagagctttccaagaaacttccagaaaatctgagatttttttaattcttggttagaatgtcaccactcctctgtgcaagaggggctggaaagtggaaagactttttaagtgaatgtgtcaaaatattaagggaattaggaatgggattgattactaatcaatagtgtgtaccatactatggttgtaagtattctgtgtattcttccaaacttcaaaaacaatttatataaacatacacacacacactacattttgtatttcacaatttgtctattttgagttgatgaacaattcaaatggtttccccaactatttatgttacaaaaggtgccacaatggtgccctgtagatgtatctttgttcagacatgcacctatctctgtaagtcagttttgtgggagtgggacggttaggtcactggatatgtggatttacaatgttaataggtatataaaactgcttcctcaaaaggttgaaacacttaaaaccccccacagtaggatgggagagccaatttctacacatctgctccaacactagatactgccagtcaccgataactgaaaattcatatgtcattactttaatttgcatttctctggtcaataaagaagtagagcatcttttcatctactgattatttatttgaatttcttttttaatgaaacaattccttcccttttcatattgggattttacatatttcctctcagattttaaggactctttgtctatcaaataaatagtagttgttttcatgtttgatggtttggaagttcctcccagtctcttgtttgatttcccatgtagaaaattagatttttatacagttaaacttttcagacttttcctttatggcctttggaatttagacaatgttttctaaaagaccttccccatcaattatttttaatttaaaagtcaccattatggccgagcacggtggctcacgcctgtaatcccagcactttgggatgccaaggcgggcggatcatgaggtcaggagatcgagactatcctggctaacacggtgaaaccccctctctactaaaagtacaaaaaagtggcgggcgcctgtagtcccagctactcgggaggctgaggcaggagaatggcgtgaacccgggaggcagagcttgcagtgagccaagatctcaccactgcagtacagcctgggtgacagagcgagactcccgtctcaaaaaaaaaaaaaagtcgcctttagaaaagatctatgtggtcttgtcatttctaggtaaggtgccttgatttctctgactagaatcgtgttttattacattatcttttattttaaaaatctactcagatatgttaatatgtattaaaattggcaattaatcttctaattgtatcttttactgttatataaacatctttttgactcccctgataactgttgctacatgtgtttgcttttcgtagtatttccctggtctatctytgctcatcataatatttaaagtatctttatgttatttttgttcttgataggtgtcctgtaaacattctatagctttgacataaacggaaagtttttcctttttatagaattaaacggtcatatttatcacgattactaaatttggctgttacgatgtgaatgtatgtgtgtgtgtatgcgtgtgtatgtgtgtgcatgtgtgtgtgtgcatgtgtgtatgtatgtatatgtatgtgtgtatgtgtgtttcctttccctatgttcggattgatcattttttgtttgttctttttgcttgatgatttggactcctgttgttattctaccggtggttacccttgaatctgaaaacacatatagacctatagtttttttattcacttgaataatttgtcaatatcttctgatctraacaagaagggaccttagcatactgttcttctctacttctcttgcaatatacactctaccccaaatctcaggaattttagttttagaatattagttttaaatttgttcaaatatacttgttttayaaattaatttttatcgaaggcattcacattttcagccacctatcgagtgattatttgccctcaaatatatgctgtaccagtcccttcgcctgtttcttctatatcatatcttgtcttccatggattcctgctcctagacacacaacatcttccacataaaatcaggacccaattttatgtggagagggtgggctgcacgaggaggtacacttggaatgcccacctccctgggctacttgacctccctccatagccaacttctcttcagtggcagatcacgtggcaaaaacatgttgtcagactgacagcaaacttgcctctcctcccttcacactcacaagtagaaagcataaaacatctcagaagtgctctaggaggataatcagtagccataaacccttggaccacagagctaygaggcagaagaatattactcttctgggcacccaaaaggctctggataagaagggaggagagtacggatggggctgaaaacatgctcagaatggctgatttgagggctttcccctggaaacttcctcttgttttgtattgtcaaaaggttgagaaccttaaaacagacatttgtgtgggcaactatctgatgttcgatgccatacttcactggaaataacgaccttgacaaaagccaaacatctgttccaagtaaaacaaaagcagagaacacacaacctcgccgcgtccaaagggcaagccacgctggtgcaggaacgaagcctcccgcctcagagggcgcggggctctgtgctgtgtcctgtctcctgtcagccggctctgcccgcacgctgagctgcggttatggctccgggagcaaacaacccggaagtggcagcgcggctgggcggagggcgccctcctggttccgctggggctgcggctccctgaggccccgaggggaccccgctcacccgggccccgcccaccagagggcgccagagagaagccaccggggaggcgcctgcgcygtttccctgagcctcctggtaccccgtttgagacacaggaaaaaacgtgtgaaaggcttctgtaaattatcaagtgtggtgacgtatgaaccccaggcagcccactcccaaccccaaacaacatctcattcaagctgcgtctaccagaagctctcacatccaactgcctccctccagaggtagccgctgtcccgaattttgctttgaatgttccctgtgattttcttttttatactgtgtaattggatttttaaagggatttcataacatttatattcccggaggcttgaatttttttgctcatcgtttttcgttaccacgtagtgaggtgttgctgcagttcctcgactttgtgactccacagatacgaatatgtggcactttgtttaaccactgtcctgtccgattattcccaaggttttgctactgcagactaggaacatttttgaacatgattcctggagcactgtgtaagaatatctctaggccaagtgtatacctgggcaacctaatatacatggaaccagattgttttccaagtatttgaaccatttacctgcgtccagtggtgtctaagtgttcctgttattcccaacagtatgtactaataaatttcttaatattttccgatttagtcaatataaaatgatatttaactgtggtcccattttgcatttccctgattataaagtagagaaactttctctccctctctatctctgtcttgtcaaaattatacatacttttctctgaaatgcctactcaagtattttatgtattttgctctcctcttcccttggggttttggtctctcattgtttgcaggaatgctttattctgatccrtcctcagttctatgtgttgcaataattttttccattctttaggttacttttctatactatttatggcattctttttatcaacagatgttctcaagttatcagtcttgcatttttggattagcactttytgagcttaaaaaaatcccttcttccagcctgggtgttggagtgagaccatgtctcaaaaagaaaaatcctttcctagccagaaagatgataaagataactgcttatttataaggttttactgttcccatttatgccctaaatctatgtagaatttatttttgtacatagtaaggactaaggaagtttgttttcccatatagatatgaattgtcccaggatcctgtctctgatccccaaatcatcttccaaaacaagacaaagttcttacacaggggatgcatcagaggcctgtctctccctggtccaatgccatagcattttaattattatagctttatagtagtattgatatcaaatagtgcaagtcctgtggtgattcactcaggatggtggcagaaatattaaagggamatattagggaaagttatagggaatagtcacaaacctttttggaaggctgaaaggttacatagcttgtaataattgaacaggctgaaggcagcgggttcttaccttagagcattaggtcatagggtaaatactagggacaatagaggcttccccagttaagtctgtttaccctacctccattaactaacctttgagccagatggccctcttggtgcggaggaggttgaccagggaaattgccccctaatggtatttaaaccgtggtacctgagctttaatcattcatagaactaccgtcttaaccatgttaattatccacaagtgtgttgactcagagcttctgttgttaagcgtatactaaataaatgcctgaagtgcaagctgctcagagccagccacagtgacaaacctctcttggtgtgtaggctgtcggacaccgagctggactggcaaagcagaatatctctgtgtcagtgtacgttgtattcatccatcgtttgggtcagggtctgcaggcacacccctgcagctaatgccctcttgtgaggagcaatacctcgagtcccaccaccgttttttatttcaagagtgccttgcatacaaattttaagactcagttagttaaatttcctcaaaaagtcttttgagattttgatyagaatcacataaactctgtgaattaaatatctttaaaatactgatttttcctatccatgatgtggaatctgtttccatttatttaggccattttaaaatgttttcaataaattttataattttccgcatgtaaattgtacacatttttgttaaccttactcttagttaacgttgagttttctaagcagagttcttgataaattatgttttccaactatttattgctagtgtatagcaatacaaatgatttttgcttattgatcctagaggcagcccccttcctaaactctcttatttccaataatttctgtgcagattcttttgtggtttctcagtagaccatcctgtcgtctgtgaccaatgagagttttgctttatatctttcaatccttattcctgtaatttctttttcttgtcttattgcacaaacagatcctcagtacactgttgccttgatttttattttaatgggaaacatctcagaagttctctaagaggacgctcagtagccattgcccctttatgaatgatgtttattgtaaggttttgataggtatactttttgagtttaaggaaattaccttttatttctagtctactaagaatttttaagttaataatagatgttgaattgtactaaatgcttcttttgaaatgttcagatgattttcccctttaatttgtgaaagtggtgaataaatgtatggaataaacacagtttggtcctgacagtttgtctttttaatgtattgacggatttgcacccagaggaagggctggctggcagctgcatttggtttactcacaggttgttttggatttttgcatctatgttcagtatgaggctggcccatagttttctcttctgtctttctctgtgttgaatatcaaaattatccaggctccaaagaatgatttgatgaccattcattcatatttgatccttttgaagagtttatgtaagattgaaatgatctaacagctttagaagaactcacttttgaaaccatatggtatttttacttgtgaaaacatttagaattaataattcaatgtatttaagagtagcataactggtcaggctctacacttcttgaattgattacgaaaactacattttttctaggaattgtgatttcttgtaagctgtcaaatttattcacataaatttgttttagtattgtcttatgtttacagtcatggttgtatttatcattatgttcctttgacatcccaaacattgtttatttgtgcttttttgtgcttaagtagtctcagaagcagtttctctactttattaatctttttcaaatagcaagccttggttgtgttcctctctatttcctcattattttgtatttcatgatttctgcccttctttgggtccagtatgctgcttagtttcagttggacatttggcttattaattttcagtccgtctttcttagtacaaggacttatgattatatatttacctgtaagatcttctgttactgcttccccaagtgctgatatttaacggttccattattcactgagctctgtgtgctttcttaatctccatcccttgattcatgattcatgtgcaaatggggtatttttcaaaatatatagaaattattttttaatyagagaaaatttcaaatgtgaaaaaacagtgagagaaagataaagcacccccacatagctaacactcaaattcaacaatggtcaaaatgcagttaattttgttgcatctttagagttaagaccttactctctctaatctctctcaaactacttacaatgccaataycacagctaaaaataaaataattttatgaagattgttagtttatacttttactgatgtctaatttaattccattgttgtcagagaatgtggtgtgtatataarttttgtacagtttactgaacttactgtatggcctagcacagtgctccctagagtgtggtatgcagaccatcggtgacgaggctgtacagaaattgagagcaggcaactgttcaaactgtgttcaaatacggcaaacacagagctgtaaacaatccagctgtttctagacctcattttcattttctctacatttcttttctgttcataaatcttccaccacrtggctccactgcagtctctctgagcctattctggcctaattaaactctgttaaatttaatttgtctaataaagcttttcctttaaatataggattggaagaaatattggccacaaaggaaaattcacattggcagaagtcataatgagttaaaaataatggatatgaaccccccacaaaaaaactaaggaaccaaatcttcattggataatttaaatggagaaactaatctagaataaaaccattaatgtaaaattaaagtgcaaaaaagtcagacagttcaactactctgtgtaaaaacgtgatacgatattaaataacttaagagaatttaaagaaaagtcatgaatgttggcataattcagtgttaaagttgcatacgtatgtccaaatgtcacctgaattaaaacatccttacaatcaaagttcaggatagaaactctcgggctcaaaggtctcctgccttccctacttttatcttgtyaatttttttttaaaaaaagaaaaaccaggtgttgtgtgtgtgtgtgtttgagacacagtctccctctattgcccaggctggagtgcagaggtgagatcttggctcactgcagcctcaatctcctaggctcaagcaatcctcccacctcagcctcccaagtagctgggactacaggtgcgtgccaycaagcctggttaattttttttttttttagagacagggtctcactatgtagcccaggctggtctggaactcctggcctcaagcgatattcccaccttggtctcccaaagcactgggaaagtttaatttttaatgaagtatgacgtatatgtcaaggtttatttgttttgcatgtggacactcgattttcccagcactgtttgttgaaaagactaccctttgtccatcaagttgctactgcacctatgtaaaaacaggtatatttgtctgggtctatttctgggctgtctatcctgacccattaacttgtctttgtctttcaccaaaatcatactcttttttactgtacctcaagctgaaggactcttgctacccagtttacatctttaaattgggcagcgggaataaattaggtaaygagagtcctacaactttgttctttttcatagttgttttgaccattctagttcctttgcctttctgcatagattttagaattatttgatcaatatctgattgctaagatattgattagaatagcattgaatttatagataaaactggggacaattgatgcactaacaagaatyttttccaacccatgaacatgacatatcctgcatatattttattaaattaatatctaagtgcttcatatgttgctattgtaaatgttttttaaacatttaattttatttaaaaattctagtttcctatttagttattcattgctggtacataggaatacaattgccttttgtacattgactttatattctagtcttgctaaacccatttattagtttccagtagcttttgggggtaaatatgtagggatttccatatagataattatataacctatgaatgaaaacagatttatttcttcttctccaatctgcctgccttttatttctttttcttgacttactgcacagtattgaataggagtggagatatggtttggctgtgtccccacccaactctctccttgaattgtaataatccccacatgtcaagggcagggccaggtggagatcactgaatcatggggcagtttcccccagactgttctcacagtagtgaataaatctcacgagatctgatggttttacagatgggagttcccctgcacaagctctcttacctaccaccatgtgagatgtgactttgctcctccatcgccttccaccatgaccatgaggcttccgcagccatgtgaaactgtgagtccattaaacctctttcctttataaattagccagtgtcaggtatgtctttattagcagcgtgagagcacactaatacaagtggtgcragaggaactgttgacattttttccagtcttgggggaaagcatttacccacttatcttcaagtatgatgttagccgtaagtttttgtagttgccctttgttaaggtagggacattcttttctattcctagaatgctgtgaatttttagtgggaatggaggatgaattttattgtttttacagtattttttgaaaagacaatataatttttcttattcagcctrttaatacagaaaattacattaattttcccatttattattttttaaaatgtattgaggtgaaattcatttaacagaaaatggatcrttttaaaatgaacaactcagtggcatttcgtacatacacaatattgtgcaaccgccacctctgcttccaaaacatcctcatcattccagaataaaacctcatacccatcaagcagcttctctccatttctccctgctcctagtccctggcaatcaccagtctgtgttctgtctttaggaattgacctattctggctatttcatgtaaatggagtcatacagtttctattgctctatcttcaagttagtctttcctgagctgtgccagtttcctggtgagccttttgaaggcatttttcttctctagtgctgtggtttaaaatttctattgttcccatgaygttcatgtttatagtttccagctctctgctaaaatgacctacctgatcttgcgtatggtctgtctttttcattaggaccattagcatattactgagttgttttaaattccctttctgatagttccaccacctgtgtcatatccgagtctagcagtaatgattmttttatgtcttctgtttttccttgcttttttgcatactggacatcttgtgtaagacagtagatactaaggtcaaaagtgttttatgctttgagaagagcacacattttattttgctagttctttatgtgtgggggcttgtgctcatcttaatgggggttaggctgagtcgcaagtttgttgtttctgtgtgaacatgtaccagcagctcctgattcccctagacatacttcgagtttgtctgcatgcatcgctttcgctctctctttgctcctgggagagaggctctctcttgcagctccaccagctctattccactgatatttttatatgatgcttgtcagtgagattatggagtgtggaggaggacagcattccctgaggttctaatttagcctcagtcttcggcagaccctgtctttccagcccttccaagctccaggaatgctgtgggatcgcctgtaattttcagaggcagaagttcctccttgattgtgtccctccacagagcactagataaggagagaatcagtaacttccacttatgcaacatcttttaaagtaattttctagcatctatttctgagattttaaggacaatcatggcatggagacatcctataatactccagtggcatcttgaaattgccaagactgtgagaagcatttcagaaacctggggaattattttctggatttaaatcatgtggaagttgtggtgcttttaatatatttatctcatttggatgtttcatatgcagaagatatgtcagttgtattcatagcctaggaaatagagtcctgtctaacactccatagtttgtattttttaaacttaaaactctatttacaaggacaatcttctgtgtcgtatattttgtaggttaatatatgcccagaaacaactcccacaaagcccagactcctcaartgcatgccagggaataacctttgtatgaaatcgaatgataatatgttgcaagagttagatcaatttgcaaaagagtccgttaaatgatgatgacagcacaatgtgaaaagctggcaataaggcacttccaataatagatatgaggacatcaccagtgtacatcagtttcaaaagttcttacttttttcagtaatctgatttcaatttctaattaatgaagattggggaagttaccttttaactatttctaactttgttgacttaagatcaaagaatgtggactgtaaagtgtttactttttataatttgataaggtttactttgttcccaagtacaaaattgatttttgtaattgggacatgaacacacaaacaaaacgttatcttctgtttaaaaagtaagtttaatgattacattattcagttttttccatatttgcttcttgtactaaatttgtccaattctgaaactgtgttttgaaggttgccactgtcatagaactatggtctagttctttttttatttctagtagatctcagttcaaatatttagttccatgtttttggtaaatagagatttgtggctgttacatcttcttcataaattatgccttttataattgtctactacctctctgtgtcctgtttagtgcatttatctataaatactgcagctgttgtaatctcaatactatcaaatacataaggaaaagtatgctaagtgtatagcctgatgggttatcacaacatgagtgtggccatgccgaagggctttcagagtagaaacatcacccgccctcggaaaaacatcactggctgtcaccaactcctcccctagtcctaggggagtttatcctaccttttaataccacagaatagtcctggccacttttagactttatgtaacattcgctgaatcacacagtatgcattctttgtgtcttaattcttttacttagcttcatgtttgtgtgattcactcatrtttgtgaacttaacttcatgtttgtgttatttgtagaagtagttcattctttttcactgctatatattattccactctgtgagtatagcatgatgcatcaattataccccaaacaatactgttttttctactttttcactatgcaaataatgctgtcatgaaatttcagtgcctgccttttaatgcacctgcgttgcttacctctgttgtttatatatctaaaagtgaaattgctgtaacgtaaggtaagcacaagtcataagtcaagcttctatgcatgtgtgagtctgcactttgtgtggctccattggtttatttgtccctccttgcaccaatcccacactgtcttatttagaacattttaaaaattacycttgatatctgatagtgtaactcttccaackttgttcctctcctaggggatattcttggccctttgcatttctacctacattttaaagtcatcttgtccatttctaccaaaaactactgaaatgtcyggaatcgcactcaatctatagatcaatttgtggagaackgatatgttgcaacaatgactgctctaattcataaacatggtatcagttatttctgtgcaaggaaactcccagaactctctcctaatccagactrggctgggatgagtggcctgttgcaggtggggtgggtggagtggtcctgccttcctgaaggtcttgtgtggctctgcttcacatctctcatgctttttggaacagttgaggagctgacacatgtgtcctcatgaccgtggcaggagcaccttctcagacacctccttgcattggttgctcactgttttaatcatgcactgttgggtctgacatgaatttggagaaatatgtgacctaccaaaggcctcgaaaggcatatctggggtctctgcattctcttcatttgttgcagacaagttgttcaaagctaagattcaggatgtgatggtgctcatggcaatttccctgctgcactaattttggaattttcttttttgttccattgttattcttggctagtttcaaaagaggagagtataataaaaatgacacgcatctactatcattaaacagaagtctccatactactttccgttcttttatttttcaaaatcatcatatgtaaaatagacttcttttcctttggtgtacagatctatgaaatataatgctattatatgtattatatatattatatttataatatagagtatatttattatatttattgtagtatatattatattttatgtaactcccaccataaacgggtacaaaacaattccctcaatgcaattatttatcagttctagtagttttgatgtagtctttatggttttctgtacgtaatatcatgtcatctgcaaacaggraccgtattatttcctcctttccaatctggatgccttttatttcttgctcttgcctaattactctagctaagactgacagtagtactacgttgaatggaagtggtgagagtgggcatccttgtcttgttcttgatcttagatggtttgacgcttgtctatagtgatatgctttgactattttcttcttatcttttgtgtatctactamagatttttgctttgtggttacttgaggcttgcagaaaacatcttatgtttataaccagctatttttaagctgataaaagcttaattttgattgcataaataaactctacatttctactcccccacctcatattttatgcttttgatgtcacaatttatatcatttcatcatttgtatctctcaacagattattgtagctatggttgtttttaattgctttatcttttaaccttygtactagagatagaattgttttacagaagaccattgcctgattactagtttgaatctgacaatgtacttacttttaccagtaagttttttatttttgtatttttatcstatcaattagtatccttttaatccagcttgaagaattcctagaatttcttgtaaggcacatctaatggtgatatccttcctcgacttttgtttgtttgagaaagtcttattcttgccttcatttttgaaagatagtattactaggtatggtattcttgggcagtaatttttttttcttttaggattttgaatatatcatccagctccttcctggcctataaagtttctggaaaaagaaaatccatggatatcttacacggtgggcatcccttttgtgtaactatttgctgtcccttgttgctttcaaaattctctctttgtctaaatttttaacaatttgattataatatgtctcaaatgtgtgtctctggatttttcctatttggtgtcatctgagtttcctgaatcttgatttcaatttatttccctaagcttgggaggtttttccccatcatttctttgaatatgttttgtgtccctttctccctctcttcctcctggtctaccaattctgaatatattgttctgcttgttgaagtcctgtaagctatctttttcattctttttacttctaggattggattatttccaatgacatgtctttaatctcactggttctctctttcacttaatctggtctgctgttgaacacctctactgaatttttcagttcagttattatattcttcagttttataatttctattggccgcttttgaaatactttctatctcttttttgaaattatttgtttatgcatttttctcctgaccttagtgaacatctttatgaccattattttgaattcctcattgggtagatcatacatctccacttcactagggttggtttctgcagatttatcttgatcttttatttggaacccatttccctgtttttctatttcctttgtttctctgtattagtgtccgtgcattacataagacagcagcctctcccagttctgtcagactgtgagactcccagttctgtcagtgtaggagaaggccctcaccaattggtccagagattctgaggtgcctcttaaatcctggtttgtccaaaccactgtctctgattttagtgccccccgactgcccaccgtagaattttacaatgtgccaagtcctgtcagtgccttgagataggtaagatagaaactagatgcagttggaaagattggagtgttaaatatatgttccagtttcttctttgctcagggtgaagctaagagcaagagtttatctcccactctctatgcactatgtcagaagaaggatctgtgacaagtgtctgcattttcatgcagaatgcaccctctgatagtcactagaagttggattgttgaatgtacacttctttattttctgtcgtccacggagactcagaaatgcagagacccaccaattcccaaagttaggtggttaaggaggcactcctccgggtgggagctgtagaagttgtggcacttggtgcacaaactacttctaaaaggaatctacagagctggttttatcactggggtgaggtggagggaaaggcttgggaagtgcctgaactctcattcagaatcctggaggtctatcgtttgtcggccctgttggctcccagatgcaggctagataggagcctgatccttaagcagtaactggaaaattgtgcagactaaccccttccagggagaaactggaaggcgtgtatttaacctcttgtctgcattggtccttgcgggtgtaactcctataagtgcttgcatgcccattttttttctttcttttttttttttttttttttttttgagacggagtctcactctgccgcctaggctggagtgcagtggtgcaatctcggctcactgcaacctccgcctcctgggttcaaatgattctcttgcctcagcctcccgagtagctgggattacaggcatccgccaccacacccggctaatttttgtatatttagtagagacagggtttcaccatgttggcaaagctgttctcgaattcctgacctcaggtgatccacctaccttggcctcccaaagtgttgggattgcaggcgtgagccaccgcgcccaaccttgcctgcccatttaaaactacctctttgtaccgtaatctagggagactagcaaatgccaagacgctttcattcccagagttagacagtttaggatgcagtcttttgggtgggagctgtaaaagttggggcagtcagtgtgtggacaaacctcttccagaaagaatgggtagatctggatatatcacaggtgaaccacaggagaggagaaggcttaagatgtgctgagctactgcttagcctcccggagggctatacactagtcccccttatccatgggtgatacagtccaagacattctgcagattcctgcagctgtgtatggcaccaaaccctatatatactgtgctttgtttcctatacatacctatgatgaagtttcatttataaattaggcacaataatgaaggaaacataataactaattataaaatagaacaattataacaacatatggtgataacagttatttaaaacttacaaactgtctatttctggaattttccatttaatattttcagactgcagttggccatagttaactgaaactttggaaagaaaaaccatcaataacagaggaatattgtagtttgtcagcccggttaactccctaattcaggctagttagaagctctgctgttagcagaagttggaggagtataccaacaaactccttttagggttttgctactttgttctgtggtctagggagacttgtgtatgcctagtcccttccactaccagagctaggtgaattaaaagtcaaaccatgggaaccttggagctagggtcatatacatgtggtccatacccttctctcctcagggagaagttatgtgttgggagtttttcctggtttatggtgcagtacccagggtgatatttgtgcctgcgtgtgcctcagctttttctacctgcttgatgtgaatattttctcagttgtctgctgtgtaagagactctcaactttttctgactttctctcaaagaaaatttatccatgtgtaggtgtttattccacgtgtccatgggtggagggagaggtagaagtctcctgtgccaccatgttgctgatgtcacctcccagtaaagttttctaaaacaaattacttgaccataaagcccagaacaacaagaagtgaatcaaaataaaacttagacaatggggttttctagatatacaatcatgtcatctgcaaacagggacaatttgatttcctcttttcctaattgaataccctttatttccttctcctgtctaattgccctggccagaacttccaacactatgttgaataggagtggtgagagagggcatccctgtcttgtgccagttttcaaagggaatgcttccagtttttgcccattcagtatgatattggctgtgggtttgtcatagatagctcttattattttgaaatacgtcccatcaatacctaatttattgagagtttttagcatgaagggttgttgaattttgtcaaaggctttttctgcatctattgagataatcatgtggtttttgtctttggctctgtttatatgctggattacatttattgatttgcgtatattgaaccagccttgcatcccagggatgaagcccacttgatcatggtggataagctttttgatgtgctgctggattcgttttgccagtattttattgagggtttttgtatcaatgttcatcaaggatattggtctaaaattctcttttttggttgtgtctctgcccggctttggtatcagaatgatgctggcctcataaaatgagttagggaggattccctctttttctattgattggaatagtttcagaaggaatggtaccagttcctccttgtacctctggtagaattcggctgtgaatccatctagtcctggactctttttggttggtaagctattgattattgccacaatttcagatcctgttattggtctattcagagattcaatttcttcctggtttagtcttgggagagtgtatgtgtcgaggaatttatccatttcttctagattgtctagttaagctgataagcaacttcatcaaagtctcaggatacaaaatcaatgtacaaaaatcacaagcattcttatacaccaataacagacaaacacagagccaaatcatgagtgaactcccattcacaattgcttcaaagagaataaaatacctaggaatccaacttacaagggatgtgaaggacctcttcaaggagaactacaaaccactgctcaaggaaataaaagaggatacaaacaaatggaagaacattccatgctcatgggtaggaagaatcaatatcgtgaaaatggccatactgcccaaggtaatttacagattcaatgccatccccatcaagctaccaatgactttcttcacagaattggaaaaaactactttaaagttcatatggaaccaaaaaagagcccgcatcgccaagtcaatcctgagccaaaagaacaaagctgcaggcatcacactacctgacttcaaactatactacaaggctacagtaaccaaaacagcatggtactggtaccaaaacagagatatagatcaatggaacagaacagagccctcagaaataacgccgcatatctacaactatctgatctttgacaaacctgagaaaaacaagcaatggggaaaggattccctatttaataaatggtgctgggaaaactggctagccatatgtagaaagctgaaactggatcccttccttacaccttatacaaaaatcaattcaagatggattaaagacttaaacgttagacctaaaaccataaaaaccctagaagaaaacctaggcattaccattcaggacataggcatgggcaaggacttcatgtctaaaacaccaaaagcaatggcaacaaaagacaaaattgacaaatgggatctaattaaactaaagagcttctgcacagcaaaagaaactaccatcagagtgaacaggcaacctacaacatgggagaaaattttcacaacctactcatctgacaaagggctaatatccagaatctacaatgaactcaaacaaatttacaagaaaaaaacaaacaaccccatcaaaaagtgggcgaaggacatgaacagacacttctcaaaagaagacatttatgcagccaaaaaacacatgaaaaaatgctcatcatcactggccatcagagaaatgcaaatcaaaaccacaatgagataccatctcacaccagttagaatggcaatcataaaaaagtcaggaaacaacaggtgctggagaggatgtggagaaataggaacacttttacactgttggtgggactgtaaactagttcaaccattgtggaagtcagtgtggcgattcctcagggatctagaactagaaataccatttgacccagccatcccattactgggtatatacccaaaggactataaatcatgctgctataaagacacatgcacacgtatgtttattgcggcattattcacaatagcaaagacttggaaccaacccaaatgtccaacaatgatagactggattaagaaaatgtggcacatatacaccatggaatactatgcagccataaaaaatgatgagttcatgtcctttgtagggacatggatgaaattggaaatcatcattctcagtaaactatcgcaagaacaaaaaaccaaacaccgcatattctcactcataggtgggaaatgaacaatgagatcacatggacacaggaaggggaatatcacactctggggactgttgtggggtggggggaggggggagggatagcattgggagatatacctaatgctagatgacgagttagtgggtgcagcgcaccagcatggcacatgtatacatatgtaactaacctgcacaatgtgcacatgtaccctaaaacttaaagtataataaaaaataaaaataaaaaataaaaataataaaataaataaaacagaaataaagaagctagaatcagaggtttctgatcatatatactggtagccactatatttataaaatatgagagtaaacaattttggcatagactgtaaatgatatgaattctgacaagataacataggcagacacctcctcatttttcatggcaaggaatgcgttcatgttgtctaaaattaaaatctgtttagatacaaccagtcttcaatgtttttgtaaacttcagtgtatgttctaggacacagcaacaatcagggagctccttgcctaagtgaatggccatattttatttcttttgagatatatttatgctatagtttagatat

SEQ ID NO: 97566 - DNA, 13240 bp, Homo sapiens
  misc_feature (1)...(13240): n = A,T,C or G
cagagcgagggagagggccaggacttgaatcctgtctagtttcagagtcagaactctcgagccctaggatacacgacatactctgctactgaagcaagtcgtttcaccagagaactgatttgcctacattaaaagaaattttttttaattaaaaaaaactttttttcttttttttttcttcaagacggagttttgctcttgtcacccatgctggagtacagtggcgagatttcagctcactgcaacctccgcctcctgtgttcaagcgattctcctgccccagcctcccgagtagctgggattacaggcgcccaccactcggcctaaaaaaacctttttttgtagagatggggggtcttcctctgttgcccaggctggtctcaaacttctgggctcgaataatctgcctgcctcagcctcccaaagtgctgggattacagacgtgaaccaccgaatccagcctaatttgcctacattttgaatattttttttaaaacaagttttagttttgcttaggttttgtcccctgtgctgcccttgtccttttacatatgaaaggatgggctggccgggcccagtggctcatgcctgtaatcccagcactttgggaggccaaggcaggtagatcacctgaggtcaggagttcgagaccagcctggccaacatggcaaaactctgtctctattaaaaatacaaaaattagccgggcatggtggcacgtgcctgtaatcccagctactagggggctgaggcaggaggatcacttgaacctgggaggcggaggttgcagtgagccgagatcttgccactgcactccggcctgggcaacagactgacactctgtctcttaaaaaaaaaaaaaagaaagaaaggatgggctttccccgaacctagttcttgtttctctcagtggacttttgccccggcctgcccactcctgtctccgtttctgtttctggtggcaaaatgactctggttaagggttctagaccaggtttaaaggatgcgctatgactgtcttaaaagttttcagctcattgttatttggagaactgatctttgttgaaaacgcattgagcagcccggtgtggtggctcacatctgtaatcccagcattttgggaggccaaggaggatggagggcttgagcccaggagttcgtagaccagcccgggcaacaaagtgagacccccatctctacaaaaaaaatgtttttttgatttaaaaaacaatttcttttaatgtaggcaaatcagttctatggtgaaacctgctttaattagccaggcatggtggcgtgtgcctgtggtcccagctactcgggaggctaaggtggaaggattgcctgagtacaggaggtcaaggccgcagtgagctatgatagcaccatagcaccactgcactccagcctaggtgacagagcaagaacttgtctcaacaaagaacaaaaaccaaaaaaaaaaaaaaagacggggagactgaacactgtccaaacagccattgtatgatttcggcttatagaatggtcataggatgagcaggagatgaggggagagggagtctgggccttgactgctgaagggaaggtgtggagccttgggtagtggggagccatggcaggctgtagagcagaggagtggctcaatgtggtaagaacagtgagtaatttgggaagtgagtcacctggctgaggctgggtgtttgtggagaggaggcatatctgactgtgggtcacggtctcttccccactggctttctttttttttttttttcagcatggtctcactctgtggcccatgttggagtgaagtgaagcaatcatagctcactgcagcctcgacctcctggggtcaggcaatccttctgcctcagtttcctgagtagctgggaccacaggcgccaccatgcccagctaatttccttttttttttttttttttttgatagaaacaaagtctcactatgttgcccaggctggcctcaaattcctgggctcaagtgatcctcctgccttggcctcccagagtactggggttacaggcctctccctactgactctttttttttttttgagacggagtctcgctctgtggctcaggctggagtgcagtggcgcaatctcggctcactgcaagctccgcctcccgggttcacgccattctcctgcctcagactcccaagttgctgaaactacaggcgcccaccaccacacccggctaattttttgtatttttagtagagacggagtttcaccgcattagccaggatagtcttggtctgctgacctcgtgatccgcccgcttcagcctcccaaagttctgggattacaggcatgagctacctactgtgcccagccctgactctttttttttttttgagatggaatttcactcttgttgcccaggctggagtgcagtggcgtgatctcagctcactgcaacctctgcccccccgggttcaagcaattctcctgcctcagcctcctgagtagctatgattacaggtgcccaccaccacaccaggctaatttttatatttttagtagagacgaggtttcgccatgttggccaggctggtctcaaacttctgacctcaggtgatctacacacctcccaaagtgctgggattacaggtgtgagccatcgtgcctgaccaatgtgtacatattaactcactcagtcttcacaaccaccctgtgaggtgggcagtgttatgatccacattttctaggtggggaaactgaggccaagagcaggtaaataatgtgcctaaggtttcagctagtaaatgacaccggatttgaccctggccactccactgcggtggaggcgctcatggcggagaagggtgattgtagctctctccctcgtcaccctagatcaaaatggactcacagatgacgaagcaggcgctgaatgagattgagacgaggcacaatgagatcatcaagctggagaccagcatccgcgagctgcacgatatgtttgtggacatggccatgctcgtagagagccaggtactggctctgccacccatgccactctgggagcctccctgggcctgaggtcccctcttccagcccagcccccatccctccctgtgcatgtctcctctgtctgcagggagagatgattgaccgcatcgagtacaacgtggaacattctgtggactacgtggagcgagctgtgtctgacaccaagaaagcagtgaaatatcagagcaaggcccggagggtgagcggggcaggcggcctgggggtaggcgggggagcccaaggctgagcccgggctgaggtgagtgatggcagcgggcgggaggccttatctctggctctgacctcttcctgtttctgttttctctcccctcttctccctgccaccctctgccctgtctgtccctgcatctgtccgtgtgtcgatctctctcactgtctgcctgtctcactcctctttctgctgcagaagaaaatcatgatcatcatttgctgtgtggtgctgggggtggtcttggcgtcatccattggggggacgctgggcttgtaggccccccccacccttctctctcccagacccttcccccaccacatcgggagcaatacccccaccacccctttcactccatcccctgctccaggctcactcccaaaacagacccaggcagccccacccctcctccacccccacggcagaccctggtgtccctggacctcaccgggccatggacccccccccgtccccgcacgtagatcgcagcaggcgtgattacacatgcacaccaacatgcatgccgccggcacatgctcgagacgtgtggacaccccagcgtgcgtgtgcgtgtgatgtgtgtgatgcaccagagcaccccctccacccccaccttgggtgtgtgtgcgtggtctgagcttcccccttcaccggggctgttgtgtagactgcagccaagtgtaacacagcagtccatcacgccctctctgtcctctgtgaacagtgtgtgtgcgtgcgtgagaccacagatctgtggacacaccatttgtgtacgtggaattttgtgtttcagtgtttgaacctaatgcaacagcaacaaagccactgatacctgagccctttgtgtctgctacaaaccaggcaggtggtgtgtgtggactcacactcacattctcagaggatccagggaggcccaggtacacacaggccatggcagacaccccatgtctttgttaccccaggggctgtggcatgtcccaggagggtgtgcatgtgtgtgtgtgtgtgtgtgtgtgtgtgtccaggatgtgcctgaagtattgataggtcttctcagatagagccctccacactgtggactggacacctgttttgggagggcacagaaatgtgtatttcttgctacctagaatgcagctgtgtgtgtgtggcgtgcgtgtgtatgcacgtgtgtgtgtgtgttaggggctctctacatggtgtgctttttaatttttttttgttttttgttttttgtttttttcgagacggagtcttgctctgtcacccaggctggagtgcagtggcgcaatctcagctcactgcaacctgtgcctccctgacgcaagcgattctcatgcctcagcctcccaagtagctgggactacaggcgcctgccaccacgcctggctaattttagaattttagtagagatgaggttttgacatgttggccaggctggtctcgaactcctgacctcaggtgatccgcccactttggcctccctaagtgctggcattacaggcctgagccaccacgcctggcctacatgatgtgtttctgtcctgcctgacctacatggtgtgtttctgccctgcgtattacacacacacacacacacatgtgcgtgcacacacacttctaaggacgtggccccatctggctttgtctctccagttgtccttgccctgcccccctccccagaggtgctgcccagtgctggtgtggccacacacggctacatcattgtgcaggcagagctccctgcctgcccagcctcagggctctgcatgctcacacctagatcctcatcttcctccatgtctctgcccagcatagccccgagcccctggaagctggtaccctcannnnnnnnnnnnnnnnnnnnnnnnnnnnnnnnnnnnnnnnnnnnnnnnnnnnnnnnnnnnnnnnnnnnnnnnnnnnnnnnnnnnnnnnnnnnnnnnnnnnnnnnnnnnnnnnnnnnnnnnnnnnnnnnnnnnnnnnnnnnnnnnnnnnnnnnnnnccaggcaggggccataccaggcacaaaccatgcacgctggcatgggtgcggggatcacacgaatgcctcctggaaggaaagggctacttgtaggaatgttactgatgaggcaagatgccaaggacttccctgcagggatcaaagatcaggacacgaccccttcctcacacacccacctcagacctgggagaggactgtgtgtcccccactgccccatcggatgctctgggctctgcctcagggaactcgggtttggggaaatgtctatttcagaagtactggagtggccagtgtggcagtggccactcagggtgggctgggtcctgagacccatccccgacacctctcctgctgaaccctcaggctgctccccacaccagggtgtgactgaggggtacacaggcctggatttctggtgtgaggaaggggctagcacctcccctgttgtgtagccagcacaggcacaatttgtgggtttggtggcaggtaggtggtgcgtgggagaaaggacagtgttagaggtccccactccgtggtctaggatcatgaaaggtgaacacacaagtacacaaatgtgccatgccctggcatggggcttatgtgtgcacaggcaaggcactcggtgtgtgtgtgcggaccccagggtcccaggtcatgtgaagcgtacgtgtgtgtgcattgtatgtgtgtgtacattgtgtgtgcattgtgtgtgcatgtggccaaacagatgtgacctcccagaacacagtacccctccacctctacccgagctcagacagccgagctctcccttgtcctgtgtgtgtgtcagtgtggccacgtgcgtaaccccaggtgggctgtcctgagctgggggcctgcctgtcccttcccagaacgcccctctgcaggacaggaagtctgccccaagtctggccacggccctcctgctcccatctcgggctgcttgggagacatcagagcaggccccagcccccagtcccctcttccggccgcctggacaggacccccattcagcccaggtgtttccggaagtcccacggccttggggccacaggagaagrgttgaagcgtggctggggcaccactccccccacctggagtggcattgggcccacagctgcccatctctgggcctcaggtggaccaggggatctctaagggtctgctgtgccctttctatgcgtcctccacatcctatgatgtgcctgcttgttggctgctgtctgtgtgcgtcctggcatgttgtctggaggctggtgtcttttgcatgttcttggacaaatgtgtgctacctgcccaggcgcctgcaaccattgagcccacatgtgccccacgtgtgccctgcgggtggtcccgggcctggccagggctcagtgctcctcttccccctcctccctgttcccacccctcatgaagcacatgcgtgtccatcccatgtacccgtgggtcgacgcacgctcttgccacgccctgagcgtgtacacatgatgtgttctatgcattcaccctgccccccagcccgccctgcagaggacaagatgggtggccccggctccctttcccctaaccgcccctgcccgctgtgcagccgtgtgcgttggcgtgtgtttctgtgtcactggcgtgtcacgtgatgtagccgtgtttgctgacatgagcccctrcccccttctctgtttctccgttggtttctagagctctctccctccccttctcagaggggacaggactcctggggyctggctggggcccagagccaggccgccctctcctgttagccctcagagtcccatttctgttagccctcagagtcccatttctattggtgaccaacttgcaaatggataaaacacaggaaaatcctgccccccccttcctccctgcatgtcctgtccccagagccccccaccccaccctgggccaggtcaggccctgtgggacgggagaaatagcaaccaatccaacagcgggtgtgccgtgtgctcacttccttctgtccccacgtgggatgggcgccgtggggaggcggacatggggtggggggatgggagggagagctggacagacagatggacacggtcgtggatgaggcttttaatccggggtcagccaggtacagcattggggacatccccaggcccagggctggcgatgtgctgggaaggaacttaggtagagaggtgggaagtgaaagcatagggaggccatagccctccagaggggaattctaagacagacagttgaaggtgaggcctttgaaaaacaatgggaacatcacctcccaaagagggactgaggtggctggaggaaccagagccgcctctgcactctgcaccgagggtcgcgtgtggctgtcaggagagcagcgtaagcctgtggagcctctgctcgcttcctgctcagaaagccagaagagagctggggcaggccaccagggcaccagacactcaccaagcggccatcaggactgggatgagaggacagaggaaggacactctgtccccaaaccctcccgtgtcctgacggccctagaacttggaggtgtcaggacacaacacagactcaaggctcctggattgaaaatgtggagggcttgggccaggcgcggtggctcacacttgtagttccagcgttttgggaggcccacgtgggaagatcacttgagcccaggagttcaagaccagcctgagcaatatagtgagaccctgtctctaaaaacaacaaaaaaaagccaggtgtggtggcgtgcacctgtggtcccagctgttcaggaggctgaggcaggaggattgcttgaacccaggaggttgagggtgcagtgagctatgatcacaccactgcactccagtctgggtgacagagcaagaccctgtctcaaaaaagaaaaagaaaatgtggagggctctacgacaaggacagccattctggccccagagccctgcctcctgctctggaatgcagctgtcccttcccgtccagggtgtgagggctcgggacctgggtggatgtgctgtatctgggcctccaggccccagccccaccgtcactgggctgaacccgtagcggcctgtacccagagaatggtgcgggtccggctatcctcccacgagaacaggggctcatagccgaaatggcgctgagccttgtcggtgctgacggtgaaggtggtgttggccacggccagcgtgtaggggttcagcaggggtgcgtagagcaccagtggccgcagcagccactgcagcagggcattgagggcagccaggaacaccagcagccagtagggcagcaatgggcgggcgcccaccagccgcagtccgcaggggcccaggaactccatgttgaaatcctcgtagctcctgtagggtgatccatcgtagcagaagtatacctggccgcccatcagggctgcccgctgctccagctcccgggctgccagcacgtgcatccaggcaacattgcctgccggtggcggaagagaggcggacacacccctgagtgcccttgcaacaccacatcgaggctgctctcctgggccaccccctctttgggcccaggtagttgccgcccacatccccacagcagcctgggaaaggctgccttctccctcgccctggtagtcacttgctctcctgggccagcctgcatctgcaaagaacctggggagaggatagagaaaccaggacctgcgtggtgggccctgagaggcttggggactgcaggatggagtggcaggtgaccttattccctgtgtagatgctacttcctttaaaaaaagttttagagacagggtctgtctctgtcatccaggctggagtgcagtggtgcggtcatagctcactgcagcctccaactcctgggctcaggccatcctcccgcctcagcctcctaaagtgctgggattatagatgcgagccactgaacccagcccttttagtgctgtgtacacactgtccctctcctctcctctcctggggaatggctgctcccatagctgcaatcttctctgtagcctatgatacactttttaatgtcccaacttgcatggatcctgtattctctgcaggctgtggagacataatcacagtctaccttggcccatgtatagaccatatttttctagccagagtccacacttctctcccagggccatgtgggtcctgcccccttctagagcaagtcctcctgccatattctcagcctccccctgcctagcccagtcctcacccacatagacccggccatgctccacagaggccgggatggcccggaagagccaacctcccaggcgcaggccctggcggtagaagtccctcatgatctggtggccttcaccgtagatgcccgtgggacgaagggcacacgtcaccaggggcagccccccacggacctggtggcaaaggcaggtactgctgagacctgggacccgacagcttgctctcggccccggcctccttgggctggcagggtaagggggtgtgcagggcaggagccccatctctgcgcctcctttttctgggctcaccttcctcccgttggcctccaggaccagccactcggccagggccttgctgcaaggataggggtgcctgtgcactgcttcgtatggggtgtcttcgttgcccctggtgggaggagaaggaagactcaatgctgagggaaatgggctcttagaggacaagagggcctgccactcacctgtagaaggggtgacctttggtgttaggccccacaacttccatgctgctggtgtagaccaggaaccgtgttccggtctgcacacaagcctcgatcacgttccgggtacctggcagaggaggaggcgtatccaagctgcagcttcttccctctctgcatcttcctcctccccatcccaggtccagggaaaaccatgacaggtcaggggaggcgggggcagggctgtcaataggacaacttgtcccaggggagtcaccggaggtcaaggccaaagacagagtggggaacaaacaggcaagatggccaggagtgtccagagctcctcaccctgcacgttgacctcatggatggtcttgggactggccctgccaaacacgtctaccagcccagccgtgtggatgaccacatgggctccggccacagctgctgccacctcatgggcctgggtcacgtccccctggatggcagtcaccctcacaggccctggccggggttggaggacacaggccatgtcagagctggggccagaggccagaggctgggttcatcttccaccctggagtcacgttcccaatgtgactcactcgacccatccatgtggacagaaaccagcatcatctgttccactgcaggggtggggatcccagcttgggaagggttggggaagcgtccacaccctctccaccacaagctcccccaacaagaacctgtcttcagctcctccagccagggacccaggtgttggtcaaagacccgcagctccccgagccggggctcccgctgcagcagcattcgcaccacgtgctctcccaggaagccacagccccctgtgaccaggtacaccagcttctgggcctgtgcagagtcggccatgcctggctggggaagagaccttggctcatccaggggctggctgccacctgctgcaaccacctgttactgctggaggtgccctggagcggtgacgaggctggcgtttggcgggagggcagagctgatcctgggagctgcagcaaccaggccacctgccgtctgcccctgctgatggctgagttacggagagaggggcgggcttggggtgcaggaaggggtcagggtttagggagagagatttgaaggcagtaaaagggtggggaggccaggagttgagggaggtggagggaaggttataggaaggtgggaagggccggatggagggaaaggccacctgggcactggcagcgcctctgcctacctgcagccgctatcccagggtgcccagactggcctggaggggccctcttctttcgtccagggctggccggcccgcacaccgtccttccgctggctcctccttctccctcctgccccattccaggaacagagacccgcccagccacaacccccaccactcttgccccaaggcgccccctggcggccgctctgtgctccactggcatctgggtccagcggagaacttggtggggatgaagctcgaacttgcagagtgggctgaaggggtctggggctgtgggtggagccagcggtgacctcatcccacagtgtgacctcaggccttccctcctgctgggcttcccaggaggccggaggtccagctgcagctgtgattgtaggaaggggaggcctgaccttggcaccaccctggcgggcactggtggggtattcctggtgcgggtgcggctgctgcagcctgtcagggggtccgagacagtctcggactgtctctgcaggtctgggctcttgcctgaaggcccctttacctgccccacacttcaggtacccacttttccctctcttcaacttgcacaaccctccgtgccctctacccccaacccctcgctcctgcccaaatacaccgaccaaacacttttgtacaataaagtttaatcacaattataaaaatgtggcgtcgggtttgcgctattaacatatgtacagtccagcccagcaaaagggacccaccccgccatcctggcctggctgagccggggagtgacaccagggtggaagggtgaccctcagggtctggcaggaacagatgaggcagggttccaggcacggagtccccaggactgggggtgcagagcccccccagggggagaacatggccactgccccagagacccctaaactggggaggggtacacgcagggcgtaaggggaagtccccattaacacaaagcgagaggactgtgtagccccccaggacagaatctgtacaggccggcaccccaggtttccacaggaaacagctgctggctgctacaaaacatttacagcttcttctccgcaaagaaaaacaatcagggggtggtgggcaggggcgacaggagaggcagaagctgcctccagggactgaggctccctcgctgggcttggggcccccaaccccacgcttggagatgggggcatgtgggccctgctgagcccactaaggctgggggggtgctgggagctcagggcaccagggggaataaataggggtgtgggcacccatcctgccccacctcagtttagggagccccggcagctctctgtgccacacagacacgggatcttgttgtcttccagtgggaacttgtagtcgtaggtgatctcctcgtccacgccaatgggctgcttggagtagatcacgatcttcttctgggactcgatggtgatgaccttggcgtagcagttaggctgcggatggaagggcgtgtgagccgtggccacccccaccgacccccaactcctgccccggctggcccctggcgcaccgtgcagcagtggttgatgaatctggccaggttgccacacttggtggcatcgatgatggtgtcgtggtccacccggaacaggtagctgctgccaatgccctcctgcacgtagcgcttctcccgcatgtcggccaccatctgccagggtgagatgcgatggtcagggaagagtcccccacttcctgcccctgagcacgcctgccagccagcaccccaggtccacgcccaccaggcctggagctgcagctctgcctccagctcccgctaacccggcactgactctctcgactctgcttccaggagccctccctctttggggcagcatcctaagcctctggtggccattctaagtcacccgcagggaactccagggaaatctgcactgggtaagagagccactgactccttcgagcatctgcctggtcacagtggggtcccggactgctggggcaagtctggggttggggcagctcctgaaatgactggccatgtcaccaacggcaccctgctcatctct

SEQ ID NO: 97567 - DNA, 13863 bp, Homo sapiens
ctttgggaggccgaggcaggcggatcagttgaggtcaggagtttgaggccaaacatagtgaaaccctatctctactaaaaatacaaaaattagccaggcatgatggtgcgtgcctgtagtcccagctacttgggaggctgcggcaggaaactcacttgaatctgggaggcggaggttgcagtgagctgagatcgcaccactgcactccagcctggttaacagagtgagactctgtctcgaaaaaataaaaataaaatttttttaaaaaatgataattaatttttttttgagacagtcttgatcggacacccaggctggatggagtgcagtggcatgatcttggctgactgcaacctccatctcctgggctcaagcgattctcctgcctcagcctcctaagtagccgggattacaggtgtgcaccaccacgcccggctaatttttgtatttttagtagagatggggttttggccatgttggccaggctggtctcaatcccctgaccttaagtgatccacccacctccgcctcccaaagtgttgggattacaggcgtgagccactgcacccataatttaaaaatttttttttttttgagacggagtctcactctgtcacccaggctggagtgagcccaggatctcggctcactacaagctccacctcccgggttcacgccattctcctacctcagcctcccgagtagctgggactacaggtgcacgccaccacgcccggctaattattttgtatttttcagtagagatggggtttcaccatgttagccgggatggtctcgatcttctgacctggtgatccacccaccttggcctcccaaagtgctgggattacaggcgtaagccaccgcgcccagctaaaattcttaattcttcgtcacactagacacatttcaagtgctcaacagctacatgtggctagtggctacggtactagatagtacagctatagaacatttccattacaataggaagttcgattcggcagtttagaccttgaggagttcttccagtttagggtatttcaattttttaaatcacaccacagtaggaagtacacttggcactgtaacatgtctgtatatacacacaagtatgtgctaggatcatcgggaaggtaaggctggaacaagaggaatcctgcacacttttattgggtgtgaaataaaagcttctcaaaacaatacctacacttaataaagtgcaacaccctgatttttctatcttatccactttctttcttccatttaaagaaatttaaatgttgggcttgcccactaactcatgtactcagaaggatgaagctgcaatagctgaaagtaacaaatgtctgggtgtctggagactttgacaaatcttgctctggtttgcactcctgatttttataaatttagaaactgagacttggtcgggcgcagtggctcacacctgtaatcccagcactttgggaggctaaggcaggaggatcgcttgagaccaggagtttgagactagtgtgggcaacatagcagatcccgtctctacaaaaaaataaaaaattagctgggcatggtggcacgtgcctatggtcccagctactcaggaggctgaggcaggaggattgcttgagcccaggaggttgaggctgaagtgagccatgattgtgccactgcactcagcctagacgatagagtaagacgctgtctcaaaaaaaaaaaataacaataatatgtacaattattatgtatcaatacaagaaaaaaccaaggcaggtacagggatgcactcctgtagtcccagctacttagaaggctaaggcaggaagaacatttgagcccaggagttcaagtccagcctgagcaacacaccaagactcccgtctcttaagaaaaaaaccaaaatcattgctaaggcctctggctctgaggtagcacaatttagctggttgatcaaattcctgtctgggtccctaaacttatctgtagctcttctgcatgcttacttcacaggcctactgtgaaatgtcagtgaggtcatgtattaaaacacttagcttaggccgggcgcagtagctcacgcctgtaatcccagcactttgggaggccgaggtgggcagatcacctgaggtcaggagttcgagaccagcctgaccaatatggcgaaacctcgtctctactaaaaatacaaaaattatccgggcgtggtggcaggtacctgtagtcctagctacttgggaggctgagacaggaaaattgcttgaacccaggtggcggagtttacagtgagccgagatcattccactgtactccaacctgggcgacagagcaagactccgtctcaaaaaaaaaaacaaaaaacaaaacacacacacacacacacacacacacacacacaaaaaccatttagctgaatacttctgctcaccggctaacaagtgtttggcattattattctaattccagcccaccgttttactggctgtgtgaccttgggcatgttacttaatctctctcagcctgcttcctcacctaccaaaaaagtaactattcctgtgtgttgaattgttgggaaggatttgaggagcttatacatatacagcacttggcagggtgcttggctatagcaactgccgaataacattctcgtctttcccactgaacttcaagtcattttttctactaagacacagctactaggagacaaaagaggctaccagtgccggaggcctgagttctagtcccagctgtgccatttccttgctgtgagactgcagcgaagcccttaccctctgtctgttttcttacctatgaaaagtaagtaagaggaagtaggtaaagtccctgacacactacaggagcttaagaaatgggatttgctatggttttggcactggggcccgagagacccaagggaactggcagagaagctgggcctcctgggcccgtggatgggaagggatccggaccttctgcacatggttgatctcatcatgcttgcgcttttggttgcgagtgatcttgcgctcaggctgctctgcgagctcgctcaggtacttctctgagttcttctgtacagcatccttcactgtcttggtcagcgccagccggttcttgtctacccactcgtccagccgccggttaactgtaagtatgggccataagagtgctgccagggcagccaactccctgcacccacgcccagatgtgccaagccactcacagcccacgtagtgtacatagaattcctctcggccctcctggtcgttcactcgagactggatcacttcagcagaatctgtgatggaaaaaggctagggtcatcaggaaggtaaggctggaacaaaaggaatcctgcacactgagaagcagtttccagagttcagggccacacatcagctaacctcactggtccacctctgccattctactcaatcactgccacaactgtgaggtggatcaggttggggctgttattctcattttacgaatgagaaaataactggctgggtgtgtggctcacacctgtaatcccagtacttctggaggccgagatgggcagatcacttgaggccaggagtttgagaccagcctggtcaacatggcaaaaccccatctgtaccaaaaagatgaaaaaaaaaaaagccaggcatggtggcacacacctgtaatcccaactactcgggaggctgaggcaggaaaattgcttgaacctgggaggcaaggctgaggcaggagaattgcttgaacccgggaggcagaggttgcagtgagccgagattgtaccactgcactgtggcctgggtgacaagagcaagactctgtctcaaaaaaaagaaccccaaaaaacagaacaaaactgaggcttacctagggtcacagatttgaaaagtgataagagctaatacttaactgaatttaagtctgactctaaattcaatgctcattttaccacatacccgcagttgttcatttgttcagggatcatgagtgctggctctggattaagataacctacattaatgtataattccagggctgggcatcgtggctcacgcctgtaatcccagcactttgggaggccgaggtgggtgaatcacgaggttaagaggtcaaaaccatcctggccaacatggtgaaacttcgtctctactaaaaatacaaaaattagctgggtgtggtggcgcacaactgtagtcccagctactcaggaggttgaggcaggagaatcgcttgaatccgggaggcagagatcgcagtgagccaagatggcgccactgcactccagcctggcaacagagagcgattccatctcaaacaaacaaacaaaaaaaaatacacaaaattccagctccctacttcctagctatgtgtaactgagcaagttattccatctttctgagcctcagtctcttcatctgtgaaaagggataacagctgggcacagtggctcatgccagtaatcccaacactctgagagggtgaggtgggaggatcacttgagcctagaaggtctaggcttcagtgagctgtcatcgtgccacggcaatcccacctgggtgacagagcgagatcctgtctcaaaaaaaaaaaaaaaaaaaaagacaaaagggataatagtaccaaccttagaaggtgaattaatgcctccaaaatttttagcagcgcacctgacaattagcagagcattcaataaatgagtaaggcaaccactacgtgtctggccctatgctgtgttgttgccgggtacagaggacacagtgatgaatcacaagaagtgctgccctccagaagttcccagtatgatggaggaagacagagagagaaaattacaacataatgttacaaaaactatgactgaggtaggaaaaaaatgttgcaggaacatagagaagggaaccactcacttcgcctgaaggggaatcaaggatgacatcacaaaggatatgaagctaagaggatgagtaggagctaggcaggcaaacaaggagaaagggaagaaaaagcattccaagcaaagggcacaggtggtaaagggcgtgtggtcttcagagggcacagtgtgttctggcctggcaatgccctttcctagtgttggctagaaactggagaggtcacaaaaatgaatgccaccctaaggagtttggggttaattttgaaaatgagagaaggcagcagaactttaggaaagggaagcctgttgtttctggaaggtcttctctctgcggatggctgccagggacaaatggaaaaagaagacgcagagacaagagagggtgaggaagcagcgttagcaagaaaaaggaatgaagcctaagactgggcaaggaagtggaatgggaacaatcctggtgaaggcctgagcggtgggtttgtaggcgtcgctcggcataattcaaggtcaacagcctcccacaacccggctggtttctcagcgcccggaacgcggcgttctttcctcaagccccgcccctcctcctctccactcccagcccccggatcttggcctcactgacagcctgtcctcaggccccgccccaccccctggccctgagctccgccccgcccccagccctgggccccgccctcacgccaggtgctatccggtcgccggcacaggtacgtttctccgatctccaccgtgacttccggctcgccgcgcgccggggtcggcggagagacgcggcccggggatggggcggtcccctcagcggccgcattctccccgggcccgggctcgccctcccccgcgacccctgaagtccccgccgcaaccgccgcagcagctccctgtgccgccatcgcgggaagggaagtgacgccagaatcggacgccacgcagttcttttggctccgggtcagcagtgcgtggggcgggctcctcaaggtttgagggcggggtctgtgatgtagcaggagccgattggcttctgtggccgtccccgcggccccgcgagttggatgttgagtgtgcggcagtcttggagctcctggttttccgtgcggacctgtggctgcagcctatgggtgaggagaggagacagacttacctcatgcgatgactcaactcaacctttttttaatttatttatttatttatttatttatttattttgagacggaatcatgctctgtctcccaggctggagtgcagaggcgcgatctcggctcactgcaacctccgcctccgggttcaagcgattcctctgcctcagcctcccgggtagctgggactgcaggcgcgcgccaccacgcccatctaatttttgtatttttagtagagacggggtttcaccatgttgtccaggatagtcttgatctcttgacctcgtgatctgccagcctcaacctcccaaagtgctgggattataggcgtgagccaccgtgcccggccagctgaacctttttaaaggccctggtacctgcggaagccaagatgtgccaattttcagcgggcgctgcccccactttaacagggcagagccagagcggccgccctggtggcctggagccgcacactcgcgctggcctaatgtcgctccccgccccccccccttttttttttttgagatggagtctcgctctgtcgcccaggctggagtgcagtgacgcgatctcggctcactgcagcctccgcctcccgggttcaagcgattctcctgcctcagcctcctgaatagctgggattacaatcgcgcgccaccacgcccggctattttttgtatttttagtagagagagggcttcaccctgttggccaggctggtctcgaactcctgacctcaggtgatccgcccgcctcggcctcccaaagtgctagggttacaggcgtgagccaccgtgcccagccagtgccccatttttgaaggttgaagagactacttcccctatttgggatacagttggtgcggggaaagcagaacgggtgtgtccagggacaggccataattcaccctcacaggataaagtctaaagaaaggacgagttgggcggggcgtggtggctcacgcctgtaatctcagcactttgagaggccgaggcgggcggagatcgagaccatcctggctaacaccgtgaaactccgtctctactaaaaatacaaaatttagccgggcgtggtggcacgcacctgtagtcccagctactcgggaggctgaggcaggagaatcgcttgaacccgggaggcggaggttgcagtgagccgagatcccgccattgcactccagcctggggaccaagagccagactccatctcaaaaaaaataaaaaggccgggtgcggtggttcacgcctgtaatcccagcactttgggaggcctaggcgggtggatcacgaggtcagaagatcgagactattctggctaacacgatgaaactccgtctctactaaaaaaaaatacaaaacaattagccgggcgtggtggcgggcccctgtagtcccagctactcgggaggctgaggcaggagaatggtgtgaacccgggaggtggagcttgcagtgagctgagatcacgccactgcactgagggttctgtgagagtcagtaaaggttaaagccatttatatgtgtatggtccaaccatayacaatcggccctccatatccgcatgtcccacctttggagaytgaacgaagagcgggttgaaaatacagtgttgaggtatggtggctcacacctgtaatctcgcacttcaggaatccaagcaggaggatcgcttcaggccaggagttcaagaccagcctgggcagcatagagacctcctttctactaaaaatttgggggaaaaaaaaattagctgggcctcggggcccgcacctgtagtcccacctactcaggaggctgaggcagagggatcgcttaaacccaggaggtcgaggctgagtgagctataatccctccactgcactccagcttgggtgacagagaccctgtctcaaaaaaaaaggggggaaagaaaaggaggctgggcgcagtggctcactcctgtaatcccaccactttgggaggccgaggcaggcagatcacctgaggtcgggagttcgagaccagcctgaccaacatggagaaaccccatctctactaaaaatacaaaattagccaggcgtggtggccgcatgcctgtaatcccagctactcgggaggctgaggcaggagaaccgcttgaacctgggaggcagaggttgtggtgagctgagattgtgccattgcactccagcctgggcaacaagagtgaaactctgcctcaaaaaaaaaaaaaaaaaagactgggcgcggtggctcacacctgtaatcccagcactttgggaggccgaagcaggtggattacttgaggtcaggagttcaaaaccagcttggcccacattgtgaaaccccgtctctactgaaaatacaaaacagtcaggggtggtggcgtgtgcctgtaatcccagctacttgggaggctgaggcaggagaactgcttgaacccaggaggtggaggttgcagtgagccgagatcgcgccactgcactccaacctggccgacacaacaagactccatctcaaaaaagaaaaagaaaaaagagggaggaagggaggaaaagaaaaggaaaggaaaggaaatattgtaaggatgcagaacccacagatctgaagagctgacttcatatctgctgtttggcagggccaactgtaggacttgagcgcctgcagatttcggtattcacaggcggtcctggaaccaatccccagcagttaagcatgtataactatcaatcatataactatgtaacggttgaactatccgtcttagcaatatacaagtgtattgcaaagtgccagaccgggtaggtactcagtaaacattccctttggctattctctgaatcttgtttgatttataatgtggttattgggcttggaaacaattctgagaggagtggaatgctcagggcctgcggatgggtctctcagaggttacaaatcaagaaacatccgacaggcatggtggctcatgcctgtaatcctggcactttgggaggctgaggtggatggatcacgaggttgggagttcgagaccagcctggccaacgtggtgaaaccccatctctactaaaaatagaaaaattagctgggtgtggtggcacgcgcctgtaatcccagctactcgggaggctgaggcaggagaatcgcttgaacctggggttgggggggggtggggcggaggttgcagtgagcgaagatccagccactgcactccagcctgagcaacagattgagactccgtttaaaaaaacaaaacgaaacaaaacaaacaaaaaaacaatgtaggtgctccacccagatcctctgggagttcttgctgtttctgtgtgcccagattacctttgatgtgctttcaaagacccacaccagcacctgaggctcttcttaaaaaaccatccttaggttaatagagctgttcactttcccaactgactttaaccagtgactgccaagtggagaaattaatcagtaactctgaggtttagctctcttaccttcaaccctgaggcataattgactggttctgggcttttgcctgaggtcacatccttgcttggcttcctccccttccccttcctacttcccctactctgttctgggagcactttcttaagaaatcacgtggacatgaatcctctcagggactccaaccagaaacatcccttcccagctcaaaacccactcatgggccagctgcagtggctcatgcctgtaaccccaccactttgggaggctggggtggaaggatcatttgagcccagaagttcaagtccagcccggggcaacatagggctttgtagaaaccctgtttctacaaaaaattttaaaatttagcctggcatgatggtccaagctactcagaaggctgaggtgggagaatctcttgatcccaggagttcaaggctgcagtgaactctgcagccaccatattccagcctgggcaacagagcaagaccccatttctaaataaataaaaactcacccatggatccctatggctcaagataaatcccatgtttcagggccctggcctctgactgctgcctgcctctccagcctcagcaccctgccttgcagctggcgggatttttcagtctagcaagtcactgtggtttcctagcccctgccatttggcttccacatacaacttcccctccatccccgtgaagggtaggagatggtacaggcctagagccagcctcaggaagtttgctgtgggagctcacatgtgaaggcaagagaactttccagttctcctcccagccccaccaggccgcccttaggcctttcttccctggcaaggtgggtagggtgttcctacctaagatgtcatctggagttctgattcaggtctaaccttgagcctacctgatacctttgcccaaatccttggtcctttctatcagggccccacctttccttgcagtggggcacccagtccctgctagggcctgccaaggcacaaccttgtatgttcttttccttggcagcagcagacacagtatttttaacctactcaggcttgggaagcagttggctcaggagtttgcccagtctggtgaccttcacctctagaaactgtgactgccaggaaaggaagagtcaaaactgatgcccgaagctgggtcagtctgggccttcaatattatctgggacccggaaacatttgttcaacaagatgaatgaaagctctttgtataaggtgctgcagtcatcccactcccaccaaatcaaacatgcaacagacttgggacccattctactcctggcctgccaggctctcagggcaggtaagagactgggacacgaaccagttcaacccaagggctcagtgaacctgaatgggggcagaaacaaaagttcacctgccctccccacacacggggcccgagagggcattcaaaatgtgaactttaataacaggtcagagtgggggttccccaggaacgagaatgacggaactggtgctggaggcctcagggtgcccacttccctgctccaagttctggaggcgaggaggcaatggaccctgttgaggcagggcagtgcccagctccatgtaagtccatctgtctgggtccctgagacccaagatgcagcagtgtgtggagcagggggccgccctgcctgacccgggaggtcctgcagggaatgcggcccaggctggtcgggtgagcaggccaaaggctgtggggtcagatccggaagctttcctcccggccatcgatgtggcggagccgcaggtagacgtccgtgccaatgccctgcagggactgcagctgcagagacccaccgaggtactccgcgtaggcccgtgacgtgggcaacccgaagccaaagctgggggtgggcagggggacaggacaggaggcttcagaggcttgagtctcctggggtcccccacccctccatcctggcctggcagggtctcacccgtgcatgggtcctgactgggcgccactatgcatgtccagatggccaaagagggggctgatccgggggtcctgtgtgctggcctcagcagtagtgaagtggtagtccatgacccggtccagatctttgtgagcgattcctccaccacggtctgagatcctagcaagatggcaacaacaatgggcttggctcagctttgatggggtactcaccaccccccaagcagacagtgcaaagtctgccttcctgttccttccacccagagctggaatgtggtccacctagacccttgggccttgtttatatcatcctcacccctgccagggccactgactgcttataccttctcacaggatgtgacatttatcctcggcccagcatcctagaccgactcctgactatttctcaatttcaagctcctcagctgctgacagaggcaggatacctaggcctgcagctggccccagatccattaataagcagctcatggccatctcaggattcagagaatagtttgtctggtcagggaccaagtcccagaatggggcaggaaggggctcaaggtcctaaatcaagtcagaaacagtgcctagacccccatcccatccacctcagctcaactcccactcagggcaaacctgatgatcagatcgacatcattgttggcgatggtgatgaccacatctgggacattgtagggagtgtctaggtgactctccattgtggctctatgcagaggggaaagaccagtaggtacaagcaccccggttcctgtccgcccccaagccagcacatcaagccaccccacctcatggcattcttgagcagctccggcaggatgtagtccagtggcatagggatgaaggggaaccgggcagccacatggccattgatgcggacacggggcgcattgccatacttgtgctcacacaggcgtctgcggataggagcgagggttcagtcaggggcccctccaccagtggtttgcaactggaaacaattctgcccccctaagtaacatatggcaatgtgcagagacatttttgtttgtcacaactaggcagtactgctggcgccagggatgctgctgaacttcctaacgtgcacggggcagcccctatgacaaagaattatctggctggaaatgtcaatagtgccatggttgagaaaccctgctccccgcagatcatgccccgggcaagggctcagacccaagccttccctgccccagatgtctgcccaccccctgagccattcttgcctcacctggcaaagtccacccacttctcaataatcttctttggtgagagacgagtacagatgatgccgacaaagtcaggctggccggagaaaggaggtcaggactacccacgcccctagccccaccccaagatgctggcaacttcggaactgccccaaagcaccagccccacagcctcagcccccaggcccttgacccggatccccagcccagtctcctctgtctcacttaatgttcccaggtgggtctcaggtcccagagccccaccttgtcctcatgcagcgccaggtgatgcgtggccaacatgcggattccaagcctcgaagtcagcgtcttgtccaagaagtagcggacgagcttttcatcctgtaaagagtgaggtctcagaatcccgtgcccttcccacccccagcaggcccggcctctcctttgctgccccaacctctatgtgcttccggctctcacgtaggccctctgccaagagggtcaccacatccttgtggtcatccagcagctgtcgcaccagctggcagtactgggcctcgtccgcctggtccttgatctgcaggtcacagagtcatgaggaagggtggtccaagcccaacctctcagcccctcaccctgctctggcccagcactcaccggagggaagtctgtcagcttctggaaggcacggatatatagctcatgctgcaaggaagaggtgtgggaattcacaaagccgcatgggcactgagcagagaacagccacccccacctacccatggggatcaccacccagctggtcgaccacgtgatcaaacccccacttcgacccttccaggctccgtgaatacacacctttggcttctgaaggcctggggttgaatcctgtgtggccctgacacctttaggcaagcaatcgtctgccactctgggccccagactccccacttgcccccggggcagggtggcccgctgacctaaggtcctctctaccttaccacgtgcagtatggtggggttgcagccaatgatgaaaggaaggcagcggaagcccttgatgcggtgagcaatcctcactggaagttcttgctgcaggtaccgagcacttttctgggagaaaatgagaagggaaggcggggctggagcctgagtgtctgggagagctccagga

SEQ ID NO: 97568 - DNA, 15295 bp, Homo sapiens
actaatacaacccttttagttaataaatgaaatccatctactaacggtttaaaaaaaaaaagatgtctcttgttacttgtgatccaatcattacagaggatcactttatgtatttgaaagtacaatttctccaaaccccaaagcagtactgagaaatgctgttttctaaatacaattcccaaatctcaatttagttagctactgctacattaaaggacatagctcaagggatgttgttaataaaaaaagaaaaagaaaaagacaattgagaatttataaatttaatcaatctcatgcaactggcagagttacgagagttaaatctagtaaatagccatgtggcaaaggtcactatgctcctgacattgttatctgaatgtcaaggaagaagcaaacttagcctttctggtcaatgaattcaaagaactaagagaaagccttgactcagatggctgctttggctcttacattttgttgtaaatgctggaggagccaaagtggggacctgccacgtaaaagcagccatttacaaaggaaagcaaggtttgctcgtcgcaggtgaagagggaagaacataagttgtctcaatactacttgcctgctggtatacatgacctactagcttacagacagaatgagctgtcttagctctccaaactgtcatctttttcatttagtttacttatctatgacacatagggatttgatttgaaggacagcagaggttaaaaagccatcaaaaagctcagttttgctgtctctctcttttttcccccttttggtaattttcaaaatgtcataggccaactgagtagtattaatatggtcctgttaaatgtattagcatcaaactaaaaataattaacaggaagatacagaattaatcattttgtgagggaggagggaggcactgcaggcattgttttagtccatttttttccctgtgagttgcttcgaggagcgtggcagtacacacggatgtaatacgtaaagtacaaaatgtctaagtcctaaaaatattttataaataaactgttaagagaaaaaaatgcaaactgttgatttcttgaaagcaaatgggtaatttattaagggggaaatgagagacacaggtcttcagtgtaatcttttgaactatgtttcgtaagaattctaattcattaattctccagtctagcaccattgtgatggcattattatttaggttacattaagtcagactgctgtaacatataagcatttgctctttgaccttcctaagacttatgacgcaaagaaaatgctgaacttttacatctgaggctataatttcatataatgaacaatcaggaagcacaagtcacatattcttttagctatctttcttaagggcttaattgtggagagttgaaatccatttttatttttttaaaaaagggagagaatttggacactttgtggaaacagatgtaagccaagcatgacattttaataagtgtcaccagctaccaattagaagcaaatgagattacccatatagaaaatgtatcccaaacaaacctatcctttggtagaaatgtcactgtgccatgaaattacagaagcttaaacaagtgatgcttgttcaaatgaaatttactgacaaatcccttctaagcaatcttcttccacattatcagatttcttcagttgatgtgttacataggaattctcaatcttgtagttcacagagagaataactcttctctttgctctttcttggcaaatcactgataatataaaaaagaatgttttaaaacactggttttgcttgaggcagtaagctgcctctttgccatcacaagtaagcagctttcctaaaagatattttcaaagaaactgaacagtagaaagatgaaataacaacaaaaaaaggtaaataactccataaaaccaaaagagattcagactaaatttggtttaaatcacatgtaactattatcactttaagaaaataggaaaaagtaaagcattttttgaatactctgggaaaactggataattatatctatatttagcacttcatatatctgggcatgtaatacaaatcctgtatatttcgtgaccactaagttgagtacactacataaaacgtaaagtttattttcgagattcctagaaacttttgggaattaaaaaggtaccatgattaaaggctttctgcatagatattttaagtgtaaacctaagtctgatgctcctaggatcacaagttagagcacaagagcacacacacacttgactcttatactgcctgcaaatacacaatgaaactaaagaagggttgttttaaaataaaaggtaaactaaggaaggatagttttaaaatgaagtcatctttgaaatattcacctttcttgaaatgacacttttcatatgtgattgtgttaatgaattcttaattatgcatagaatccttttaaaaatagaattgtccaatggtttgataaatcaagtttggtctgaaggaaatctaatatgcaaatacttacagtgtactcttttacaaacagtcacccttgtcagtttgaaaaattgaaaatcaacgaaagaacagtttaagtatacttgacctcactgcctaatgtctctcaagattgccatggctggtcgatttcaaatctgtgaaactgacacttaaaaatgtatagtgcgtcttcagtccaggtccctcaagtgctaactaaactgtggtcacagcctcagattttctttccatacaaacttgtacagcgcttacaaagctactttaatcacatcatcaatctatgcctatacttcccttaaagtaattctgcttcatttatcttttaaccctacattatgcaaataacatccttatcagtccaataaagaaaagttattaatgttccttcttgtttatctttgtcatacactgagaactggaatcacatatgaatttgcaccaataccttttctcttttctatttttcacactctatatggaaaatcatagtgccagagaagccctaaataaaattcttgaaatagtcttcaatcattgtctataactagtatcagaatatgagttaatgtattaaaaaggaaaaaacaaaaacttgggggaatgcctacttgaattttttttttttttaatgtctctctaggaagggtttgcatatgccataccaggatacctcctggatataagaacagttatacaggcccctagtggcttagcaaatagcagcagatgaggggattccaattcttagttccagactttgagatattctggatttaaataagtgtcaatcttaaaaggcaaatcaaatcactgtatttaatactttaagcagttttacatctatggttatctactctaacgcacatatattaaaataaattgctgcatttcattacttgagtaactgcacaactgctctggcccaagaagaatctgtgttacataacctacacaataaaatgtttaattcatccacctttttacatgtcatgcaaaaataatacattactcaactatattaaaatatatttgagagagacagtgttcctatttgaatcttattcctattatatattactgagggccataagaacagatgatttctatgcaaagtactatttaaaataagatacagataaaaattgaatgccacttttacaggagtaaaaatctaaacgtatttcccagtaacagccagtgatacaactcacattggagtccatctatttttaaagatctacaattaataacacccattaatcccccatccccttgctgtccttccttcacaaaagaaaattccaggcaggcacatttacagcttttagcaatttttaactggacacaatctgacagctgaattcatgaaactgaccagcttgtcaatttcacactttgaaagtacaataatagctgatagcatgagggtgaatttaagaaatctgccacagaattgctagctccattgaaaagcaaagtacagtacataattatggaatgtgggaggtagggaaaattttattgtccatttaggatgtctgtttccataagtcagacacggaacattgaaaatgtgttctctttttgctatagtgtctgtagcataaagcagaatatatgttcaaagtaagtaagatactaagccttttactgggtattattatattacatatacaacttaatcttaagttattatcatctacagatccctttacatcagaatgtttcaagttttggtatatcatccttgttttactcaagttgagtggttggtgtgtgcactttgaaacagagaaaaaaatactgaaaatggtcagaagtatctatggttgaactaagtccccagagatgcgctacaggatggttagaaaagaatacaccaaaggataaagtccacatttgtagctcagtaaatttaacagcaaacctatttcaagtcataagcagttactagcctctgagaggttcaaactgtgtgagctacactctgttaagtcactggcactgtgtctttgcacatgtaaatatatatatataactttaagaggaaatacaaggagaacgagccctcaggaatcttcctagatacttaaggtgcaaactgtagatgaggctgggggattactctgagaattttagaaaacggaggagacatttggcaagtagcgtactgggaggcgaactggaaacaataaaagtggattgtgatagtcctggttttggagaatggaactactatctggaatcctggaacaccaaattaatgaaagccaagctcacacttggtgttcaagatttttttaagcataagacttaaaaactgacttcacttgctagtgcttttaaatgaaaatcaacgtccagagaagcaatgcaagttttctacacacccacataaaagctacaataaatctatgggaaagcaaataatctttggtttgttcgtggctttctttttaaattgtttcttacaactttgactcttcattataaaagatgcgttcccttccctacggaatgaatgtgtgtgttaagtacaccagattcccgcagctgaactacgagctttgattctgccacgggaaggtctcccaaacaatccccctcctctatggcagctgcgtagactttgattcctgctatttctccttctccccactagttcagaggaaagaaagaaaaagaaatcgccccctcaccgtagtcagccctccttaaaacagtaatccctgcctttaaaaaaggcggtggcaggatccctgggtaagggtggattgccccaccgctccaccatttgcccccaatactacgcccaccctaggaggagagagcgggggtcgcacaaatacacatacccggacacccccattctctagagtcgcctctctcccgggtctgaggtttcaggcgagaagtgaacccagcaggagaggacctctgcccgaggaggtccagaggagcaaactgtgcgctccggtgcccgggcgccgggctcgcggaaacgcgagcgtgtcgctctggctcgggaggcgccggcagccggagccgggcgcagggcgattccggagcagcaagaggggaagacaccgcggggcggacggggtcagttccagggactcacctggtcatgttggccccgggcagccgccgccaccgcctcccgcgccgccgccaacactttcctccagcgccttcgcgccccgccacggccgcgccgccgcctccgggcggccaatttaatcccgcggagcagcggccgccgccgccgaagcccccctggtcgccgccgccgcccagccctcgtgcggccagcccagtccagagcgaggaagtggaagagagtcagcgagtgagtccaaaaacccgaaatccagcatccaaggcagcgcgtccccccgccctccctccacccctacccccttttcctcctcctccgcctcctcctcctcttcccgggccgtcctcttggcccttctgagcccgcggcttccgcggcggtttctcctcctcccgctcctcctgctcgccctgcgcccgcttctctcgctgccgccgccgccgctgtttgtctcctccccctcctcctcctcctcctcttcctcctcctcccgctcctcgaygctccgccgctcgcggctggggggtccggggccgcgtctcctctcctccctccgcctctcctctttcctccttcctgctgcctcttcttttaaagcggattctttggccacaaatagcaactcggctgcccccctcggtgcctccctccccttctcttcttccccccaaaagtgaagcgcacgcgaggtaaccagaaactgaggctcgtggggggagaggggtgcgaggcgacgcctgggaaagggcccgagcagagtcgagggccgggaggtggggtggccggtgcagcccagtctttggacctggcttgaacctggtagttacggctgcagaagaggtggtttggggaggggggaaaattaaacgaaaaagcccaggaaagtcattggaaaggcttctctctttgtttccttgtgtgggtgatttctaaaatcctcgtaacgtgctggggatcccacggaattgctgtgctccagcgctgggggattgtgtgtgcgcgttgcctgcgcgtgagtgtgagtgtgggtgcgcccggacgcggggagagctgggcccgctgcgcccgctggcgaatccctgaatctggaccactgacccactgaaagggccagagagccggataaaggaggggcaggcaggagaggtgggtgaaggaggcaacacacacacacacacacacacacacacacatacacacacacagacacacagacacacacacaccagaggagggggcggggtgacgtcactccccagcatccatccaccaggccagaaaagaccctctccaacagattcactcatctcctaagagatgcacacccgggcgcttcctgctctgcgtcccagcgcaaaggaggaaaaaatgctggtcgcgccctattgacagcagtgataatactatagggagcgtgctttgatgagacacagtttgtgtccgccccagttcaccttggcagcctccttcggggatgcttgtaggatccgctttgaaggcarcgaggaagactgggaagtactgaaccaaaatcttagtgtgataacttgttttgctttcatgccacttgcttttatgttgttggaaatgcagtgctcctcagcttctctgaaggacactataacacctcttccctagacaagcatccagttgttgggctatgcactcttcatccacacaacccaaggtgactaaggtgcactgtgtgtattgttagctaagagatggattttaaccttcttcactactcatagggtctccagcatgtggaaaaagtcggcagctggaagccaccattggcagttggcccatcaaaatttattagaaacttggtcagaaaggttaaataaagtaaagctagagctcaccagccacctccattgctcattctgtgttcaggccagcacatacacacaatacttatccctgcagactccgggctgtctttgaaagagcaaaggtaaacagacacccttagatttgacttaatgatccagcatgctgactgctgtctcaagctgcccatttgtttccaccatctgcatgctgtgctcctgaaagccaccgaaggattggtcagtaatcctctgccccctatgtactccaaaaataagtcacatattttttaaaggaatctctctaaacgaagtttagttttccagcaatttgggggkgggggaggagcatccctgcatgattgtctcttggctttttggttttgcttttttatggttagggtcatagtgaaaatcaggaagaaatcaattcttgtgcaagccttcaaacgaggtttaccctccaatcattctgatttcacaggagctgaaaagctgtgcagggatgatggacmcttgccccctgtgacctaaggatggatccagaaatctcagcctccccataggtgattccacccaagatgtaaactcctacttggctttgtcattgccacatgtgcccccataaactggcaatcccactttcctcatccaaagttgcatgttagagaaacagaaagttttaaaacccctaatattcctttgctgttacttttgtgggaaatgtatcactctgcctgcagatctgacctcatttaagaagaacccagctggtaaatctgactgctatctgggaacatagttgaggatatatcatcttacaccactggtagtgatttaaactagcaagtagaaaagggacccagaaatcaggggatacagaggacagtacaagtaaatggcataagcccaacttttctgacactgtgaagtcctagatgttcttgtctctactacaaccaaacatcaaacatcttagagaaagaagtagggatgggtcaaggtgactggagagtctgagttattattataccaatgagactgagaattattcagggtgatgctgctgaaaaacgggagatacagcaaatagagaagccaaagtttctctgcacatctgagtagtaatggaagtgagactgcagcctgctayactcatgttaatatattcagagcagattggcaacaaaagagtgtcctaatgctgcagcatctagtaaacttctggactggtttaccatttggaaattttaagtcaaagaacatcagaagcargctaatcttttgttgaaattacctcgtttttacaggtaaagaaacgaagaccctgagaatttaaaatcatccaactatttggtgccagaagcaggacaagaactcagacatcatgatccagtgccctccatcccaccagctattcatcatcacctccacattctggatcaaagaagccagttttccaacttatcaatgagcaatacatatagaatatttttaaaactccaaatacttttatgaaggaaaaatgaagcaataggacaagacattttcttcgtttccttccagctctaacattctgtgataaatagcacacaggagctttgctatagcactaccccctctagtgcataattcagcatacgatgagtatgagtctgttttggaccccatccaaaggagttagttcctagaagtacttggaagatttattctcatttatcatgaggcatcctaacaggagactaaaaataatcacgatgacaataatagtaatcagttgttacacttgtattatgtactaagcatcgtgctaagcatgttaaagttcacctgtttttgaaaaggcacttcatgaccttatgtgggttgcgaatctagtgggtcataaacaatttctgaaatgaaagaaaagtaggaaaaaacacagagtgcattatacatactaagttgttttattttttatttttttattttttttgcaaaacttcctttttgatcatgtggctagtgattaaaagtttggaagcactgcctcgtttccaatcttaactgccttgctagttaagtattattagccccattatataagtgaggaaacaggacgagagaggataagtaatttggccaagctgacacagtgagtggccaagctagaattttgaacctagatctgtttgacttcaaatccaatattttcacttctatagtgatgataaattattgaccaaggtatggaataaattgttgctaatcatgttttctttgtgaggactactggggtttttattaaatccagctaaatggagaaacacagcatagattcaagtgacatgttcggaagagagtgaggaatttcataaaacactaaatctaatatctaagaccttttcctgtaggtgttagcttatgtctaatacactttattgacttactgctaaatacataaatgaaacaataatagtttcagtcctcaaataacaatattcacttctacgtgtgtttctatttttatttcagagagtatttttcaaatttaagttatacagcatttctcagtagcttgctttggccaaacacagaactagcacataagaaagctaaaaggccaggcactgtggctcacacctgtaatcccagcacttttggaggccaaggcaggcagatcacttgaggtcaggagtttgaaatcagcctggccaacatggtgaaacccgtctctactaaaaatacaaaaattatctgggcgtggtggcacgtgtctgtaatcccagctactcgggaggctgagacaggagaattgcttgaacccaggaggtggaggttgaagtgagccgagatcacgccattgcactccagactgggcaacagagccagactctgtctcaagaataaattaaaaagcagccagacaaccctatcattcaaattcaattgtaaagaagaaaagaagatattaattaaggtgccatgctaaattttttgacccatgtagttctatggattctaccagtaacattgcatgcttaggtgtcattactcccattctgcagatttgaaagctcaaactcagaactagctgatgattgaaatcacctgttctgattccactacccaaagattctttacaaacaagtgggcttccagtagaaaaggaggcagctggagattttgagacatgttgtgcaatcatttatgctttctttttccacgtgaaaaaaatacactttccttttcttcaaggcagcatctcttcttgctgttaggcagcactgtcctctttaagaaaagaaatccacatcttcatggatgaaattggaaaccatcattctcagtaaactatcgcaagaacaaaaaagcaaacaccgcatattctcactcataggtgggaattgaacagtgagatcacatggacacaggaaggggaacatcacactctggggacggttgtggggtggtgggggggagggagagcatcgggagatatacctaatgctagatgacgcgttagtgggtgcagcgcaccagcatggcacatgtatacgtatgtaactaacctgcacaatgtgtacatgtaccctaaaacttaaagtataataataataaaaaaaagaaatccacatctttcataaagaaaggcctagaaaagccatacctcctccactgactgctctgttcagctgctgcacttcaccctcacctgcagtgtgtagaggacgttatggtacaatgctattttctactggctctgctactggagattacagcatgcgactgtgacaatactggctctgctactggagatcacagcatgcgactgtgacaaatggatattcccattaaattctttagtagactggggcattccattaaccattggcactatcccaacccaagtgaaacactgggtcatttttttcttgtgagcaagaagtgaagggagaaaacaaaggatatactctaattacctttcctatttcttttttgttgcatgcattatgataactgtatattacacttatttataattaatatatgacaagctgtcagctaaaatttaacaggtgatttgtcaagaaggcccattaatgcatacattaagcagtggatttcagtgtttcctaacaaaattgtgtattggttttgttttttcattctatttagtataaacattttgaggccacctatctttacattttgcagcatttttaaaaaataaaactattgctaacataaatgggtgcattgttagttatatgaggtataaacacatttctgtcaccttaacctctaaatttgtttcactgaggaaacaaattgcctagtgtttattttaaagttttaactttcatgggttttgatacattttttaaattatatcttcagtaggaaaggcagagctgattagggaggaaagcaactgcagttacttatgttccatttagtgtttgtatcttaggtaagaaaattctgaaatgaaggaatattttaaaatacagaaaaagattaagaagtcaccagaaagctagtagttaatcattgaataaaggaacactctacagagaccaaaaactgatgaaacaggctccatcttgctgaatggcgcaagaatgggaaacacaatggaaatgaatcacagatagttgtgaggaggattctttgaaagaaggaaaactctgtttctctatctgtaggatgtcaaatcatgggacataacctgaaaaggaagttaaattttgaacttcaatattattatttccatggtcaaccaaaatttgtactgtttaagagaaagatacaaaagtactgcagcatttgtttaaaatttcatttgcacaagcctgactcttatctctcaagactcggacatgcttcaggcagttaatgactcacaatccactactctagagggtgctgaatctccttaatgaaagaatgtgctttaagattcaatggttaggaagagagaaataaacgagagtaaaacacgaagcacagcagtttttcaaagctagtaagacttctgcgtccaccaaccaactttagctcttacatttttagaaagaaagcactaacacagaaccatgaaattatttttaaaggttctttctaacagggtttcagaggatggtttccaaaaaactcactcagaagtgaaataccacacgttgattttcacgttgcagggagcgcattcctatgcagttcagggattataaatgaccagtggcaagttggtcattgtatcctgggccaggatctcactgtctccagatcttgctttgttttccatatgcagcagagtccccatgagtaactgggggtgtttccttgtgcattcagtaacagttttcaaaacagtgaatatagcaaggcatcaagactactatatttctgccacttttctaatgttttctctttgtcttatacttctgttcttgtcttacacttgtattaaaaacacaataaagaaaacagctttgtacaagctagtattttggccataattatacttttctctgtcttctcaatgaataagaaaattttgggccaggtatctgcacaaagcgtgatagaaataggataaaacagcacatcatctagcatgtagcctacatttatgtaaatctggttgatgtaaagtctgttctgttatcactttttaaaaataaatctatcattctttctttaatcataatacaaaccatccagggacagtccaaatttttcagaaagaacaaatttttcagtacaggaggcagcatttgccagtacaacaagaaaccagaaaacaagaatctgtgttggatcatttaatttctacttggtgtacatactcaatgtaatgttttcacagttgtttgagagcaggattcatgtctgattggaacccagagctcctgtcatagggctttaagcacaataggcatttcataaatatttcagaaagtaaaggaagggaaggatagaaataggaaatgaactggttgtcaggtgcacatcttacatgatacatcactgtctttataaagcctcccgtatagtccactaaatagaatgaatttcccctgctcctgggctctcattcttttccttttcttcttttttcctatctctctgtatttttattgtgtataatttcaccctattaaattgtgagcgtcttcacactcttctcatcaccaccaagcccagaacctgcactagaagcagatctcaaaaaaggtctgctgcaaaatatgatagcatgtgcttagataccactgtggcctggttagatgtcacgttaatattgcctcttattgagactgtgctgaaaggtacaacgacctagagtttggtcagagttaggcctcactaatcacaacacacaccaaaatgtcccagacaaagaataataatagagtctaacgggagtggatggattcgtagttccacggaacttttgatgagaatgattataaagtttcatgctttcctacaagaagtcaaaagaatttgatcagttcagtggacaaaaaatcctttatacttctaactggtgttgacattttcatttttaacttggtatattcttagatgaacagagcattcatttgcctgtaaacattatttcctataggaacatatattactggaagttatcctgattttcaaaactcattggccacatctccaaaattactagtaacactgaacaagtcttggagagatttaaaaggcaaaccaaaactattctttcccaactgtgtgattactttacatagtctattcatgttagtgcttgttttataaatgtagaagcaccattcctgcttggttatttatttgtgttcagttctttaagatcatgttttctttccttttcttaccaccaaaagcccatctttctaacacaagtatctctactgttctctggactaatacaataataatcttttgcatattcttctgctcccattgttttcctgattggccccaatctatgccccaacgtgctgcccaattaaccttaataaaacacaagttgattatgtaactcccatgctaaaaaaaacctcagtggttcatgattaagtacgtactttataactaagtgcaaatgttctaccagcattcgacatctaccacaaatggaatgctgcctgagcccatttttccattctaatctttacctcttttctaccaatagcctaaattccagcattgtctggataaaactatccatatttcttactcagccagaaagttttcttatgatcacctacatgttgaatacttatctatccgttaagaatcatctcatcaagtcagtttttttttcctgattcctctaccacatatgaatactacttccattagaatatctgattctttgaatctctcttgtactgaatattctactgaaattggataaaagataatagaaagcactaacctccaagatatatttaatgaccagttcgatccattaattggagtggcaaaatgttataagcggggagtagatggagttagtgggaatttatgcaaacttatgtttaatcacatattgaaaggcctctttatttaatcacatcttgcaagttcttgtgtcagataattgtgtttgggaagggaacaaaaaaattccaaagattctgagttaagaccaatatgaagaacaacagatgacggacactcttaatatctctccttccctccctcccttcttctctttcttccttctttcttccttctctccttttgttctcctccctttctttccttctctcagctttgttcattatccatgcaaggagatgaaatgaccctgactattaagtctttgtcctggag

SEQ ID NO: 97569 - DNA, 15011 bp, Homo sapiens
agtccagctacgcgggaggctgaggcaggagaatggcatgaacccgggaggcggagcttgcagtagctgagaccgcgcaactgcactccagcctgggtgacagtgtaagactccatctcaataaataaataaataaataaataaataaataaataaataaataaataaaataaacataaataaaattcctcagcctgggcaacactgcaaggccctatctctacaaaaaaaaacttaaaaaaaaaaaattagccagtcatggtggcatgtgcctatattaggctgaggctggaagaccccttgagcccagaaggctatgcagtgaactatgatcgagccactgtaaaggcagataagtgtagtgaggatgtgaaggaaccggcacaagaaatcccatactccttaccactcaagcatgggcaagagtgagatcctgtctcaaaataaatacataaataatttaaaaaataaaaaggccgggcacagtggctcatgcctgtaattccagcactttgggaggctgaggcgggcagatcacttgaggccagaagttcaagaccagactcgccagcatgggaaaaccccttctctactaaaaatacaaaaaagttagctgggcatggtggcgagtgcctgtaatcccagctacttgggaggctggggtaggcaaattgctagaacccaggaggcagaagctgcagtgagccgagatggcaccattgcactccagcctgggcaacaagagcaaaactccaacttaaaaaaataaaaagaaaatagtttctccatgctcatgggcatacatgtgatataattctatactagctttgaactgtgaatgggtactgcatgctaatcaaatgcaaataatgcgtttttataaaagttgctaaccacattctagacaaagaaattctggccaggcgcagtagctcacgtctgtaatcccagcactttgggaggcggaggcgggcagatcacctgaggtcaggagttcaagacctgcctgaccaacacagagaaaccccatctctactaaaaatacaaaaaataagccaagtgtcgtggcacatgcctgtaatcccagctactcaggaggctgaggccggagaatcacttaaacagaaaggccagtgagccgagatcacaccactgcactctagactgggtgacagagactctgtctaaaaaaaaaaaagagagagagagagaaattctgacctggtttagtaagtaaaaagcgctttaagctattggctattgatatgagatgctaatctgaagataagaaaataaatgtttttcaaccttcaatgccctaaggtagaaccccatagcatacttgtgatatttctttttatattttttccattaatttaatgactgaaacaaatatgcaggtattttaagaattttctgctcaatactatctttatagtcaattctagatgaccccttgaccactaataagccagcttctacacagcaataaatagccagcctcctcaaaattatactatagatattgacactgcctttaataaaaggaaaatatgatttatagcacaaaaaattcctggccgggcacggtagctcacatctgtaatcccagcactttgggaggccgaggcaggtggatcacaacgtcaggagtcttgagaccagcctggccaacatagtgaaatcctgtctccactaaaaatacaaaaaaaaattagctggcctggtggcagactcctgtaatcccagctatttggaaggctgaggcaggagaatcacttgaacccaagaggcggaagtttcagtgagccgagatcaagccactacactccagcccgggtgacaatgcgagactccgtttcaaaaaaaaaaaaaattcctaactctccatagaaagcagttttgtcacttccagagaacctcacaaccaaatattaaatgtactcttgtccccttaagactacatcaactgatgggccaggcatggtggctcacgcctgtaatgccagcactttgggaggccgaggcgggcggattaagaggtcaggagttggagaccaacccggccaacatagtgaaaccctgtctctattgaaaatacaaaaaattagccaggcatggtggcacatgcctgtaatcccagctactcgggaagctgaggcaggagaatcgcttgaacccgggaggcggaggttgcagtgagccgagatcatgccattgtactccagcctgggcaacaagatagaaactccgtctcaaaaacaaaacaaaacaaaacaaacaacaacaacaccctggtcacacaggaagagaagcttgaaacaggcagaaagtaaaaatgccagctattgatgattgccatttttgtctcaagagtcctctctacggctaaatctatccatcagtcagcatgtcaacaacctttagtggtatgataaccttacctcaaatgaagcattaggaccaagcaaatagggtaaataaactttattaatttttggattaagccctaaagcttcagaggaatgggagtactttatattttctggaaagataagattcagggaagaggctagaactcatagttattttcttgcaatagcaaagaaactatgctacactttgaagagaaaaaaagccagaaggaacactatcaatgaagcagaataggatcccaaacaatactcttcaagaggatttgattaggcatatttaactattgattaggcatatttattcaaacaagggcaacttcagaaacagcacattagcaagattttaataccctaagcagttatctctcaggaggaagattaggatgtaaggaatagtctagtaagatctctacacactaaaccgtccctgacaaaaaaaatcattttctaattgaggagaaaccaaaaataaagggaaatgccctacagagaagcagcaaatagtatggaatcactgggcaaaccaacgtgaaacactgagtagccaagcaactcaatccgtaagtaaaagtagaaagaagggtaccaaagaaatgaaaaaacaacagcagagaagtgaaaaatattaaatgagaaacctggaagaaacgttttactgcgagatggaatattcacctcaaatctcacaacgttaacagaaaatgccatggaaatggaacttcttgactacctactttacaaaaagactttcctacgaaactatacccagatttatttatttattctttttttttttttttttgagacagtgtctcactctgtcgcccaggctggagtacagtggcacgatcttggctcactgcaacctccgcctctgggattcaagcgattctcctgcctcagccttccaagtagctatgattataggcacgcaccaccacattcagctaattttttgtattttaataaagacggggtttcttcatgttgtccaggctggtctcgaactcctaagctcaggcaatccgcccgccgcagcctcccaaagtgttaggattacaggcatgagccaccatgcctggcctattcatttattttttgagacagcgtctcgctctgtcacccagattggagtgcagaggggcgatcttggctcaatgaaggctctgcctctcaggctcaaagtgattttctatctcagcctcccaagtaactgggactacaggtgggtgccaccatgcccagctaatttttttgtattttttgtagagacagggtttttgccatgttgcccaggctggtctcgaactcctgagctcaggtgatctgcctgcctcggcctcccaaaatgctgggattacagacgtgagccactgcgcccagcctagatatttctaatagacaattacatctaccaaatagttatactgtgtatggtggtgaaatatgaatgctatgcttcagtttgacatagatgattaacaatgtctagtgtcttcaacgatctgatcctacaaattctttccaccaaaacagtgtcctaacctttctgggcctcaatttcttagctataaaatgtgggagccgcagggtgtggtggttcatgcctgtaatcctagcactttgggagaccgaggcaggcagatcacctaagtcaggagttcaacaccagcctgacccacatgaagaaaccctgtctctactaaaaatacaaaataagccaggcgtggtggcacatgcctgtaatcccaactactagggaggctgaggcaggagaattgctcgaacctgggaggcggaggttgcggtgagccgagatcgcgccattgcattccagcctgggcaacaagagcgaaattctgtctcaaaaaaaaaaaaagggagccaaagcagatgagatgaactataggatacactccaatcctgaaattttatacctaattataaaattgttattaaggtcagttatgaatataaaatttgaatcggaaaacaaaacatttaagttcatactgtcattccagagctaaccacagggaggagcgagggatctgaaacaattcccaagggagacagtatttcgctgttacctgaagcccacccggtaggtggagaaaccctcaataccagacagagtatttccctggcccttttgcctagacttcagaatgctcttcacaaagccacggttaacccgtcttcctccctttcctccctaccgcagttttccctcttctcttttgtagtttcacatcaagttttacctaatactactactttccccccaatatttttcttttccccttttgtccagagtaaaattttctagaaaagccctttgtaggtaggttgtgatgaaaaaaattgatgaaatgacttacaatcaaagaaactataaactacaattacaggcaaatgagaattactgattaagttttagagaaatcctaagagagaaagaaaacgaagcataataaaaaggaaaacctagggactgacataattcaagttttccgaagttagtaaaaggccctgaaaagagtgcaaatgagtgacaactcctggaggtcgggtccagcctctgaaattaacatgcaagagcccaaggccaggcaaccaaaatgtgaaacagactctgcccggggttcctttcactgtcaaactcctagccaaaagaggcttcccacatcagatattttaaatattaaaatttaaaaagttattcacatctattcacctctcccttgaaaaacaaatgaataaatagcccctatttgcgtctttactcccacactaaacctcacaccgttgatgagcctggagggctaggttggcacgagaggatggcgccaaagctcggggagagggcggtcagtgggcggaaggtgcctcttcccacatggccgagccctcgccgccactggccaccggcacacggtccccaagcatcgggagctccctctcggccctgaccccgcggtctctgtcgccccgcaaacggccgctgcggccgcaggctcccaattgggacccttcccaggggaggaccccatcccccgctctctttctccgtcagattcccgccccgcagcggccagcctatgggcccctgcctcctcacctccatggagacgcgccagccttgcatggcggagaagccgtagggcagcggcaggcgcggggcgccgaccccgtccccggagcacttcaccgtgttgggctgggagaggtaggcacccatggcggcggctggccggcggcctcaggtgcaggaaagctgggcgcgacccgtgccggagccgaagccccgggggtgcgcgcggcaggagcaggccccgcggcgcgaccgacgcaaggtgccggtgaaaggcgcgaggccggccaggaggcggtaacgggacgggagctgtgagggagcggaagcggaaacggcgccgctccagaccccgcccggcctgcgcggcggggccaggcgctgcgggcagtcatttccttagcaactcgccccgcccgcagggacaacggcccgcccaacggccgctcccgcgagactagcgcgaccacgcccaccaacggccgccgtcctactccgcttcctcgcgcaggtggcaggtcgcctctggcagaacctcttccttcgttcccagtccccagcctcttggcgttttgtctgacgcctcttttgtgtcggactcgacgctttcagcccgtcctccagtgttttcatccccctctccccaacgttgcactctcagactccgcaaaccccgcccgatttggttcaattaaagttgaccagtatttgttccgagcttaggaagtacttggccaggccatgcgaggcctatatgagaagaatgtgagtcttttctgaaagcgaagacctcgatctgtgatataattcgagttaatacaatgtagaaatgtttggtacagcctattctgggtgggaaaagctcaaggatgggaggaggagctgtttcttggaggattgaaaggatgtaggctctcagagaggatgcctctggattgcattatgccacaggaaaagggaataatgttataaggtttggaggagtgagggaagaatgtgaactgcatttggggaggatttctgaggaagctggctggactcggagaatgattgtaagtggtaatattaactagctagcttgataaaaagaagcgccaagatgagtgacttggacttcattgtcgtcctggtgtaacctttggcatcgtttgtctagtctttgtatgcagtgtacattggagggagagagtctggggcactgttgtgttgttgttttttgtttgtttttgagacagagtctcgctctgtcgcccaggctacaagctccgcctcccgggttcacgccattctcctgcctcagcctcccgagtagctgggactacaggcgcccgccaccacgcctggctaattttttgtatttttagtagagacgaggtttcaccgtgttagccaggatggtctccatctcctgacctcgtgatccgcccgcctcggcctcccaaagtgttgggattacaggcgtgagccaccgcaccccgcctactattgttttttttttaagacagagtttcgctcttgttgcccaggctgcagtgcagtggcgctatcttggctcactgcaacctccgcctcccaggttcaagcgattctcctgcctcagcctcccgagtagctaggattccacgcctggctaatttttgtatttttagtagagacggggtttcaccatgttggccaggctggtctcgaactcctgacctcgtgatctacccgcctcagcctcccaaagtgctgggattacaggcgtgagccaccgcgcctggcctggggcactgctactagttagagagctcttactctaagcaggagatgagaagagctgggagtaaggtggtaccacgcagggtggcaatgggaatccagatgaaaggacaaattagacaataacaaataagacagatttggtaataaattgcattcaagggatggagagaaaaggagaaattctccaaactatgacaaaattgattcttttcagccgggcacagtggctcacacttgtaatcccagcactttgggaggccaagggggggtggtggatcacttgaggccagaagttcgagaccagcctggccaacatgtgaaacccgtctctactaaaaatacaaaaattagccaggcgtagtggtgcgctcctgtaatcccagctacttgggaggctaaggcaggcgaatagcttgaaccccagaggcggaggttgcagtgaaccaagatggcgccactgcactccaccctgggtgacagagcaactccgtctcaaaaaaaaaaaaaagattctttaaaaagataaaactaatcatggcttcttcatgctcttccgatagtccaaattccttatagtttacaagacccttcatgctaatcatccagattcacgtatgcctctctttaactctccatttctcctacaactctgcttcagcaatgtctttgggtgcatctaaagccatgctttctcttacacttttacccatggagcacacctctccacacccctcttgaccatcactttctccaggaaatctctactatcactatactagtttgggtccacacttgtttgtctttcctgatagaatataagcctttatgaaggcagaagttccattaaacttaccattgtgttttccagcatcccttgcaaagttgtatgtgctgaataatatttaaatatttgttgaatgaatgaataacaccaagattttgactctgcataacaaaatgtggtggagccattaacagaaaaaggtgcagtttgaggggatgctagttttggggggaaaacagtggttcagtttagggtgacaactaatataaaaacattgaaaatattagattggagttaagccatgaaagtggaaaagatgttaattaggcttgcaggttgccaggaacctagatgagatctctgaccaaagcagtgtagagggagcatataaaattactcagccttggttgcagtgagctgagatggtgtcactgcactccagcctgggcgacagagtgagaccctgtctcaaaaaacaaacaaatgaacaaaacagcaacaacaaaaattactcagcctcttctttcttctccttctgctcctcctcttcctccttcttctaagaaatgaggtcttgctatgttgctgaggctggtcttgaacttctgggctcaagcaatccttccactttagcctcccaaatagccaggaccacagacatgtgccactatgcccgccttcttttttttctttctttttttttttctttttggactttgttttttcctaagaatggaatgtgacattgtttaaagagcatgaattttgccacrtattacctatgagatctttcacaagttacttattccctcttaggctaagttcatctgcaagacagacatacagcatctactcttcaagactgctttaaggataagaggaattgaatgtraagtgctgagttatccataaatgttgtatattattcaacaaaagactgctgtttaagtgtccatacatacacgctaaatatggaatggaagccacatttaattgtgttcacaaaaaataggaggtggcctgaaaataaatgggaaaaaaacagacaagaaaaaaagtggaaaagaaaatataactcgaggctgggcacagtggctcacgcccgtaatcccagcactttgggaggctgaggcaggcggatcacttaaggtcaatagtccgagaccagcctggccaacatggtgaaaccctctctctactaaaaatactatataaacacacacacgcacacacacaatatgactcaaggaaaaagtaacgcactgggagagcaataatgttacagagaggggagatagatactaagggggatcatggaaagaggtgaaaaaggagaaagagtatgaagattatcccctcaccatcctattcccctcaaagtcactacagtatatttccagtgacgtaaaggtttcatgctttgactagaagggagaaagaaaaaaaattttaaaaaaaggccgggcgcagtggctcacgcctgtaatcccagcactttgggaggccgaggcgggtggatcacgaggtcaggagatcgagaccatcctggctaacatggtgaagccctgtctctactaaaaaatacaaaaaattagccgggcgtgatggtgggcgcctgtagtcccagctattcgggaggctgaggcaggagaatggcatgaacccaggaggcggagcttgcagtgagccgagatcgcgccactgtactccagcctgggtgacagagcaagactctgtctaaaaaaaaaaaaaaaaaaaaaaaaaacacccaaaacgcaatactatattcatagatcgattgataatgctgagtctgtctttaaagtatgagctgcaaaaatctggctaatcagacatggtaatagagccagctcctgaacatgtacttgaggtgttagtccacatgaaaaaagggtttttatggcaggcatggtggctcacacatgtaatcccagcactttgagagactgaggtgggtggatcacctgaggtcaagagttcaagaccagcttgaccagtatggtgaaaccccgtctggccgggcacggtggttcacgcctgtaatcccggcactttgggaggctgaggcgggcagatcacgaggtcaggagttcgagatcagcctgaccaacgtggtgaaaccccgtctctactaaaaatacaaaaatcagctgggcgtggtgacacacacctgtaatcccagctacttgggaggttggggcaggagaatcgcttcaacccaggaggcagtggttgcagtgagctgagatcgtgccatggcactccagcctgggcaacagagcgagactttgtctcagaaaaaaaaaagaaaccctgtctctactagaactacaaaattagcagggtatggtggcaacatgcctgtaattccagctacttgggaggctgaggcaggagaatcacttgaatctgggaggcagaagttgcagtgagccgagattgcgccactgcactccagtctgggtgacagtgcaaaactccgtctcaaaaaaaaaaaaaaaaaaagaaattatgaaccctgaggcatgtaattatagatctctgggaatgttgccagcctgggagacattgccttaaaggttaaatgtggatgggcgtggtggctcacacttgtaaccccagcactttggaaggctgaggcggccggatcatctgaggtcaggagttcgacaccagcctggccaatatggtgaaactctgcctctactaaaaatacaaaaattaggtgggcgtggaggcaggcgcctgtaatcccagctacttgggaggctgaggcaggagaatcgcttgaacctgggaggcggaggttgcagtgagctgagatcccgccattacactccagcctgggccacagagcaagactccatctcaaaaaaatatatatatatatattaaatgctctaactttagagtataatgtgacatcagttcaattgtaaatttgaatgtgaactgaagatcactcaaaaaagtgttaatctagatcatccaaaatatgccaatatgcttgtatttatattaaatattataaatttatgttgtcttcctatgttacccaggttggcctcaaactcctgggctcagacaatcctcccacctcagcctcctgagtaggtgcatgctgctgtgcctggatctcattgtttttgaccctttcttcatatacatgtgattcatatacatcaatattatactattcatgaaatgatacctttaaaaactaagcagttttgataccatattccttcttggttgtgattaaaggtgaaagattgatccagagaggaaaaaaataatctcagggacaagatttagggctaagaaagaaggaattcaaatattttgaaggtactaaaaacgaagagggagagtctatttctgggattctgggctagttcttactcccctttatactcattaatttatatatatattttctgtagatgataatatcttgacttttttttttttttttttgagacaaagtctcactctgtcacccaggctggagtgcagtggcgcgatctcggctcactgcgacctccacctcccaggttcaagtgattctcctacctcagcctcccaagtagctgtgactacaggtgtgtgccaccacacccatcttttttttttgtaattttagtggaggcaggttttcattgtgttagccaggatggtctggatcttctgatcctcgtgatccgcccacctcggcctcccaaagtgttgggattacaggcgtgagccacggtgccgggccatattttgacatcttttcttttctttttgagttggagtctcgctctgtcgctgaggctggagtgcagtggcacgatcttggctcactgcaacctcctcctctgggttcaaccaattctccctgcctcagcctcctgagaagctggaattacaggcgcccgccaacacgcccggctaatttttgtattttttagtagagacttggtttcaccatgttggccaggctggtcttgaactcctgacctcaggtgatccgcctgcttcggcctcccaaagagctgggattacaggtgtgagccactgcacccggcccatattttgacatcttataaaatcctttctggctgggagagactgcccttccaatgctaaccaattagagatagcaaaggacttttttttttttttgagatggagtcttgctctgtcacacaggctggaatgcagtggtgccatcttggctcgctgcaacctccgcctcctgggttcaagcaattctcatgcttcggcctcctgagtagctgagactacaggcacaggccaccacacccggctaatttttgtatttttagtagagactggagtttcaccatattgtccaggctggtctcaaactcctgacctcaagtgatccacctgcctaggcctcccaaagtgctgggattataggtgtgagccaccacgcccagccaaaacattcctttgatacataaactgaccagtccagcgctatacctcccctatctggcctgtacatcacaagaagcaatattcttttgccttaatcatcgcaggcaattagggaccatccctaaagtttacagcctgcaggagttattcaaactagccaaccctaaactctttgccctgccttgccttacccttagaaaccccaacaaaagttctggcctaggccaggcgcagtggctcacgcctgtaatcccagcactttgggaggcctaggcgggcggatcacgaggtcaggagttcgagaccagcctggccaacatggcgaaaccctgtctctactaaaaatacaaaaaattagccgggcatggtggcgcacacttgtaatcccagctactcaggaggctgaggcgggagaattgcttaaacctgagaggcggaggttgcagtgagccaagatcgtgccgctgcactccagcctgggtgacagagcgagactctgcctcaaaaaaaaaaaaagttctggcctaggttgggcgcagtggctcatctttgtaatcccaacactatgggaggccgaagcacatggatcacctgaggtcaggagtttgagaacagcctgacaaacatggtgaaaccctgtctctactaaatacagaaaaataagccaggtgtgggggcacatgcctgtaatcccaattacttaggggtctgaggcaggagaatcgcttgaacctgggaggcggaggttgcagtgagctgagattgtgtcattgcactccatcttgggcaacaaaagtgagacagagaaaaagttctggtctatactttctccttgttactgtcttctgctacctgacccaaacttggcatttcccctgtgaccttgtgtggcatataatggccctctttctaaaacctgtgagtgtaataaattttgttttattgtgcctctcccgtgtctcctcttggctgcacctgactgaccgtcccctaaaggaacgcagaacaagtgcccaataaatgaaactatttttttaagtcaaaaaagtgttatgttttacagctgtacttttctatttctagaaggcaagacataaattaatcttgaagcaatctgcctatactcatggaaatcactagaatgggccctttagacacatataaaagaaatacctatctctatcctaaagaaagtcacaaaaggaccattaaccaaaattcaggtctttcagactgatatgctggggtttatctttttattaataatataaattgtgggttgggtatggtggctcacgcccataatcttaacactttaggaggctgaggcgggcggattgcctgagcttaggagcttgagaccagcctgggcaacatggcgaaaaccatctctactaaaaatacaaaaaaattagctgggcatggtggcgagcgcctgtaatgccagctactccggaggccaaggcaggagaatctcttgaaactgggaggcagaggttgcagttagccgagatcgtgccactacactccagcctgtgtgacagagcgagactgtcgcaaaaaataaaataaaatcaattgtgactgggcttggtggcttatgcttgtaatcccagcactgtgggaggctgaggtaggaggattgcttgagcctgggaggttgaggctgcagtgaggtgtggttgcaccagtgcactccaacctgggtgacagagcaagaccctgtctcaaaataataataataataattgtgtctttagcaggattgtgtccttccagtggggggtgggggggcagggagagatcatattttcttttcagtaaggatatagagtgaactgtctcttaaaatccttatttgttcggccgggtgcggtggctcacgcctgtaatcccagcactttgggaggctgaggcaggcagatcatgaggtcaggagatcgataccaccctggctaacacagagaaactccgtctctactaaaaatacaaaaattagccaggcgtggcggcgtgtgcctgtagtcccagctgctggggaggctgaggcaggagaatggcgtgaacccgggaggcggagcttgcagtgagccgagattgcgccactgccctccagcctgggagacagagccagattccatttcaaaaaaaaaaaaaaaaatccttatttgttcttaggagatccatgtacgggttttttttttttttaatttatttattttttgagatggagtctcgctctgttgcccaggctggagtgcaatggcgcaatcttggctcactgcaaccgctgcctcccagattcaagtgattctcctgtctcagcctcccaagtagctgggactataggcgcatgccaccacgcccagataatttttgtatttttactagagacggggttttaccatgttgcccaggctggtctcgaactcctgagctcaggcattcgcctgcctgggcctcc

SEQ ID NO: 97570 - DNA, 14191 bp, Homo sapiens
tttcacctagtaaaaagatgtttgctgttggttttaggtaaatatactttatcacaataaattttacttttgcattccttgaattagcctttgattggttacagtgtgttattcttttaaattattgctgaattgccaagtattgcttgccaatattttatttagaacttttgtatatatataagtcacgtaaggtttttgttttgttttgttttgttttggtggagtctcgctttgttgcccacgctggagtgcaatggtacgatcttggcttacttcaacctctgcctcctgggttcaagcaattcttctgcctcagcctcccgagtagctgggattacaggcatatgccaccactcccagctaatttttgtatttttagtagagacagggtttcaccatattcgccaggctggcctcgaactcctgacctcatgatctgcctgtctcggcctcccaaaatgctgggattacaggcatgagccaccatacccagccggtttttttttttttttttttttttgggggggggggtattctatcatgttttgattttaaagttttattggcttcacaaaacatattaggaagttttccatccttctcttcattctggaataactaaaatatcagaattactgttcttaggttagtggaaacaaattaggaaatcacctggtcctgctgccttctcaatgttgacctttaaccaccttttcaatctaccctgtggtaactggtatgtttgttttttgagaaaacgttttgctctgtcacccaagctggagtgcaatggcacaatcacagctcactgcagccttgacctgctgggtttaagtgatgcttccatctcagccacccaagtagctaggaatacaggtatgcaccaccatgtccaactaatttttaaaaatttttttgtggaggtgaggtctcattacgttgcccaggctggtgttgaacttctgagctcaaacgatcctcctgcctcggcctcccaaagtgctaggattacaggtgtgagccactgcacccagcaagtaactgatatagttgagttttccagatgttcttggattcctttttattttgctaggaaattatccaatttttctaggttttcaaatttgttgcgataaattttataatttaaaaaatctcggccggtgcggtggctcacgcctgtaaccccagcactctgggaggctgaggtgggcagattatgaggtcaggagtttgagaccagcctggccaacatggtgaaaccccgtctctactaaaaatacaaaaattagccaggcgtggtggtacacacctgtaatcccagctacttgggaggctgaagcaggagaatcgcttgaacccaggagccagaggttgcagtgagccaagatcatgccactgcactctagcctgggctccagagcaagactctgtctcaaaaaaaaaaaaaaaaaatctcttttgcatctgtgcttatatgccctttgaaaattcctaatcttgtagaacttcattttctcctcctttttccttaatcaagctctgacagaatttatctacttaattggtatatttttaaaaaacagcttttagatttattgattataatttttgggagggttacatttcattaatttcaacttccatctttattaatttcctcttctttctttgtttgttgctcctctaagtcttcaacatgagtcctagttgccgttgtttttagttttttaaagttaataatgaaggtgattaggcattttctcctgaatacagtttttttcttttccattggttttggtagtaattgttccttccttgctttctggatagtttgtaatttcattttttatttcttctttgaactaatactgtaactaatgggattctgagtttgtgtttgtaaaattcccagttaaaacttttaaagtaattgtttattatttatttctatttttatttgattataatctgagaacgaggcctagaagatttctacttaaaaaattttgttaaatccttgtgataaatgacatgatatattttggattgatcagctaggatctatgattaaattaggatgctttaggctgcaagtaacaggatacctgattaaagtgcttgaatgaaggaactgatttttcccactttccaaacaggctggggcaagcagtcctaggattagttcagtgtgcgaaagattattaaaatgtacattttggtgttgctatacttttctctttttatatttttttatgatgggattttcaaacacatacatgaatagagaaaaaaggacagtgaagctcatgtgcccattacccactttcaataacagtatgctttcagacattcttgtttcatatattcctccaactttttttttgtcattgttagagtatttaaagcaaatttccggcattatattattcacctgtaaatttggtcaaatgatattaaactatcaatacttgacaatattttaatctataaaacaacaatttcatgttgttcaatctaatgtttgactatatacagaaaacagaaactctatatatccatcaatatgtattccaaatcccacacagatctatgtgcaaatgtcaaagtgcatcacacaacctgtctgtcatgctttttcctggaggcctgtcttccagtctgggtctgggtttgctacacaactgtcactctggtgttgctcttcgctgctttcctgtagagcaggctcctgtgtccttaatcatatgttttaatcattcttgatttattctcttattttgcagaaacataattctctataagcttccgaaggaaaggtgcatgagaggcaaaaagtttgcatctctgcatgccttcatttacccttgtgcttgactgattgacttacaaaattctatgccaaaaataatctcacactaagaattttgaaggcatagttccataacttacagtgttgctgttgagaggtttgatgtcattcgaatacaaaggattgggagttatacctgtttattccctcagaaagtttgtcagatattccacttatctctcttctccattttcacaaccatctgcctttgtgcatgttttaattttgctgtaaatgcacttggaggagaatgttttttctttgacaatttccttccctatctcttttggaccctcttcttttagaacttctgtatggacctgatcctctatttttttttttttttattacagactggattttaccctgttggccagtctggtcttgaacccctggcctcaagtgatccgcctgccatggcctcccaaagtgctgggattacaggtgtgagccaccatgcccggcccctgattttaaacttttctcacctagtttccatttgttattatgtgggaaattagctcaactttgtcttccaacctttctattatttttgtttgtttctgctgctctatcttaattgtttctctttcatagcatctcattcttgttgttgttttccccaaatctctctgaggatattatgtgtatctttcttttcaaagtattcttctgatttttgcattgtctctttttttttttttgagacagagtcttgctctgttgcccaggctagagtgcagtggcatgatctcgcctcactgcaacctccacctcccaggttcaagcagttctcctgcctcagcctcctgagtagcagggattacaggcatccaccaccacacccagctaatttttgtatttttagtagagatggaggtttcaccatgttggccaggctggtctcaaactcctgacctcaggtgatctgccagcctcagcctcccaaagtgctgggattataggtgtgagccaccgtgcctggctgctttttgcattgtttctatttcttctaagttacttttcttttctttctcttcttctttccatttttctcctgtttgcttgttttgcttatcttttatattgccggctttccttacaatcatattttcagtaacttagtcatacataaatcaaaacagccaacaataagcaggacttaaggaaattttccaatatgtagacttatgggcttgaggaatggtggtgactgggtggggaactggcatttttgttagtgaatctccaaatgtcagatctatgcgttctgtcttctgcagtggtgtctccaaatcctgagtcttctgtgaggtccatgggggtaagctgacttgcttctcattatttctgtaggcacttagtctgtaacatcctttggtttactgtatagttactccttctccacttgctttccttctttctttttgtttttaggcaggatcttgctctgttgcccaggctggagtgcggtggctcagtcatagctcactgcagccttgatctcctgggctcaagtgatcctcttacctcagcctcccgagtagctaggactgcaggtgtgcaccaccatacctagctaattttttaattttttgtagagacagggtcctactatgttgtctatgctggtcttcaactcctggcctcaagtgatccttctgcctcggcttcccaaagtgttgggattacaggcgtgagttaccacacctggcccctctgttttcctactaattatttgttgaaacctcttgtttaggttatagttttgtaccagctaggaatattttcagctataagttaacagaaaactggacttaaaaatggatataaaaaaagggttcatttttctcagtaataagaagtttggaggcagatggttactggccttagttcagtagctcaataatgtctggaccaatgtctctgtggttgtcttggccttttcctcatggtcaaaaaaggaaaagtgcagctgcacatgatatccacagttaaggcaggaacgagtaaaggattgtgttgcttttcctgacccaccccaaacagatatctacttgtgttccattggctcaaatagggtcatatggttactccttgctacaagggagactgagaaattggcttggttttttgatgccctgaaaaaaaaattctcttggccaggaagaaggggatggggatgggtgtatactaggtagtcaatgaacaatctgttacatctttcatattttgatgctatcattttaatggggcttcaggtgaaagaagatagacatgccatgtgtaattgcatggtgaaaattaagcgagaaaatccatatgaagcacttagtgcagtgcctggcatgtagtaataatcaataaatatttgctactatgttatgacccatatgctccactttgtacatgttgtctcgtggcagttggaatgatcaggtggagatgccactaggctcctagataaatgggtcatccctgcagagaaattgggctagagaaattaatttggttgtcatcagtatgtggatagtgtttgaagccacatacatggatgggattatccagggagaagttgtgtaatgacaagcaagcaggaagaagacactggagaatgtaaattaagcttaaccaacattataagttgtgatgttacatgtttaggttttaaaaaatgaatttattcctctagtgcaatatattaaggtactgaattatcaagaaattgaatcacaataagagatgttgcaaaaatagttgcaaagtcagactcagtgtggcacatttgtagctatatattaggttggtgcaagagtaatggcaaaaaccgcaattacttttgcaccaacctaatagtgccagtccaggaacggtggctcacacctgtaatcccaacactttgaggggtgaggtgggtggattgcttgagctcaagaattcgtgaccagcctgggcaacatgatgaaaccccatcagtacaaaaaacacaaaaattagctgggcatgggccttactttcttatagctatttttaaaaagagaaaaattttttaaaatgcaatgacagtaagttgcagaaatctgaattaaattgcctttaaaaaaaccacatttgtttcttcccaggccatgaaaatgtggaatacaacrgggaccatcatttagagatggcctggctgtgattatagcagccctgctctgtctttactaacaagccagcagcatgtaagaacacactgtggatgtgtgtgttttcttcttctgtgttttattttctcaaaaagaatgactgatgactttcttttgcaaattgtactatattattccaattgcagtggtaagttctgccaacattttttgatgcataaggactgttttgaatctattgttttattatgtctttttttttgcaaaattaagaatattttctgtttcttagtaatcatgttaaattaatgtacagtgttatgacactgagcataagcctttgaataagtcctcagaaaatatattttccataaagactcaatggtagttttgtaaaataaaacacttgtatttggagatagccaaattctaaaattaaaattacatcttgattgctacatattttttaaaccgtatgttatgtatcagtcctctgcacttcaaaggattattaaaggactggtatatgtatataagaggatgatgaaatggttacatggcctggaaaactatgtcataatacaaggaatgcttgaaggcattggggaatttagctggagaaaaaatacttgaaatcatgatagcttccttcaagtatttgaagggctgatacataggaaagggtaaatgttctctctttttccagaaggcaataatcttgattggagccatgggtgaatttgctgaatttgcttatttcagctgaccctgacaacaagttttcctgtaaagtcattaaatgtatataatggtggaattttatcaatacctaggagtagtctagatcagggattggcaacccacggcctgttttgcaagtttagtaaatgaagttttattggagcacagccacacccatttatttatgttttggctatgactgcttttgtggtacatgggcagagtggagttgttacaacaaagactggatggcctcaaagcctgaactatttaccatctggccttctacagaaaagggtttgctgctcactgtataacagctgtcagacaagccgagggtgttgtaggtctaactcatcaaatggtatgttagactagatgtcctctgaggtcctgtccagctaagattctgtgtttcttttttgtttgtttgtttgttttttaagacagagtttcgccttgtggcccaggctggagtgcagtgccctgatactcggctcattgtagtctctgcctcctgggttcaagcagttctcctgcctcagcctcctgagtagctgagattacaggcgtgggccaccatacgcagctaatttttgtatttttagtagagatggggtttcaccatgttgtccacgctggtctccaattcctgacctggggtgatcggcccatctcggcctcccaaagtgctgggattgcgggtgtgagccacggcgcttggctagattctgcgtttctttctttyttttttttttttttgtgagacggagtcttgctctgtcgcccaggctagagggcagtggtgcaatcttggctgactgcaagctccgcctcccgggttcataccattctcctgcctcagcctcccgagtagctgggactacaggcgcccactaccacgcccggctaattttttgtatttttagtagagacggggtttcactgttttagccaggatggtctcgatctcctgacctcgtgatccgcccacctcggcctcccaaagtgctgggattacaggggtgagccaccgcgcccggcagattctgtgtttctatacagagctgatgattgcgcatgtacttaaaatgtgttcatagttcaagagttagaattagaatagagatactcactaatagagttgtgtttacctcttccatagatattaatacttgacatttgtgtgaaatatgaaatttgaacacctttctgccttaactatgaattgacatttttttgagtttccagttgtgacaatggtaaattgaaatgcaacaatggattttgtgaacaattaggtggtgtcagattcaaagttatttaatattttcaaaaataacttttctccagcagaccattagtggcatgaatgtctgtgcaaccagagtggctagcttttccttgctttttcatctgagtatttcaaggtactttgctaatatttttatactttattcatcaagttcctttttacacaaatagacagggttattaagaaaggttccattggatgttctattgaaacatagaaggtatttttttaggggaacaaaattcactgaggagctgtaattttggaaaaagaatagtttagtctaattgatataaattactctaatggaaaactaggaacatgaaaaatatctacagtagagttggaattctaacaccaggctttagacctcaaatactaaatcatttattttcctttagaacataaccgatctatattaaaatgacttaagggtatagtttttactttaaagttcatattttatatatgtgcatttagtaaggtaatcatatttaataaaagaaatgcataatgcagtactaattactttttatctttttttctttaatcagctttctcaggtagcaactaattacttaaaaaaattaatagactttcttttttagagcagctttaggtttgcagaaaaattgagtggaaactacagagagtttccatatatttcctcacacccaattccctaggtccctcagtttcccccattattaacatcttgcattatgtagtatatttgttacaattgatgagccaatattgatatattattaataactaagctgataggttacattagggttgactctttttttttttttttttttttgaggcagagttttgctctgttcccaggctgctgtgtaatggcatggtcatagctcactataaccttggactcctgggctcaagtgatactcctgcctcagcctcctgagtagctgggactaaaaacacgtacatgatgctcagctaatttttttattctttattttttgtagagatgggatctcgctatgtttcccgggctggtctcaaagtcctgggctcaagcagtcttctcacctcagcttcccaaagtgctgggattactggcatgagccactgtgcctgtccagagttcacttgtgatgttgtacattctactggttttgataaatgtatgatggcatgtgtctaccattatagtatcacagagaattgttccactacactaaaaatcccatgtgctctgcttattcatccctccttctctccctctagcccctgacaaccactgatgtctttactgtctccctagttttgctttgcccagaatgttatatagatggaataatatagtatatattttcacattggcttcattcacttagatacatgtctttaaggttccttcatgtatttttatggcttgacatttcatttcttcttattgctgaatactattttattgtttgggtgtgccacaagttgtttatatattcacttattgagagacaccttggttgcttccaaatttgttattttattaatttttttagagatagggtctttctgtgttgcccaggctggtctcaaaacctggccttaagtgagcctcccacctcagcctttcaagtagctggtattacaggctcaagccaccatgctcagctggtttcttccaagttttgtcaattatgagactgattacttttttaaaaatgtattttttcaaaattataatcatatataattatagggtacacagttttccccctatgttttcttatagtatgtttttaaaatcagtttcaggtcttgtgtttaagtctttaatccatttcgagttgtgttttgtatatggtgtgacataagggtcaaatctcactcttctgcatgtggatgtccagttttcccattattctttattgaagagactgtctttgccccatcgtgtgttcttggaacctttggaaaaaaaaaaatcagttgactgtaaatatgtgggtttatttctgggctctctatcctgttccattggatgatgtttctatttttatgtcagtaccatgctgttttaattactacagctttgtaatatagtttgaagtcaggtagaatgttgcctccagctttgttctttttgctcaaattgcctgggctacttagggttttttttttttttttttcatgtgtgtgtggttctatataaatttcaaaataactttttctatttctgtgaaaaatgtcattgaaatgttaatagggattgcattgaagctgaaggtcattttgggtagtgtggacttttttttttttctttttttttttgagacagagtctcgctctgtcacccaggctggagtgcagtggcgtgatctcggctcactgcaagctctgcctcctgggttcacaccattctcctgcctcagcctctcgagtgcctgggactacaggtgcctgccaccacacccggctaattttttgcattttttagtagagatgaggtttcactgagttagccagaatggtctcaatctcctgacctcgtgatctgcctgcctcggcctcccaaagtgctgggattataggcatgagccaccgcacctggcccgtagttggactttttaacaatattaattcttccaatccatgaacgtggaatatccttatatttatttatgtcttcttcaatttctttaatcaatgttatatttttcagtgtacagagctttcatctcattggttaaacttattctcctaaggtttttttttttgatggctgttgtaaatgagactgttttctatatttctttagatagtctgttgctagtgtataggaatgctactgatttttgcgtgttgactttgtattcttcaactttactatttatcacttctaacagttttttggtagagtctttatggtttttgtcatcagcaaacagtgacaattttaagtttttcctttcctatttgaatgccttttacttctttctcttacataattgctccacaaggacatccagtactacattaaatagaaatgatgagagtgggcatcctggtcttgttcctgatcttagagaaaaagttttccatttttcaccattgtgtgtaatgtttgctgtgggcttttcatatatggcctttattatgttgatatacatttcttctatactaatttattagtgaaaggatgttgaattttatcagatgccttttctgcatctaatgtggtgatcatatagtatttgtccttcattctgttaatatggtgttctccatttatagatttgcatgtgttgaatcatctttgtatccctgggataaattccacttgatcatggtgaatgatccttttaatgtgctgttgaatttggcttattcgtattttgttgaggatttttgcatctatgttcatcagggatattggcctgtaattttcttttctcataatgttcttgtctggctttggtatcaaggtaatgctaacctcataaaaagagttcaaaagtattacatcctcttcgattttttggaagagttcaaaaaggattgatattagtttaaatgtttggcagaattcatcagtaacacttccagtcttgggcttttctttgatgggaaagtttgtattattgatttagtctttttgaattaccaattcaattattattggtctgttcagattttctatatcttcttgatttagtattggtaggttatatgtggtaggataaattctaggaatatatccatttcttctagattattcaatttattggcatatggttgtttgttcgtactaatctttatgattctttgtattctgtggtataaatcacagtgtctcctcttttatttctcattttatttatttgaatcttttcacttttttttctaggttaacctaactgtaggtttgtcgattttgtttatcttttcaagaaaccactgctggtttcattgatttttcttctattgtttttctagtctctattttatttatttttgccctgatctttgtcatttttttccttctgctacatttaggctttttctttttctgcttccttgaggtataacataatattatttgtgatatttattcttttctgatagactgcaggggtccccaacccttgtgacctgttaggaactggaccacacagcaggaggtgagtggcagtaccacctgagctccacttcctgccagatcagtggcagcattagagtcttatagcagagcgaaccctattgtgaactgcgcatgcgagggatacaggttgttcactcttcatgagaatctaactaatgcctgatgatctgaggtggaacagtttcatcctgaaaccctacctgcttccttcctgtcttccaccaaactggtccctggtgcatagagccatttattgctataaatttccctcttagaattgcttttgctgcatcccataagttttggtatgtgttgtgttttcatttttgtctcaagatatttttaaatttcgcttttgatttcttctttgactcattggttgtttagtaacatgttaatttccacatatttgtgaattttccaagatttctcctgttactgagtcctagtttcatagcattattatcagagaagatacttgaaattatttcacttctcttaaatttgtccagactagttttgtggcctaacatatataataaaggtatatatttttcatttattaaacaattatatatttgataccttttatatatgccaggcactgtttttggtacctgacctagagaaagttccatgtgctcttgagaagaatctgtattctgttgctgttggatggaaaattctacatatgtctgttaggtccatttggtctaaagtgtagctcaagttcaatatttgcttattaattttgtttattttttatgtaatcttaaagtttacctacaatataaaaactttagcatgaaatatatatatattttatttaagttccaggatacatgtgcagaatgtgcaggtttgttacataggtaaacgtgtgccatggtggtttgctgtacctatcaacctatcacctaggtattaagccccgcatgcattagctatttatcctgatgctctccctcccctgctccccaacaagccccagtgtgtgttgttcctctccctgtgttcatgtgttcttattattcagctcccacttacaagtgagaacatgcagtgtttggttttctgttcctgtgttagtgtgctgaggataatggcttccaggtccatccacgtccctgcaaaggacatgagttcatttctttttatggctgcatagtattccatagtgtagacgagcatgaaatattttcattttcttatttatgtattcatttttattttttgagatggaatcttgctctgtcatccaggctgtagtgcaggggtatgatctcggctcactgcaacctccacctcccgggttcaagcaattcttcctgcctcagcctcccaagtagttgggattacaggcacctgccacccatgcctacctaatttttgtagtgttagtagaaatgcggtttcaccatgttggctaggctggtcttgaactcctgacctcaggtgatccacccgcctcggcctcccaaagtgctgggatttacaggcatgacccactgtgcctggtctgagcatgaaatattttaaataaatattttttaaaaaggtatctcaattttccaaaaacttgaaatctattttagtttaccagtacaaaataaatgtgatttaaaaaaaaaatttacacaagatttacatggttgtcctaaaatttaaatgatgtggatttatgtggagtaaaagatgtaagttctttctgtcctcttaataccatagtcctatacattttttcctatgcatgtaacatgtatatatattgaaaatacatgtaatataatcccttattattttaaaaaaacctatacattcccatgtagttacatttatctctgtcatttgtgaagatgggatcatgccacacatattattctgcaacttaaaaaaatttcactgtattgtatattgtggatatcttttgatggcagtgagtgttcttttaaatcactgcagaatattcagat

SEQ ID NO: 97571 - DNA, 14431 bp, Homo sapiens
agctggagggggttcagtagattttgagtaacggtacaaataaactaaattttggttgggtgatataaatgcctcttcttttgcaacacaaatagaatttgcaaatcttgtcaggcacagtggctcatgcctataatcctagtgactaaggaggctgaggtggggggggattgtttgaggccaggattgtttgaggagttcaagaccagcctgggcaacacagcaagacattgtctctataaaataaaaaaaaattcagccagacgtggtggtgcacacctgcagtcccagctacttgggaggctgtggtgggaggatcgcttgagcccaggagttcaaggttgcagtgagttatggttgcaccactgcactccagcctgggtgacagagcaagacttcagtatccaaaaaaataaaaacagaatttgcagatctggaagacagattcagaataaggcactttatttatttattaattttaaataaagacaaggtctcactatgttgcccaggctggttctggaactcctgagctcaagcaatcctcttacctcggcctcctacagtgctaggattacaggagtgagccactgaccctggccagaataaggcactttaacttttttttttttttttgagatggcgtctcactcttgatgcccaggctggagtgcaatggtgcaatcttggctcactgcaacctctgcctcacgagttcaagcgattctcctgcctcagcctcctgagtagctgggattacaagtgcccaccacaacactcagctaattttttatatttttagtagagacagtgttttaccatgtccgccaggctgctcctgaacccctgacctcaggtaggtggatccacccacctcggcctcccaaagtgctgggattataggcgtgaaccaccatgccaggccacctttttttttttttttttgagacagagtctcactgtcatccaggctggagtgcagtggcatgatcgcggctcactgcaaccttggcctcccgggttcaagcgattctcctgcctcagcctcctgaatagctggaatgacaggtgtgtgccaccatggcctggctagtttttatattttagtagagacggggtttcaccatgttggccagactggtcttgaactcctgacctcaggtgatcacccgccttggcctcccaaagttctgggattgtaggtgtgagccaccacacctggctggaataaggcactttaaaaacaggctttcaggctcagtgaggtggctcacgcctgtaatcccagcactttgggaggccaagacaggcagatcacttgaagtcaggagtttgagaccagcttggctaatatgacaaaacgatgtctctactaaaaatacaaaaattagccaggaatagtggtgggtgcctgtaatcccagctactccggaggctgaggtaggagaatcgcttgaacctgggaggtggaggttgcagtgaaccaacatcgccccactgcactccagcctgggcaaccaagcaagactccgtctcaaaaaaaaaaaaaaaaaagaagcttccatggggcagtaatatttttaagacaactgtaattattttttagaaaaaatataccaactattagaagggaatgttattataagaaatgttaagcttatttccttttcattttctaaggtgcctgggttgctctgtctatccgtatattttaataatacaaagctctttgttagttaccataagagtaagggaaggccgggtgtggtggctcacgcctgtaatcccagcattctgggaggctgaggcgggcggatcacaaggtcaggagatcgagaccatcctggctaacacggtgaaaccccgtctctactaaaaatacaaaaaaattagccaggtgtggtggcgggcgcctgtagtcccagctacttgggaggctgaggcaggagagtgttgtgaacccgggaggcagagcttgcagtgagtcgagatcgcatcactgcactccagcctgggcgacagagcgagactccgtctcaaaaacaaaacaaaacaaaaaaaagagtaagggaaaatactcaccactctctccagaattacatcattggcatcaactagtaaatcaaacttgtcttccagctcagtcactttacttcgatccttaatgttgctgcgacacccatggtactgcattactctgctcatgctaaggaaaggaaaaccaaggttagcttgtagatttttatttcacttgtttacattctgtgagagagaatgttcaaatgatgtggctcagactgttcccaacacatctttttttttttttttgagacagtcttgctctgttgcccaggctggagttcagtggcatgatcttggctctctgcaacctcaacctcccgggttcaagcgattctcgtgtctcagcctcctgagtagctgggattataggcacatgccaacaggtctggttaatttttgtatttttagtaaagatgaggttttgccatgttggccaggctgctctcgaactcctgacccgaagtgatctgcctgcctccgactcccggattcaagcgattctcatgcctcagcctcctgagtagctgggattatgggcacacgccaccaggtctggctaatttttgtatttttagtaaagatgacgtttcaccacgttggccaggctggtctcgaactcttgacctgaagtgatccacctgcctcggcctcccaaagttctgggattacaggtgtgagccatgagcccagcctttttctttctttctttctttcttttttttttttttttttttaaagagacagggtcttgctctgttacccaggctggaatgcagcagtacaatcacagctccctgtagccttgaactcctgggctcaagtgatactcccacctcagcctcccaagtagctgtgacttgggagtggtgcaccaccactcccagctactttaaaaattttttgtagggatggagtctccctacgttgcccaggctggtcttgaactcctgggctcaagcgatccttctgcctttgcctcccaaagcactaggattacaggcatgagccgccatgtctggcccctgatactttttgatgaaaccaataaaacttgcaccctagctgggcgcagtggctcacacctgtaatcctagcacttcaggagtggtcacgacttcgagaccagcctggccaacatggtgaaaccccatctctactaaaaatacaaaaaactggctaggcgcagtggcttatacctgtaatcccaacactatgggaggctgaggtgggtggatcacaaggtcaggagttcgagaccagcctggccaacatggtgaaacctcctctactaaaaatacaaaaattagccgggaatggtcgtacatgcctgttatcccagctactggggaggctgaggcacaagaatcgcttgatcttgggaggtggaggttgctgcgagccgagatcacgccactgcacttcagcctgggcgacagagcaagactccgtactcccccccaacaaaaaaaaaaaagctggtcgtggtggtgtacacctataatcccagctactcgggaggctgaggcaggagaatcgcttgaacctgggaggcgcaggttgcagtgagccgagattgagccaatgcactccagcctgggtgatggagcgagactccatctcaaaaaaaataaaaataaaaataaaaatacctgctactctacaagttgtgggaaagaatcttggatctggcaaggcgcggtggctcacgcctgtaatcccagcactttgggaggccgaggcaggtggatcacgaggtcaggagatcgagaccatcctggctaacatgttgaaaccctgtctctactaaaaatacaaaaaattagctgggcgtgttgacgggcacctgtagtcccagctactcaggaggctgaggcaggagaatagcgtgaacctgggaggcggagcttgcagtgagccgagatcatgccaccgcactccagcctgggcaatagagcgagactccgtctcaaaaaaaaaaaagaatcttggctctaagtgttcacgtcccatttaattaaaaaagatttgtacaaaagtcaatatattttttcagtacaaaagtcaatacattttttaaaggctaaactaaaaatataccaagtaatatttccctaatcaaaatccattgcttcaattttcacattttatagctcttcataccacagaaaatgtttaaggaaaaataaatttcaggaaaaatttatctacttctttgttttcatttcttttcactaacacaagaaaacaaagtacagtacttaccactgaagcaacctgtctccctgtgtttcgcaaaatgcttggaagccaggaaaacttcggtaaaaatcatactcatcgccaaactgtggtaggcccccagatgccttggtgactgccaccacggacccaagagcaaactgtcaaaaacaagaaaagatggcatgtttacacagggatccccattcatttggtatgtcatttttttgatctatcgtatacaaggtatctactcttcatccatcaaaaaaagcactcatttagtgccaaaccccaatctaatctaggccctgagaatacaatactgaacaggaaaccaagtttggagcttatattcttgggagagttgagagacagaatacatacgtatataatctgattaatattcacaaatacctggggttgaatcttgactctgctacgtattaactgagatcttggacaagtgattgctttatttggactttagtgttctcctctgagaaacaggaaaaataaaaagggcctgcaccacagagtttttgtgaggacagaatgaataagctaataaaagcacttaggacagttcttggcacataagcgttattattacgactcaagttcagatccaagagctttctacaggaatttgtttttgtgttttcatctggatgagcatctaaaaacaatacaagcttatcctagatccttggacgacaaatttataacagctactatctaaaactggatttgtgtttattgttcagttagtgtcaagtggttctctattttaactgttgtgaggtaacgaaaaaaagccgtgaagtgacataaatgatggctgatcatgtgaaggcctaaaacgtcattgtgagttttgtgaataaacatttcccaagaaaaaagcagagaaaggaggtgggaaattaagtcacggaggggaacatggtagcttatgagcatgaccgccacacaaccaggaccacagttagtggtccaggaactattgagagccatgttaatgaatcaatagcattagctaacagcaaattagataagatacaacgttagtggaatttctgtaaatttatagggttaatttacaaattattttagtttcattgctttgtaagagctatgcacaccttaagcctagttgtacgtttgctcatatttaagctaagttatacaaagatcttaagtgaacgccctgtataccttccaggagttactaataaacgtgcaatggggctttaacaggtgacatttaactcagggttaaaaattatgtaggactggacttcagaaacagaggaagagaagggccatactggccgcgggaggagacaactccaggcaagtgtggggagcgcgaagaagccgagcccctgcggagagctggtcgggtggctagggcgtggcgagcgcgacgtcgcaagggctagggacgtctgggtggcaaggaagcctttcccaggatgcgagacggctttccacatttgggcctccatggacttaggctcgcaagcgggacgcccctcagtgtccgtttccgaggccccatccccggagggtgcaggagagtctgcgcccagcgcggacaggggccccgcgaccctcgctcgggctccactacggcgggcgggcattggctgcccagagggcccagtcggcttccggcggccgcgggcgactcctggtacccccgaggccccgcgaactcaccttcacaaagctgtcggcgtccgggaagcctggcagcaccatctcyccgtcggatttggttgcgctggtcgccgacaggaccctgggctccmgggtactgggtggcgccattttttcagcctgcacggctcgtctcgcgagagcttgtyggccgaggagacgggacgcgtgcgcaccacgcatgcgccaggtcgaagcggcgggcggggcgyctgattatagtgtggggagcctgcgattggggtggggcgcctgcgattaggttgggaagcctgcgtttagggtggggcacctgcgattaggttgggaagcctgcgattaggttgggaagcctgcgattagggtggcactttcgagcgctctggtgtgaatttcacgttcttttacctcatattgtatcatcccaacaaccctgtgatctagggtgcggcctggaggacctgactatcacatatatttttgacacgaggtttgcccaatctggtttcgaactcttgggctcaagagatcctcccaccttagcctgcgaagtagcagggaccccaggcgagggccacgatccccgcttatcctcgtgtttatttaaaaawttaaaaaacaaacaaaccgggattaccgggagtggtggtgcgcatctgtagtcccagctgctcgggaggctgaggtgggatggttgcttgagccgaggaggtggaggctccactgcactccagccggggtgacaggatgaaaccctgtctcaaaaatttctttttaaggttatgtttttgaggctgggcgccgtgactcacacctgtaatcccagcactttaggaggccgaggcgggtggatcacctgaggtcgggagttggagaccagcctggccaacatggtgaaactctgtctatactaaaaatacaaaaattagtcgggcgtggtggcacatgcctgtaatcccagctactcgggaggctgaggcttgagcccgggagrtggaggttacagtgagccgagatcgaaccactgcattccagcctgggcaacagagtgagaccttgtcacaaacaaacaaaaaaaaccatgtttttgggacaaagtttcactcttgctctcccaaagtgctgggattacagatacgagtcatcagcgtgcagcctatttttatttttattttttttgagatggagtctcactctgttgcccaggctggagtgcagtgacgcaatcttggctcactgcaacctcccgcctcccgggttcaacgaattctcttgcctcagcctcccgagtagctgggattacaggcgtgcaccaccacgctcggctaatttttttcgtatttttagtagaaacggggtttcaccatattggccaggctggtctcgaactcctcaccttgtgatcctcccgcctcgacctcccagagtgctgggattacaggcggagccaccgtgcctgccctgtttattttttttttttgagacagagtctcactctgctgcccaggctggagtgcagtggtgcaatctcagctcactgcaacctccgcttcctaggttcaagtagctgggattacaggcgtgtgccacaatgcccggctaattttttttttttttttgtatttttagtagagatggggtttcaccatgttggccaggctggtcttgaactcctgacctcaagtgatccacctgctttggcctcccgaagtgctgggattacaggtgtgcgccaccagcgcctggcttattttttttagaytgcatcttaccaacctggtctcgaactcctgggctgaagccgtcctcccacctcactgggattacaggcaggaaccactgtgcccggcccagcctcatatttaaagtcacctcctcccaagctctggctggttctgtgttcccctcacccatttggtcttgactcctgtaattaattacacctcccctgccccctggatctatcttttccctctctattggttcattcctaacagcctacaagtacactgacatctttcccaactaaaagagaaaaggaaaaaacactggctcccacatctccttccaactgccatcatctctctcttgccctttacaggtaagctcctgaagaaagcgtctagctccaactgtgcttcctccctccagtaccctctgaactcctccaagcagacgttgtttcctgcagacatcgctggaaccattctkgttaacacagagtgggaactcagtacacatttgtgaagtgaactcctggaagagctcttgtgagggaggcaccgaattatcaggcagctcaagagatagattcactctcctgaaattagagatgggatgcccttaatacaattcattccacccattaagtcttcaataaatgttcagcatatccagttaagagaatacttgcttttcactttttccgtgtgtgtgcttcaggtacacaggtactctggcaggacaaacgcctagttcatttagtatttttgaggacctatttcacgtggttcaacctaataccacatgtcagtcaggctgtgctaaatgctcctccatggattatcttgtctttcagacagcctcacaaggtagggcttacccacactttcagaggagacaagcagagagaatctacgtaacttatccaaggtcacaaaggtactatgagatgcagttgatatttgaaacttagtaagttgacactacagccttgattcttttttttttttttttttgagatgaagtctcactctattgcccaggctggagtgcaatggcatgatcttggctcactgcaacctctgcctcccgggttcaagtgattctcctgcctcagcctcctgagtagctgggattacaggcgtgcaccaccacgcccagctaattttgcatttttaagtaagagatggggtttcaccatgtgggcaaggctagtctcaaactcctgacctcgtgatccacccgcctcggcctcccaaagtgctgggattataggcataagccaccatgcccggcctcagccttgattcttaaaaaatacaactggctgggcgcagtggctcacacatgtaatcttagcactttgggaggctgaggtgggaggatggcctgagctcaccagtttgagatcagcctggacaacatggcaagaatcagtctctacagaaaatacaaaaattagccgagtgtgatggcatgcacctgtagtcccagctactcaggaggctgaggtgggaggataactcgtgcccgggaggtggaggttgcagtaagctgagattgcaccactgccccccagcccgggtgatagtgccagaccttgtctccaaaaaaaaaaaaaaaaaaaaaaaaaaaagaaaaaaatagttaacctgttaacaacatctggtgattaggggctcccatccctttgagcagtcgaaaatccacatatagcttttaactcccccaaaacttaactaatagcctcctgttgaccaaaggccttaccgataacaaacggtcaactgacacatattgtgtgtatgtattgtattcttacaataaattacgaaaattttaaggaaaatatatttactattcattaagtggatcatcataaagatcttcatccttgtttatgtatttatttttagagatagggtctctgtcatccaggctggagtgcagtggcacaatcatagcttactgtaagcttgaactcctgggctcaaacaatcctctggcctcagcatccagggtagactgggcccatgccaccatgcccaacgaatttttttattttttgtagaggcagggtctcactatgtttcccaggctggtctcaaactcctagattcaagcaatcctctcaccttagcttctcaaagtgttggggttacgggcatgagctgccgtgcctggctggactaaactgtatttaaaggcctccactagctcctcctctgcctttgataatttgtctcaacacacccagaaggctttgcttagatataacttaaaacctatcggattcaccaaagaccttaatccagactcttatatcctaaagaatatatctttatcactgatggccaccattttcctgcctttatcattctcacacctttatcgttcatgaatagtaacatcactgtagtcactgagagttatttcatctggagccaggaaagttatggtgaccatattttctggagcaaataggtgatacatggtttaggactgtaacagaaaatccaagtaggtatgtgactttctagctgtgagtgttagaactgttattagtatcaccattgagatttaaattcacctttttttttggaaacagtcttgctctgtcacccaggctggagtgcagtggtgcgatctcggctcactgcaacctttgctgcccggttcaagtgattctcctgccttagcctcctgagtagctgggattacaggcgcctgccaccatgcccggcctttttttttttgaaacggagtcttgctgttgcccaggctggagcatagtggtgcaatcttgtctcactgcaacctccgcctcccaggttcaggcaattctcctgcctcagcctccccagtagctgggattacaggtgtatgccaccacacctggctaacttttgtatttttagcagagacggggtttggccacgttggccaggctgctctccaactcctgacctcaggtgatccacctgcctcagcctcccaaagtgctgggattacaggtgtgagccactgcacctggccaccagttgccttttaaaaacaccactcagggctgggcacagtggcttctctgggaggctgaggggggcagattgcttgagtccaggagttcaagaccagcctgggaaagatggcaaaaccccattgtctacaaaaaatgttgcgggaagtcaggaaccctgaatggagggactggctgaagccatgacagaataacataaattgtgaagatttcatggacatttattagttccccaaattaatacttttataatttcttacgcctgtctttactgcaatctctgaacataaattatgaagatttcatggacacttgtcacttccccaatcaatacccttgtgatttcctatgcctgtctttactttaatctcttaatcccgtcatcttcataagctgatgaggatgtatgttgcctcaggaccctgtgatgattgcattaactgcacaaattgtttgtagagcatgtgtgtttgaacaatatgaaatctgggcaccttgaaaaaagaacagaataacagcaatgttcagggaacgagagagataaccttaaactctgaccgccggtgagctgggcacaacagagccatatttctcttctttcaaaagcaaatgggagaaatatcgctaaattatttttctcagcaaggaacatccctgagaaagagaatgcatccctgagggtaggcctctgaaatggctgcttcgggggcggccgtcttttatggtgaaagctgtagggatgaaataagccccagtctcccatagcactcccaggcttattaggacgaggaaattcccgcctaataaattttggtcagactggttgtctgctctcaaaccctgtctcctgataagatgttatcaatgacaaagcgtgcccaaaacttcgttagcaatattaattttgccccggtcctgtgatcttgccctgcctccactgccttgtgatattctattaccttgtgaagcacgtgatctctgtgacccacaccctattcgtacactccctccccttttgaaaatcactaataaaaacttgctggttttatggctcaggggggcatcatggaacctgccaacatgtgatgtctcctctggacacccagctttaaaatttctcttttgtactctgtcccttttctcagaccggctgacacttagggaatatagaaaagaacctatgtgaaatatcgggggtgaatttcccccaatatacaaatattagttggcggtgggggtgctcatctgcagtcccagctaattgggaggctgaggcgggaagatcacctgagcccagggggccgaggctgcagtgagccatgactgtgccactgcagttcagcctgggtgacagagcgagacccagtctccaacaaaaacaaaaacaaaaaacaccactcagatactactccgttttaaaacttcacagcatcaggttcatactccttgctgctgaactgagggaggccccggtctggccccggccccgtactgctttcctgcctcctttagttcctattattttcctgttactccctttattccccactgaccactgagccagacatgctgaactatgaggtgcagccataagaaaatgccagttttgtatattaaaaatggtccacgtacctgtgatttcaaatggtccaactgatacttgccactgctatggataccttgcttttacagcagtgcctcacacttccttttctgctgagaatgccccccccttggttcatctgacagactcccacccctctttaagacccatgccaaatgtccctctttctatggggctttccaggctcacccggtggaatacacgctcctacctgtggcccatacatgcctcttctcagcacttggccggggtaagttctgttcacttcagtggcatgctgtctccacctgtctggcctgggaacagtctgaggaaagggaccatgtcacgtacacccttacgtcctctgtcatccctactacagagtgtttactgaaggctgagtgctgaagagagtaaatgcttcctttttgaactgatcaaaattatgactaaaacgccactcatatacatatgtttaaaattctgatgtcatttattggcacaaaaattattctgatacaacatggtgtctagacatggctacactttatactttgtgcatttagttgagtatttgttctgctcataatttccaatatgtaccagaccttccctgtgttcagcacctccatgacagtatttctgttttctgagcccttgctctaaacagagtattttgaccactgaaaacatcccagaaccctgctgcagaaggccagtgagggtggtcccactgcacagtgatcccctctgtgcatctgctcagccgaggctgccagcgatctgaataaacctccctactagcggtcaggtcttgaattgaagcgtgtgagtcgcagcatcactgggtctgatggaagacagaccttttgtactcattttggcctatcttgcaaacatttctgctgctgtccacagaccagtgaggtcttgggataggtggcaggggtgaggtcagcatcttctgtgtctttacagtctaggatcctaatccatgttctccacgacctgaggcttcttggctgtgctgagtttgctgtacccatgttgagaggagcaactaggtcattcttccatcagcaagtacttatgatgagttctcttgtgagttaagtcaaaacccgtatttctaaagttatggatcttctgttccccaaaatgaatggcttgatttacgtggtattactatgtttcactgtcctgggaaccaaatcaagccttgtgtttctgacaatatattcttcaacagcagctagaaagttggttcaaaccaacttttaatatacagtagttcttttcatttacatttcaaaatatttaacaaagtcaaactttctcaccatggtttcagtttagtggaagcatttactaaagtacaaaagcctcagaaaaaacgtgatgggcacatctgggcctccagttaccagaaagggcacctaagaaggcagaaagaaaaggaatattttaataatttgagcttcttcaaaggtttacacagataacttgaaaatgaaaaggccaaggtctgacaaccctagggtattccctgagctctcccacagctaattgcatgggacacactcatcatttccagtcaaggctaatgcccaccgaggtcccgcaaggacacttccccagcgcccgctctctcaagtttctgccttcaagcatgccttgggcaattaatcaaagcacaccccagagtggcccttgaggttagactcccagatcataaatctgtctttttatctccttctctctgtcactgctctagctttttctttccttcgcccttcctgtatctctgcactggactgacagcaaaacccaaaaggaacccctcacaaacaaacaagccttgcctattctcctgaaccacttatcttaatgtaattttaattttagtgtttgccttccaagtatgcatccatatttctcagtttctttttttataacaatgggcacatgcagtaaatatgaatttttaaagagatctgagctctaactgccctttacagatacctcaccaaatctctttttgc

SEQ ID NO: 97572 - DNA, 13345 bp, Homo sapiens
aacacctgcatggctgacttcctgctcacaggatggggcaggtagtggtggtagctgctgtagggggtggggacggggtggtgagggaagtggcatgcccaggtgattggggggaccagcatcctgggacaacccaggggttgggatctgggtttagtgtacctggtgtgtgtaggagcagagccaccaccggaccgagtgttgtgatgcacagatgctggggatgtgtactctaagggcatgagccgcctgttggagaactggtgatgcatggatggctctctgtgggctgccatggtgtcttggggtgaggctgcatccctagaccagccctgggtcctctctccagggtccactgtctcccggatcctggaggagggggaagttaccctcttccattgtctctcaatacaagatgatttgacctcacttgccactcctcccgggcccctcccatcttgccagggcctgaatttgggctcttaggtccaggctaccgggccaccctcaacacacacaacccctctcaaaccccaaagacccggacacactcagcagccccctcctccacacggtccgccgacctcacccagccctcactccaggcggtcgccctctcgcccacgcaagaccccgcgtgctgcagcctgtcgcgccctcggaacccgcctgcgcgcgccagagaccagctccgcctcgcctcccggcggatacaggcccacaacccatagccccgcgcctcccagacccccagacccccagaccctccctggccgccagcccaggggcggacggctccttctctcgcctggcgcaggaggcgcagcagctgccgggcgcgctccggccgccgctcgcggagcgtggactggatctcgcggagccaccgcacccggcgttcgtagggcgcgggcccgcagccggccgccgccccggcctcagagccagcctcgggcccggcccgccggcccagccgcgcccccatggccgccgcgcgatggtcgccgaacccacaggaggccgggctgtctgcgccccgctcccggggccgcccctagtcgccccgcctccaatcaccgcggccctgccccgtccgggtccgaaggctgagcgcccgccccaccccgcgccggagcgaggccagtgggttcctcggtttggcctgatcacactggaggaggccctgcttgcgtcagtcttggcgctagaacccgagggcctggagccgccaggggagacgcggagctcggccgagacgaggtggcttttggcacctctttaccctctggccccagtgctgactggggaatagtcgctttgaccgtgcaaagagcattctaggcggggtgggggggttctgctgtgtgtgccagtgttaggtattgcccccattgcttttagaaatatgccctgcatggtgaatctccgtctctactaaaatacaaaaattaggccgggcatggtggctcacgcctgtaatcccagcactttggggggccgaggcaggcggaatctaaggtcaggagttcaagactagcctggctaacatggtgaaaccacatttttattgaaaatacaaaaaattagccgggcgtggtggcgggcgcctgtaatcccagctattcgggaggttgaggtaggagaatcaattgaacctgggaggcggaggttacagtgagccgagatggcgccaccgcactctaccctgggtgacagagcaaaactctgtctcaaaaaaaaaaaaaagaaaagaaaagaaatctctgcagctggcagttgtggtgtaggacctgctcacgctacatggacactcctgcactggcaaatatttactgcctcctgcttcttggtttggggcaggcccccacctctgaccccagcctgggaaataaaccggacgaagagtcaggttaaccgttaagcccagctctgggcaagctggcagcaggcgggctgtatctgccgctggcttcagtctgcctccctgacaaggggtgggggtggcggcaggcagagtgagatgggggccctggctcctctgaggaccagggtgaggtacggacccacccagctcaaggtgtatcccacttcccagggctccctcagcagaagcctaggtctctgctgcaggcctgctgggcccctgcagccccaatcccggctctgggacgctcacatctcctgcgtggggaacgtttgaggcactgatctgcagttcccacttctctaagcaaggagcacgtgtttagcctgtgaggactggtacctgttgtgcaggaagggctgagcactgtccgagggcatatatgagggacgacagccaagcacccgtgtgtatgtgtgtgtgtgtgtgtgtgtgtgtgtgtgtgtgtctgctaattaccctatgaagattcaaggttccttcctttgggttaagcactgcctgcccagagatggcagtggggagagggcagggtgctaggctctgtcatcctgtggggctgggcccctgagacaaggcagaggacagcaggatgtcttagccccttgaccatccacggacccccaacccctgctggagcagtgcttgcacccccttctcccctggcacctgccagctggacccaacagcctctcctcccactccagtgcagccagcattgtcctggggccaccttggcaccacaggtttcctccctggcaaacctgcatgacggccttgcgtgccctcccccagggccaaggcgctgttgctgaactgaagtggcaacctacccggtcagagctttaagctgcagctctgatgccccagggacctctcagacccccctgcccagagcaggcagcccggtaagccctcctcctcttcccctgcagcctcagggctggagccacagctgggagggctcccagatcctgaccatatcctcccagaggctgagccaggcctgggcactgtcccctcaaatgtgagaatactgggcagggggaggggagaaaggagggaatggagggctgagcctggaggcatgaaaggggcaacctaggcagcggtatgggggagtgctcagagcttagagtcctgtggaaggcagagaactgccccagcccctgcctctcatcccccaccctctgtgtccctggccgagaggttcctggaggacatttttccagcaaaagagggagggtggtgtctgggcctagatccttggatgggcttttctctgcctgcttgtggggtgcctagggcgagtgggcttttggagacaatttctggcctaacctgacttggacagcagcccccagaggcacagctctcccctcaggcatgggggcatgattccacctcgctagcccacatgtgttcttcacggagggctgctggcccgtctccctggggttaccctgagcagcagagctgtgtttgttgagactccatggggtggagggattgcgatgttgtcctctcagttcccggggctgatgtggaagctcaagggcttgccctggattcttcagggtagccctgccatccctagtgagtcagtgagttgggaggttgggggctggagaatcaggtagggaggacacagctagacctcaggccctgatgggaacgtactaggctccaagtgggacctgccaggagacaagaattgatgacagccacacctttggagtctcaagccctctgccacccatgcggtggcctagttcaaatgacaggaacacaaggtccagctggcccaatgggcaggtagagggctgcagccagggctggaactggccttgcactgcctctgggcccttctctacccacccagtagtattgttcaagcccaggagggaaaaaggccagctcagggttaatgttacctcagcaagtagctgagtggcactgagcctcctggtagccactgtaaagaaggacacagaatggtttgggggcattcgctaggaggaaggaagcagatggatactctatggagacagaatgtcctctgtgtttgctctacaggaacgggttgtcaaccttctgcagggccaggaattgtcatgaggctgtagtaggcagcagagcttggcggggtgaggcgagatcacaggtataggctcagggcctggattcaaatcccctgggctgccacttgttggatgtgtaaccataggcagagtaaggacctgccatagcaaattaccacaaactcagtggcttaaagcaacagaatagttctggaggctaaaagtctgaaatccaagtataggccaagccacactccctttgaggactccaggggaagatccttccttgtctcttcagcttctggtggctcctggcaatccttggccttccttggctgctgctgcatcactccagtctctgaaaccatctaccctatgtgtctgtgtggccttcacatggcattccttatttttgcagtggggtctcactatgttgcccaggctggtcttgaactcctgggtccaagcagtcctcctgcttcagcctcccaagtagctgggattatgagtgagtgccaccatgcccggctcacatggcctccttgtaataacgctagtgcctgggtgcggtggctcacgcctgtaatcccagcacttttggaggctgcggtggacggaccatgaggtcaggaaattgaggccatcctgtccaacatggtgaaaccctgtctctactaaaatacaaaaaaaaaaaaaaaaaaaattagcctggtgtggtgacacatgcctgtagtcccagctacttgggaggctgagacaggggaatcgcttgaacccgggacgcagaagttgcagtgagctgagattgcgtggtgacttcactccagcctggtgacagagcgagactctgtctcaaaaaaaaaaaaaaaaaaaaaagaactgaagctactggatttagggctcattcattctttttttaattttaatttttttttttttttgagacagtctcactctgttagcccaggctggagtgcaatggcatgatcttggctcactgcaacctccacctcccaggttcaagcgattctcctgcctcagccttccaagtagctgggattacaggtgcccgccaccacgcccagctaatttttgtatttttagtagagacagcgtttcaccatattggtcaggctggtcttgaactcctgacctcaggtgatccacccctgtcagcctcccagtgttgggattacaggcgtgagccactgtgcccaacagggctcattcattctaatcccgtatgatctcatcttaactaattacttatgtagagactctatttccaaataaggtcgtgtgaggaaaaaccaactcaaactgtgttttttggcctggcgtggtggctcacacctataattccagcactttggggaggctaaggtgggcggatcacttgaggctaggagtttgagaccagcctggccaacatagcaaaaccccatcttcactaaaaaatacaaaacaaaaattagctgggtatggtggcatgtgccagtagtcccagctactcaggaggctgaggcaggagaatcgcttgaacctaggaggcggaggtttcagtgagccgagatagcaccacggcattccagcctgggtgacagagtgagactccatctcaaaacacacacacacacacacacacacaaaacaactgtgtttcgcctctgttctcacaagacaataatcatcacagaagacttcttgtaaccaaatttgtggattctcccacacacccagcaagaatcaattctgcagcagactccagctggtgtcttccaattcaactcaattctggtgctgtctacctggagatggcctcagaaaccacaggttgagggcttggtcccacaagaccaacccccatcccaccagtcacaagtctgggcattgggaacatctgactaactggcttctagttggggttccaaggccccctctttgggttcaattaatttgctagagtagctcacacaactcagggagacctgtttatcggtttatttcaaaggatgttttattttattttctcctcagacatactttatcatcccttaaagtcagtagctcaaaggaaactttaaaagctataaataggccgggcacggtggctcacgcctgtaatcccagcactttgggaggtcgaggcaggtggatcacttgaggtcaggagttggagaccagcctggccaacatggtgaaactccatctctactaaaagtacaaaataagctgggtgtggtggcaggagcctgtaatcccagctactygggaggctgaggcaggagaatcatmggttgaacccgagrggtgcaagttgcagtgagccaagatcacacctctgcactctagcatgggcaacagagcgagactgagactccgtctcaaaaaaaaaaaaaaaaaaaaagataaaggctacaaataaacagtcagatgaagagatacatagggtaaagactggaagactcctaagtacagaagtttctgtcctggtagagctggacacatggatgagttggttttttttgttgttgcccaggctggagtacagtggcactatctcagctcactgcagcctctgcctcccgtgctcaagtgatcctcccccctcagcctcccaagtagctgggaccacaggcatgtgccactatgcccagctaacttttttatttttgtagagayggggtctctctattttgcccaggctggtcgtgaactcctgggctcaagccatccacccacctcgccctcccaaagcgctgggattataggcatgagccactgcacctggccatggatgagttcttgttccccttcctgtcagcctccacatgaaactccccaaaccctgtcctcttgggccttttttaaaaaaawtaattaagaaattaaagacagggtctctctatgttkcccaggctgctcttgaactcctagtctcaagtgatccacccacctcgtcctcccatagtgctgggattacaagattagagatgccagctgtcaggtggctaggtggattcagtgtaaagtcctagaagatgcattttagtaaaaacagctagccacctgacagctggcatccatccattcagtgaagattgttgggcactgtggatactgtggaggaggcagcagtcgcagccggcctgcagagtgagatgcagtgccagagggcttcaggaggaggtggcattgtgattgatgtctgaagagtgtctccatgataatggagtcagtgcaaagtcccaaagactgggaaggagcaagaggaaaggatagctcatatccagctgccccactccaaaaaaaaaaaaaaaaagaggaaaggacgggcaccagcaaggtaggacaaggggggcctctggagtgttttcttctcagttggggaggggtgtgctcagatttgcatgccaagtgcctgggctgcagtagggaaacagcagaggggctgggacctgtgattgggagtctccaggtgagagggttggcctatggggactggaggtcaggtgaggctggtagtgggttatagaggtgggagcagctggacaggcccagtgaggatgcaggggtagctgcccagggctagactctggctgctctggtggcagttgcttagctcaggcttgggcacgtccacctggcgcatctgaaacattagccagcagggcgcagactcgtcagtgagagcattcctgagcccagcatccaagaagcgagggaggtcgggaaggtgctgctatgaggcagggggaggtccccaaaagtccaggtgagagcatggcatgcgtggaaagtgctgcgcagttttggcatcagtgaagtcacagggggctgtgggtgaacaggtgtgcttgggcatgtcaccagggaggccttgagacaggagcgggttggctttcctggagatcaggctgtggcatggtgtcgggactggggcatggacagtcttcctccacccccatcccctccttggagctttcagacactgcagataattaccaggtgatgtgataaatactacctgtggagggtgccttgggcagggaggacagggcggccaggaggggggccctttgggcccctgctctgagctgctcatcaggaaaggggagaagctcctacaggcctggtgttggagcctagccagaccctgtgaggccttgaaagtaggaggtgcattgtctgtgcattgtcatctcaaggaatccacccagcaactgttctagttatccctgctctctaggtaggagactgaggctaggaagggaaaggctgctgtgatacccacactatcagtggctggggttgagtttaaacccagggactctagggcccatgcctctgccatcctgcctctgagttttggagctggacttgttccatcaagtgccaggccagccctgctgctgggtgctcccaggcattcacaagctgacaattctgaagggcccacgcacttggccatgcttcagtctgtgtcctgacatcacaggtgggtgctggaataacaaatgctacaaatggcactgggggtgttggccaggctctgggggcacaggagttctgcccatgcccacagctggcctgtgctgacctccctccatcacagctgagtagcaccagcacttccattgagctgaagtcttcctcccattccttcagtgtggtctttgtggctcagagaggctgtggccaggtacaggatctggagtggcccctgcttctctgctctgtgaccttagacagtgggcaggatctgaggccaggcccacctgcagcaggtgttacaaagaggcaaattggcgcttaatgttggtaagaacttgccagccaaccagagtcccactatctttggaggtagtgagctccccattggggaaggtatgtaagccaacctttctgggatgctggaagatcagagagcaaacacttgagattctgtgatcctaatattgactccaatgctatgatgtttggatttgaagtcagttctatttagccagtttaccaagtgtctccttggtgcaggacaccaggagacacaaaatgtcctggataatattgggtttctggctcccaggggtccctgagatgttgttccagcggttctggagtatgggccaggcaccgcttgcatctggaccgatccgcattgttcgatcattgtgagcctcatgatggcagttcgggatgtcatgcccccatgcgccccccaaccccaccccgccatggccctcaccatggcccactcagggcatgaggctttctgggtgattgctggtattcagtgttgtcagcttcttggacctgtcagtgggggtggggctgcaatgagatgccagttgcaggaagtggtttgcacagccttcctggtgtcatgggtcactctcttgccgagtggctttgggcaggtcccttcccctctcaggctgcaggttcctatgccaggagctcccttcttgccccaccagggccttgttttcccagatacagaggtggggcagatcccagcccgttgaaacagactgggctttggaggccacagtgggcccatttctcagagggactgtgtggctggatgctgagccaggcactggactggccctttgagcctcctgtctggccaaggcccctgaggcactgtgggctgctggtgccagcacacaagggtgataaggagatgaaagtcactaggatggtggggcggcacccgccccgggctgtgttggcagctgcccctggctggaggccagcttggccctggaaccctcctcaaggaacaaggacacaaaagagccagctcagccagcctctacctagcaccccaatcagcactcccttcttcccatgacccctaccctctgcccagctcctgtaactggccaaggagctaatggacacccaccagggtcttaatgagtgagccagggttaatgggttactgggcccggtgacacattcaccagcctcccagggctctcaaagtccacactggcctggccttgaacgtcttagctcggccacctccttttccagctttgacacctcggggctcaggacgggcctagggtggtcaagaggtcccctgcagccctcacttcctggaaaaggctccatttcctggccttcaggctcaggtggttccttccgcctggcaggtcctccccaaatccaatcccagctcgggctggattcccaaggcccctattctggtgtctgccccttccctagggctcttccccctggggtgaccatactctcatgcccagccaggtcagggctccttgagagaagaatctggaggggccaggatttgatgggagaatgaatgatggaatgaaagaaggaacgtaagcgtgagccttgctaagagtgacaatactggcaggctgcagaccatgtgtggacctcgatctgagggcttagaggcttcggcctgccagcgctgtgggggcacccaccccatctcattgaatggggcagagcaggtgagggcatgagatggacagatgggcctcatccccctgcttccgttgcctggggtcctcggtcagcctgtttgctcagacccctgaaattgggggtcaaggaaggaccctcctggattatgtgactcccttcagtccaggtgaccagggtccttggagtgacagctcctagagccccacctgtagtcctgcaagctggggagagggcctgttaggagaggcatcccctgccctggggttgtagaggtgaactaggctcctcagaccttgtggggcctcagatgcttacatctccagcccctcctggcgtgggcatctggctgcagcccagctctgtggccccatctcccagggaacctttggtctaatctgcctcccgctgaaacccagcctcattcagccccaccgaggctttcagagttcaggtctctcattcagggtttgagaccccaccgggctcagagacacctgcagcctgcagcggtcccagatcacagcctcagggatgggaccaggagccagcccacatcccacctgcagcagttcctgtgcctttaaagcctcccctccccccgccccgcccccaggccactaggggagggaaggaggagctgggtcacagcagggaatcttagcttggttttggtgtgctgctggatgaccagaccgggcgtcgggtgagcccagaagtgagagcagttggctgtgccccagtgctgtgtgacccagaggcgccgctcaccctctctgagctggtggacatcataggtggggaagctcaggtcagggcactcccatgagtgtctggaggcctgagtcccattctcagctctgccatatgcttgctgcgctctagaggagttcctcttcctctccaagcctcggtttatgtacccgtgcagtgggagtgagttgcacttcggggtgaagggggcaagacttgtgtgggcgcatcctgcagaaggatcccacaggtgggcagagccctgggttctttatccgactgggtctgggctgggggcctctgtttcttggctgatgagtttatgtgagtttgagtgaggtatgcgagtgggtgaaggagggctggggggagtcacctgacttgtgcgaagaagctcttgagagagccgtggcttcttggaattaagaggaaagagtgcagcatgaacagacaggccctggaggatctggcagccctgagtgggggcggggggtcagctctggagtagagccagagctgtgatggggttgggggaccctgtgtccttgggccatgcttgcctcgctcctgggttctgtttgtggctgtggattggggtggggcagggccggttgtgcgaggggtcattgcccaactccagggggcgcctgccacctctcagctatatatatagggatatatatagttctttcgacaggtttccagcaggtagtggttattaaatcttactgaaggggtgttttttctgattctcggctctgtgccgcaagggtggaaactgtgagagacagattccaactccacgtctgggtagtaagcatccagtccagggctgtaggcagtcctggggaagacgccagagatctgtgcattctcatatcgagggatagcgactccaggctgggggctggcagggtaaggggtgggtgggtcctgggcttacccgcaggtctgcagacttcctggggccagctgacctcgtaaaatcccttttgtctaagcttcagtttcctgcctgtgaatggggttggggctgtgctctggtttcacccttgtggctctggggttgtggtgacaaagccatcaagctgggttgaaggattaaccaggaaacttcagactggctgccgtgtctacctcttcctcatactcctctctctgctgcatcctgggaagctgctctgctcagcctaaatgaggctcagttgtgtgtgtgcgcacgtgcttgcacgtgtgttggaagtgggtgatactgacaccagagtctgtgtctctgggtgagtgaggcttgcacatttctcgggacagggaactcactaccttatgtgcccaggacaagagctgtggggtctggagaagacttctaggccagcccctgcagtccttcctcaggtgacatggcttccccagacccacttccccctaggtgccctctctgcattcagggggtagagggctgactgggacagaatgtgacacactcagcatgtgaggaaaagcctccttcattctgtaggccctacctctattaacatgtcctttgataaagtgcctcccctcctgtctcccctctctggaatcctcagctgctgccaggcttcagctgtgccccattgaaggcagctctgtctccctactttccccagcccagggttttccttttggggtcagctgcagggatctgggccatcctttgcccactcagactttctttctgcccacctgctgctgtgaatcctgtatgtcatatatatatataaaatatgtaatatattatatattatatgtaatatataatatataaagtatattatataatatgtattatattatatattatataatatgtaatatattatataatatataatatgtattatattatatattatataatatgtaatatattatataatatataatatgtattatattatatattatataatatgtattatattatatattatataatatgtattatatattatataatatgtattatatattatataatatgtattatatattatataatatgtattatatattatataatatgtattatatattatataatatgtattatatattatataatattataatatgtattatatat

SEQ ID NO: 97573 - DNA, 13138 bp, Homo sapiens
atttgatatgtaaacataggcctcattttaatttagtcatattgtcaagtagcaggacgatatgtgtagtagatagtgatacctgtgcttttaattccgttctttttgtacgtctgagttggatattttgctttgtatagaggggaagagagaggaatagattttattgttaagcctgtgctgaatctgaggtgcctccccacttgcccactgtctttctagtgcagactcagaggagcagtggacctgtttcttcagcacagagctctcttaagacttaataggaaaatttgcagaggtataaatctagtggaaccattaattctcagctggattttttcctattgtgttttatttttatttttcagatactaaaagtatctgacaaataaactgaaaggtaagattggcttttggtaaaaacagaaaggagaaaaaaaaaaccttagttctaaatatatcacttcagggttataaaataagacagcctttttttctggaagaacagagacatggcagtctgatggattttaaaagtctcggtgactttattttatacccatataaactagaagctatgagtcttttcaaagtgtttctaaaaccaaagacttttctttacatatgtggatctcataaacctatggtcagataacctattttcaaaagtccagattttttaaaatttatttttaatttttaattttaaaaattatgggtacatagtaggtgtttatatttatggggtacatgagatgttttgatacaggcatgcaatgtgaaataagcacagcatggagaatggggtatgcatcccctcaatcatttatccttgagttacaaacaatccaattacaccctttattttaaaatgtacaattgttactgactatattcaccctattgtgctatcaaatagtaggtcttattcattcttcctattttttcagattagtttttgaaagaaaatatatgcgtgtgtttcctcatgcactgcagatatttcccacaatttctttttcacccttgcaagtttttgatgtttgtaaacatcagaagttttaaattttcatgtggtcaaatgtatgtatctttcatttggttttgtttacttcttttaaatttcttttgtaaaacagtcattcctcacacaaaatcagttaaagaattaccagtattttttatttgtttttctttttaaacaggtaacaaaactctgtatattctattttggcacatgacaggaagtaaatatcacttcttttttttttttacccaaatagtttttcaacactattttgtatgtaatttattccttctacattggtttatgagattatatatgtatgtgtgtgtgtatgtgtaaatatatatgtaatatgtatatatatatatatggagagtgagaaagaattaaaatatcagagtttgtttgctgtgtcaagtcttgtgttagttttcattattgtggctctcattgtcctttttaagaaaaattcctggctcctgtcaattgtttaatctttcaaacgaacttgggaatcattttcacaagtcgttccccttattttcctctttcttctgcagaccttttcactgtgaattccaggaaaataatttgggtagagcggcattttatactattcaatcttcacatagaaggaatatctcctttttaaattccaattttcttttgtggtttcttataaagtcttgtgacttgtttcacataggcccctttatgtatttgttattgtaaaggatgtttttcattattcgctatttactgttggtaattgctgggatttaagctgttgatttctcaaaattgtaagttaattcccttcaccaagcttttatttgttctaatagttcatgagttcattcacttgagcattcaggatataccattgtgttgtggccaaaaacagtatgttggtttcttccttctagtggtcacattccattactgcctgtctaatgttcttacgttggctaaaatcctataaattttagaaatgattggctgtaaagtgcctatttgctgttaggagtgattttgtaactcatccagagaccacaaattactgtgaagaaaggcttctgggaaagcatcaagtttaggtggtaatgccatcttttcatatttttggtagaacaattagacttttagggaaaatctattaaaatagtagatttgaaaacttaaagcagattttaaaatagataattgtatatttttgtcctttttctgtttctggatggaaacttggtgatattgagaaagagaaacatagaatgaaaaaataatgagttcactgattcaaaagtaaaacccaacttttatggatgttgttttaatagacctatagattatatagaataaaatagtttggatttttttcactagattcaggtagagttatctttttaaaaaattattcatgtgaatttcctactaactaacttgctctcacgatgtgctgtttttcatttcctgaattgtgtattgtgcttttgtttttactaaagctgaaaacatctatctgtttgctctctgggtgtgttttcgtctccctttctgtactgtttcttggatgcaggtgtgtcgtctttcttttctcctcagcagtcttttgcaaagcctttcaaatgccccacagtcctgagcagagttcatatggaacgtggccttgtccaggttgccttgaccgcagtgactttcctcatgctctttcctctgctctaaaatgctctcccttttccccacccacccaacccacctgcacagaagtttacctctttgatagaactctctgattatctcaggtatgagttcttggatttgcagggcacttcatggcattctctatggcatttagtagtctgtagctttcattctgtgtatgtgagacgtgtttacagtttggcacagttttcatggctatatcacattctccgtgaatctgcagtgcttagcatcacccttgtttgttgaacgagtgagtgcagggctgctgtactttggtgctcagtgccttggaacatgcagttttcttgcgattttcctgtacagtccccagatttactagccttccctcaatatactgttattttcaagaatatattaacgactgtcaagatatgtacaggtatatgctttttgtttttatgggtgtcatatgtggctattggtgaaaacgagttgaaactaaagtttatatttttatatggctttttcatttcaaacattaaaaaacattaaaaatacaccaaaaggatcagaaaaaatgcaagatgataaaaatacaactgtggccaaagccaggactttgtgtccagtggcatggctatactactctgtcagtattttatgtcctctaatgaaaaatattgtaccctagtgccaatgtgtaatgttttagacactgtcatgtaactgggaaagtgttatctcagtaacaaacaattttacctagtaaatattcctaattggctcaaagataactatatttaaaatcatgtttaataatatcagtgataatgtcaaaaatgaaatcagggcaagttagcaaattttttgtttatcgtgcataccaaaaattaattcacaaaccaggagacttctttttttttttttgagacggagtctcaccttgtcagccaggttggagtgcagtggtagaaacacagctcactgcagccttgacctcctgggctcaagtgatcctctttcctcagctggcagtagctgggaccacaggtgcatgctaccttgcctggctactttttatatatttatattttttgtagagatggtgtctcgctatgttgcccaagctggtctcaaactcctgagctcaagcaatccacccaccttgacctgccacagtggtgggattacaggcatgagccatagcacctggccaaaccaggagtcttcaaacagatagtggtaagaagcttggctcacagcaacttataaagcataaatgaagaagtacattaatctctgttgctgttattataatcttacattcctttcagggcaagcagagctgtaaaagcttatttgcttgtagatggttggttcacttttatcatgctgacaaggacagagagcttaagtttcgtttatggccagagccagcattttagagaagtcaggatagctgaagtttctcttatgtggctatgggtggttggcctaaggatatgcccacactgtggcctccgtttgatttttctttaacaataacgatattaatagcaaccaaatactgactgagttcttattaggtgcctttcacatctacttatcacagtgacccagaattgatgttgagtctgctttgctatgcatttgctatgcaatgatgaggccatactttgtgataaggtagcaactagtcacctgtgagatgtttttccacatggctttgcctctgtccaataccccacatgtccaggaagcaggctttgttacatgacttggagcatcagcatgtgttcagaaggatgcgtgcgtataccctagaaatagctcaagtttattgattatttattaggtcaagtagaaaattctaactaaagtctactcttggtgaaaggttaatcctactgtgttttcattcctaaggtctcagaatacttttgtaagaataatcaccttttttctctgatcttcatgtaaatacacgagcccgtaaagtttgaagtgattttccttaaaaatcaatcagaattttctggttttttaaaaaatcatttttagcctacgttttcctaatattaggaatgttagagcatcaacagtgccataggtgatacagaataaatgcaaagatggaagtaggtctcaggaaatggctatattaaggtttccgcttctttcagtaggaactctgggagctcccttttgtttccagtcaaggctaagccatcttctgcccttctgcctgggtgctgctatggttgtaaatgaattggctgttgcggggaggaggaaccatctgcctgggggcttgacagggaatagaagacacaaaatggatgaggaggccgggcgcggtggctcacgcctgtaatcccagcactttgggaggccgaggcgggcggatcacaaggtcagaagtttgagaccagcctgaccaacatgatgaaaccccgtctctgctaaaaatacaaaaaaattagccaggcatggtgacgtgcgcctgtaatcccagctactcaggaggctgaggcaggagaatcgcttgaaccagggaggcggaggttgcagtgagccgagatcgtgctgctgcattccagcctgggcgacagagtttcatatgcacacgttgtttcactttcatttgcctgctctgtggccatggggagatatatatatatatatatatatatatatatatatatattttttttttttttttttttttttttccctgtgagagcagttgttttgagaaaactgtgagaaacttttcctgggagacagtgggtggggtttgacagctcccccctccctcatcagtgtcccagctgctcttgacctgcctacactgcaaaacatcaacaggcccctaatcgtctatgtatttgcgatactgttgtatggttctgattttccactcttatttctgtttccctacttgggactctttgtttttattttttatcatgactttatttatttattattttattttatctattttttttgagacagagtctcgctctgttgcccaggctggagtgcagtggcgtgatcttggctcactacaacctccatctctcaggttcaagcgattctcctgcctcagcctccggagtagctaggaataaaggttcccaccatcacacccggctaatttttgtatttttagtagagatggggttccaccatattggccaggctggtcttgaactcctgacctcaggcgatccacccatcttggcctcccaaagtgctaggattacaggtgggagccactgcatctggctaatttttatcataactttatattctgctgcaagctgcttttaattattcaagttaagaggaaggtaaaaaaaataatttccagttcttacctgagctgaaaaaaatgagataggtaatataagccagttcaaattacaktggaagtaagaaaactcagtttctttgtaaggatctgagtagcccaagtagaatcacatgatcatattggaaagcatcttaaagatcataaagattatttggtcatcttgtagaagagggaactgagacctagaaagcaagttaaagtttataatgctagctatttatgagttctccacaacttgacagtgtgactttcatgcaatcagcactttcaaatattaaaagatagatatcctcaaactaccttttctaggcctaattgggacttccatgcatcagctgatgaacaaacattctaatacttcattacagtcaagcacaataatcaacagttgcactttgctaagcagtgtttatttgcacaactatttgaagactgtggtgcatttatttatattagtttctaaaaatgaacagaaatggtaaaatgttctaagtgctgatactaacagccagacaactgagacaatgatggacacagttaagtgactcatggtcaactagaccagttatagaatataaggtgatctgcctgtaatcccagcactttgggaggctgaggtgggtggatcacctgaggtcgggagttcgagaccagcctgaccaacatggaaaaaccctgtctctactaaaaatacaaaattagccaggcttgatggtgcatgcctgtaatcccagctattcgggaggctgaggcgggagaattgcttgaacctgggaggcggaggttgcagtgagccgagatcacgccattgccctccagcctgggcaacaagagcgagactctgtctaagaaaaaaaaaaaaaagaaaaagaatataagctgatctactcagtgcacaaaggggtgaaaattaaacatatcccaaattccaagactacattgtccaagtgataggagggagtgagagagaattgagaaaagatcagtaaaatatgaaatgaaaattattatcagaatatcctgggaactcaaatactgggaaagagttcatgggtccattcgctaggtatacagcttactacaggcccgtcatcgacagaaggcagctagtgccttacaagaaaacagacaaaacctcattaaaatctacatcactcatttctgccctaatctgtatgaaatgaccattgatatctccttacagttaataatggtagtaataatttattttaccgattagagatggtactactgctgacaaaactgttgtttattactgtagacaaaactgtacatttcatttatttatctatttatttatttagagatggaatttcgctctcgttgcccaggctggagtgcagtggcgcgatcttggctcactgcaaccttcaccgccctggttccagtgattctcctgtctcagccttcctagtagctgggattacaggtgcacgccaccacgcccagctaatttttgtatttttagtagagatagtgtttcatcatattggtcaggctggtctggaactcctgacctcaggtgatccacccgcctcggcctctgaaagtgctgggattacaggcgtgaaccaccgcgcctggcctacatttcagttattcttgatgtgttttaaaagtgtgcattccataacagttggatataaaaatatacattttataactagaaattgtacacatttttagttctttggaacatgtaaacccagtgttgaacttctgtacattaagtttttatcacctttaacaggaatgtgtcgtgactgaaagtggaggatgagctggtatgacatgggttctgtctagggattctcctgtgggagggagaggacctttgtcttggtagctgtctactgtactaatattcatgcctctctgcccaagtctgtagtgtcagttttaccacttgagaatttcagaaatgaagtttacctccccagtccctttaaaagataaaaacaaattagctcaaattctaaccacagccataagtggtccttgtgcatggcaatggctaagaatgggcactgcctgcttctgaggtgtcctctgtctttgctgtgagcggcgtgacagctgtgccttccgtgcttctcttcggaggcttgtttctgggtatgtgttcaccgcaatggatgcttagattttggttcaccgaacgacacagaagtcactgcattcgatgtggtgacctcagagcaagtggcctccaggtccagtttatctaagtcagaagctgtgattcaggaaagccactgcagctgtttcctgtagagaggttggccgaggcaaggacctcatcacctgtgggcgtatctgcttgctaataccattgctgcagaggaataggttcctggagacggaggcacacaggcccagagaggaagtgacagggatttgtaacagatcacactgacctgaaggaaggccctgacgtagatatgtccccttttcacattcagagtcgttgctgctgcttctctttatgtcttggataatccaccttggcctcttgagtatactgtacctccctaacctgctgggctgaaaggccaagtgcaggcaactgagtctatactgaccttgagtggtttagggaggaggcagtgtgttatggaagcatctccttgaagcctttgtgtgtatgaaaggacacattgcaccaactgataaaatctgctccactaaccagaggcagtgaagtgagagtgagcttgcttggcttggataactgacatttatccgtcagccaaattcagtggaaaaaagtatggcaattggagttagatctggatttctgatgcttgccagtcccgcttcttcactatgtaaccacagtgcctcgttttctctttctttcttttctcttttttttttttttgaaatagagtttttctctgttacccagactggagtgcagtggtgtggtttcaagctcactgcagcctccacctcctgggttcaaacaattctcctgcctcaacctcccgggtagctggtaatacaggtgcgtaacaccacacctgactaatttttttatatttttagtagagatggggttttaccatgttggccagggtggtctcgaactcctgacctcaggtgatctgcccacattggcctcccaaagtgctgggattacaggcatgagccaccacgcctggccaatgtgttgcctttctataatgtaatattgatctttaattatgatgatgactagatgagacaatgtatgtgaagtgcctggttggcgactaaagaaataatagtataataaaaaaaaaacgccattataattatttttattatgcgtctgttcttccaccagatgttttgctggaggtgttagtaagaaggtaatcagcttttagagatgttcctctttgatctgctacagaggtgaaaaatcttaaaggcaagctgctatttttgattttgaaaaatctcagaaagacccaggactgcagagattgtgaaactggtagttaagcagaatatgtttggcaggagtgtcacttcaccccgaggtacagtaaattaagagcagcatcttgattacagcaaaagttcagttctaggtctcctttacggggcactttacccacagcttctcaggcgcatgtgtaaaacgaagtccacgtgctgtctgttcagaatagaacggagatgagtggtaagagatttagagagcagagtaatttcaggttagtgtttgaatttggtgtttgagagtagcccacaattaaatgctgtaaagtggcacaggaaagtggcttgaactttaagaatgttccctttccaccattctcccattttatcctgagattttccatttgtattaattatctccacagctcctgttgggttatacagtagaatttgaatttctaataaatgtcaaaatcagaaaataggcctataatctttcacaggcagttatgaagagaatggactttttgtttctgaagcattttgtcctataaagcacagaccttatttttcaaatgccttgtcaccagaaaccacgagccattctcattaaaagactctggaggagtactggggatggtggcagggcatggcggtgtgggagagcaggcctggagcagcagtgctcactggccggggcgtcctgtccacctcaccctgactatcagggacgtgcagtcacctagaagtctcttccctcgcaggacccaactttctcatccgtaaagtcaagatattaaaccagctgatctttaatgttctttcctgagttccatttctttgggcatatcatatgaaaaaccactctgcatattataatcaaccattcttgaagaagacatgagtacgtttttattcactgaggcccatagtacttgggtgaataaaattcatcatcacctccagcggtgattttctgtgtatttgggtgtaattgcatcattggagtcattaaaattattttatatgaagggccagtttatacaataaataaagtagaattgctgtggtttcctcagggactgagccctatgtgcctgtttcactttcagcccctgagcatcccctgaggtatccatagagccccatgatttgaaaatttgacattcagggttagatccatgctccggagtgtagcattgtattcttgatccaatcctgtgcctacttttcccaccaacattttattatgaaaaatttcgagcatacaggaaaagttgaaaaaattttacagttaaccttcgtatagccgccacctcgattctacgatttacatattactgtacttgctttatattcacatattcatctgtctatccctctatcctccaacaattcttttttttttgataggtttcaaatacgcttcagaattcctcctaaatgtagataatgataactaattagctggagttcaacatttatttataattctttttttagagtaaaatttccatacagtgaacttcacggaccttagttataccattcattaggttttttttttttttttaattgagatggagcctcgttctgtcacccaggctggattgcagtgttacaatcttggcacactgaaacctccgccttccaggttcaagtgattctcctgcctcagcctcccgagtagctgggattacagtcacccaccaccacacctggctaatttttgtatttttagtagagatgaggttttgccatgttggcctggctggtcttgaactcctgacctcaggtgaccctcccaccttggccccccgaagtgtggggattacaggcgtgagccagtgtgcctggcccattcattaagttctgacaaaagtatgtatctttgcaatttaaactttctgtcaagatgctaatcatcccctttaccccaaaaagtcccctcatgcccctttctggtcagtcttcattcacaccatctagaagtcggtattgttctgatttttttccaaccaaaaaagttgttttatctgttattactttccataaagagagtcatatatattctttgtgtctggtttccttcacttatcaaatgtttttgagaccatttgagattcatccacgttgtgtgtatagtagtttgtgtgtgtgcgtgtgtgtgtgtaatccattttatgaatataccactgtttacccttctgttgatggatatctggactgcatccattttggggctgttatgaataaagttgcagtgaatatacaactctttttcttgtgagtattttttcttggttaaatacctaggattagaattgaatcatgcggtaggtgtacgtttagctttgtaaaacattgccggccatttttctgaagagcttgtaccattttacaacgtcaccaacaaatcagagttctgcgtgttccacatcttcaccgacatttggtgttttcagtctttttaaatttagtttttctactggaacaacaacaagaacaataataataatgatggtgataactaatagtggtattccactggcttttatttgcatttctctgctgactaatgatgtcaaccactttttcatgtgtttatcagcttttttgtatcttctctggtgaagtgtttgttcaaatcttttattgatttgtttttaactgagctgtttgtcttttgattgttgagttgtaggaattcttcatatatccagctgtcagtttgtgtcatattctttgccggtctttggcttccctgttcattttcccaaagatgtcttttgagaaatgtaagattttagttttcaaaaaaatccattctctcaatattttctttcacgattactgctttctgtattctaagaaacctttgtccactccaaggtatgaaagcattctcatatattttattgtacaagctgcacatttggtcactagtctttacatttaggtctttgctgtatcttgaatggatgtatgtgtgtgctgtgagataggagctctgcctgcttctggccactccttcaacacaatctctgctgctgttaccctggcttactggccatttcccaaatgtatatacactcatgtctgtgtacttgtatgttgtgttacttccttacttatttatttatttattttatttatttttttgagacagagtttcgcactgtcgcccaggctggagtgcagtggtgcaatctcggttcactgcaagctctgtctcctgggctcatgcgattctcctgcctcagcctcctgagtagctgggactacaagagcacaccaccagagccagcaatttttttgtatttttagtagagatggggtttcactatgttggccagactggtctcaaactcctgaccttgtggtctgcccacctcagcctcctgaagtgctgggattacaagcgtgagccactgcgcctggcccacttctttatttattgattgcttattatgtgctagcagctaggataggtatcaagtatatagtactaaataaaacataagtaatctgtgccaccgtggttcttgttgtgtagtaaggatagacattaaacaaataaacacaaatgctcttct

SEQ ID NO: 97574 - DNA, 13500 bp, Homo sapiens
gtctaaaaaaataaaaaaaaacaacaacctgaattttttttttttcttaagacagggtcttgctttgtcttctgagttcaatggtgcaatcatagctcactgcagcctcaacgtcctgggctcaagcgatccttctgcccaagcctcccaagtagctgggactacaggtgcacctcaatacacctggctaattttgtaaaaatatttttgtagagacagggtctcgctatattgctcaggctggtttcaaactcctgggttcaagtattcttcctgcctcaccctcccaaagtgctggaattacaagtgtgagccatctcgtctagcccagatattgaattcttgataaaaaaaaatatttccacaaagaaaactccaggtctacatggcttcattggacacttaaggaagaaacaacatcaattctggacaaatgtttctagtatatagaagaggagaggtcacttaccaactcatcttgaagctagcattaccagataccaaatgacacaaagatgttacaagaaaagaaactacacacatatccttcatggatctagacacaaaatcctctttatttttttcaaaaatccttttaaaatttagcaaaatgaatacagtagtaaatacaaacaataatgcaccatgaccaagttagtttcatcccaggaatacaaggttggcttaatattttaaaatcaatcaatataatttactatactaacaggctataagacaaaacccatatcaccatctcaatagatgcagaaaaagcatttgacaaaatttaatacctattcatgaaaggaaaataaacctctcagccaattaggaatagaagggaattcctgaaactgataaagggcatccataggccaggagcagtagctcatgcctataatcccagactttgggaggacaagatgggcggattgcttgagcctaggagttcaagaccagtgtgggcaacatagcaagacccttctctacaaaaaataaaataatttttaaagggcatacacaaaacacctacagctaatatacttaatgatgaaatcagaaagttttgccctaagattgggaaccaatgatgtccactcttattcaacattgtattgaagataccagttatttcaatatatttctttgttgttgttgtttgttttttttggggggggggtgggggacagggtcttgctctgtcacccaggctgtagtgcagtggcatggtcttggctcactgcagccttgacctcctcctgagctcaagagatcctcctacttcagcctctggagtagctgggactacaggtgcacaccaccacagctggataattttctgagtgccagtagtggcaacaactcaatcactaatattcagtgttgatggagcaagctgggttgtggtggcacgtgcctgtagtcccagctactcaggaggctgaggcaggagaatcacttgaaccagggaggcagaggctgcagtgagttgagattgcaccactgcattccagcctggacaacagagcgagactctgtctcaaaaaaaataaataaataaaaataaaaataaaaatttttacccttttgacagcatgtcaggcttctgggttctgttccccgagctcaaccctaagccaagcattttaaggtttgaggaaattaacttctcccagtttggaggaacattatagaagaagagataggagccattttaaatcatgaatgaaggaaggaaaaataccatagaaaagtctgggggtttgggtggtagaattggagaagctgacaatgtgaaagggagggaggaagggccagggcatctggaagtttcatttgaggggttcctgggagtttgtttctctagttttggggaatcattccctttgggcctgtctgatatgactgctgaaagagctgagtccattgtgcaatgcttgcaaaggtctagtaagaaggccatgctcttgtgcaaaagaaaatgagctgttttttcttccaaatctcagagtcaaaggagtcccagtgcttcagaacgcactccagaggaggggaaggggaagacagtgagggcgccacccctactgttttccctccttggttcctgggtcccagcatcttgttaaacatgcctcccatggttgcaggtgtgacccccagccatggaaccagaggaactaagtgattggggttagtcatgcttacccatgtgactctagtcctgcacttatgatttccttttgacttccaagacttgtgtgacctgtgtggctccctgaaaaatggatcttgggagagactatgtaacagttgcatttaggcaactgttgtatttccctccataatggaggaagtgtgctggtttgagctctatatcctgctattatgactcgtgctaaagtacccttagagaatggttccagttaacttccggacttaaattacccttactatttaagtactattttaattacaagcagaataggtgccttaaaaaaaacataggaaccaaatggctattttcctgctgatgggacagtattgagactaaaatttggttttggaggacattttcctccttattgttgaagacagagttttcccatttatggaagtagcataaagcctggtgtccagcagaggggtgcaaaaagggaggagaattgggaagccagagtgttttggcaaagggctgacaatgtgcctcatggagaggattcctatgccactgggtagggccgttgacctttaaatgccatgtgctctccagaccaagggcagagagagacctcactatggggagaggaggggaagacccactgttcctagaaaatcacaaaaatggcattgccttgagctctacctcagttactacggtatttcctgatcttgcctaacaggattacttccttgaactgtaaaaattcccactgcttcagaatgttctccccagcaagcctgtcccccaagtcttgtaaggctgccagccacactaatcatttttaaatagctgaagggggcccagtatttgatttgattttaaaatggaggccaagaaccttgaaatgaaaggacatggttgaggtccactcctgtcctcactgttctgatgatgataccttgatcccacctggggccccaaaatgaagcagtgtcgttcatctggggtaagacccaaggttcattgcctcatgccaaggaatgaagcagtgtcgttcatctggggtaatacccaaggttcactgcgtcatgccaaggaagtcaaggacacgaacacatgtgaagtgaggttaagagcagaggtttaataggcaaaagaaaaagagaatagctctctctcctgcagagagaggggcacctgagtgggtcttccagcctgcagcagcatgcacaaggacaggcatgaggaggcagtgtctgatttacatagggctcaaagattggttgaaacaggtgcgatgtttacatagtacaggaagaagctccccgccccaccctaatctattttgcaaatggatttttttttttttttttttttttttttttttgagatggaggttcactcctatttcccaggctggagtgcagtggtgtgatctcggctcactgcaacctccacctcccaagttcaacagattctcctgcctcagcctcctgagtagctgggattacagacgcctgccactacacccagctaatttttgtatttttagtagagacaccatttcaacgtgttggccaggctggtcttgaacttctgacctcaggtgatctgcccgcctcagcctcccaaagtgttgggattataggcgtgtgccaccgcacctggccacaaatggcttctctacctggctggcgccacgttgcctgctccttactgtacatgtggttgataaagaaaaaggggagatggagccaccatgttgaacatgcctagcctccagggggccttttcctattgccagagctgctggcattcacccctgcaagcttccagcttgctgatctatgtctgcagcttgattttacaggctgcacttcgttaggaaagaaatgattcgggggctgcttttcattaaaaggaaaaccttaccaaggacttccttaccctcactatctgcctaaataagttcttagatcacagggagtgtccagtgtgcccactggcctccagatacccaagcctgcagatcacacacatctccacctacttccagtgcatcattgcactcacaaggttcagaagttccaggacagccagccatggagcctgtggacagggagtgcatcgtgaaggttgccaaggcagtggaggcccaggttatggcagcccaggaaatgagctgggaggaaagcattcaggaactgatgagcatggagaaagaaagcactttgtaggaacagatgaggaagacgtgggggatgatgtacagaagttacaagtaagcggagctgatattaaacaggattttgctacacagagaaaaaggctagaatgtatatgaatgcttttttttttttttttccgagacagagtcttgttctgttgcccagagctggggtgcaatggcgcgatctcggctcactgcaacctccgcctcccgggttcaagcagttctcctgcctcagcctcctgactagctgggattacaggcgctgccaccatgctcggctaatttttttatttttagtagagacggggtttcaccatgttggccaggctggtctcgaactcctgacctcgtgatccacccgtctcggcctcccaaagtgctgggattacaggagtatatgaatgcttttatccacaccactaagaagagaattgaacatgttttgaaaacacaagaggaaaggcagaaacttcattacaaatattctaagcagtttctgactttgtttcaagattggaacacgaacagtgaaggctgaggaaccagaggaacaaaaactagctacaatgtttcgagagcaacaaaagagttgtctataagctagaatggttcagagacagagacactgaaacaaattaaactgaaatcagcaattcctacggagtttggaggacctagaagagaatcagagttcatcttactgatgaacaaagtgaccttagaaaagaaatggccaggttgcaaacaaaacttatgaaggaaactctgcagcaagacttggcacttattcatttgtctcttctacctgtgttactcttgtgactgaagaaagaacttgaaccaatgtataatggttaatattgagcatcaacatgataggattgaaggatgcaaattactgttcctggtgtgtctgtgagggtgttgccaaaggagattaacatttgagtcagtggactgggacaggcagatccaccctcaatctgggtgggcaccatctaatcacctgccagcccagctagaatagagcaggcaagagaagatggaagagcagacttgctgagtcttccagctttcatttttctcctgtgctggatgcttcctgcccttgaacatgaaactccaagttcttcagcttttggactcttggacttacaccattggtttgtcgggggctctcaggcctttggccacagactgaaggctgaactgttggcttccctacttttgaggttttgggactcaggctgatccaccactggcttccttgctcctcaacttgcggccggcctatcatgggacttgaccttgtgaacgtgtgagtcaattatccttaataaactcccccccctttgtttgtttgtttgtttgttgaaacagagtctcactctgttgcccaggctggagtgcagtggcacaatctcggctcaccgcaacctccaccccctgggttcaagtgatactgtctcagactcctgcatagctgggattacaggcacctgccaacacgcccagctaatctttgtatttttttagtaggatggggtttcaccatgttggtcaggctggtctcgaactgctgacctcagataatccacctgtctcggcctcccaaagtgctgggattacaggcataagccgccacacctggccaatcaactccctttcttatgtacatatatcctgttagttctgtccctctagagaactctaacatgctatgttatatgacataagcatgacattaactacactaaaccatatgacagtgtttttaaaattcttgtataaagcagtatctcattagtttgtgtgttaaatgcaagaccttgcttctttaatctgttgaatgaaccccaaacagttatatcagtaacagcaattgcacagttatatacacagtcaattaagttttagcactaacgataatttaattttaggtgtggcctctgtggatctgtatcagtcccaaaatttagaaagcacaggcatggaagggtacatttttctcacctaaggaaaaacagtaagataaaacaaaacgttaaaataaaaaatcggccaggcatggtggctcacgcctgtaatcccagcactttgggaggccgaggcaggcggatcacgaggtcaggagattgagaccatcctggctaacacagtgaaaccccatctctactaaaaatacaaaaaaattagccgggtgtggtggtgggtgcctgtagtcccagctactcgggaggctgaggcaggagaatggtgtgaacctgggaggcggagcttgcagtgagccgagatcatgccactacactccagcctgggcaacaaagtgagactctgtctcaaaaaaataataataaataaaaaataaataaaataaaataaaaaatcgatgccccctcctccttcagtctttcatacagcacagaacagcttccttagtttgaggatgattaaatatatgagatgctctccagatccagctctgcttctttagatttttttgttccttctcacttacttattatttttttttgagacggagtctcgctctgtcacccaggctggagtgcagtggcgcaatctcagctcactgcaaccttggcctcctgggttcaagcaattcttccacctcagcctcctgagtagctgggactacaggcacctgttacctcgcccggctaatttttgtatttttagtagagacggggtttcaccatattggccaggctggtcttgaactcctgacctcgtgatccacctgcctcggcctcccaaagtgctgggattmcaggcgtgacccactgcgcctggcctcacttatttattttttaattaacaaataaaaattgtatatatatttaaggtgtacaacatggtgtcttcaagaatctctttagatatgaaattgctgaattcaagagaccatcaactatgagatatagtatccggaagattctaacggatgggatgtgacatagcagaaaatgcatctctgatggggatagtcaagacacagtctcctggcaggtcccggggctcaccttctccactcaggactgttgctccaagtgttacagtttattttccaaagataaccactccattctctcacgtgctctttgcacaggtatctttgactctcctcccaggacacaagagtgatgttatggacttctgaggctgggacataaaaggccacatggcttctgcctagtttgcctgggatgtgctcccttggaagccacatgcagaggtcacgtgtgtgccggttgatgacagcagctgatattccagctggccctcagcagcaactgccacatgcttgagtgaatgtcttcaggcaaccctagcctccagctgctagatcacctctgagacactgaggaacagatgaggcttccctgctgagccctgctctaacagatttctgagctaattgattgttttattacatattattgaggcactatatacaactgacccacttaaagtgtataatttaatggtgtttagtgtattctgaattgtacaaccaccacagtcaatttcagagcatttttatcacctccccaaaagaaactctgtactcagtagcagtgaatctccatttcctcccaaactccctctcagtcctaggcaaccactcatctactttctgtgtctaatagatttgcttattccagatacttcatataaatggaatcatacaatatgaggccttttgtgactggcttctttcacttaacatgtttttaaggttcatccacattgtagatgtttcatacttaattcctttttttttttgaaaaatgttccattgtacatacagatattttgtttatccattcatctattaagattgacatttgggcagtttccactttctggctattatgaataatgctgctataacattcacgtaatttttaataaggacatatatttctttttttcttttttttgagacagagtctcactctgtcacccaggctggagtgctgcggcaagatttcggctcacagcaacctccgcctcccaggttcaagcgcttctcctgcctcagcctcccaagtagttgggattacaggtgtgtgccaccacgcctggctaatttttgtatttttagtagagatggagtttcaccatgttggccaggctggtcttgaactcctgacctcaggtgatctgcccatctcggcctcccaaagtgctaggattacagacgtgagacactgcgcccagcctcatttcttctaggtatacctagggagtgaaatttctgggtcatataaatgcttaatcttttgaaaaactgccagaatgttttccaaaatggttgcaccgttttacagtctcaatggcggtgtcctaagtctcccatttctccaaaccctcaacacttgttattttctgtattttattgactctgatgatcctagtgcttagcagatttgaaggggttttgatttgcttttccctgataagtactgattttgagcagctttccatgtggttactgaccacctgtatgccctctggaaaaaggtctattccaataatttgcccattgtttaattgggatttctttcttttcttttttttttttcttttttgaggtagggtcttgctctgttgcccaggctggagtgcaatggtctgattttggctcactgcagcctccacctcctgggcccaagagatcctcccacctctgcctctcgattagctgggaccacaggtgcccgccaccatacccgactaattattttggtattttttgtagagacagggttttgccgtgttgcccaagctggtcttgaactcctgggcttaagtgatccgtccgcctggcctcccaaagtgctgggattacaggcgtgagccagtgcacccaggtgggttttctcttttattaagttgtaagagtcctatagctagaatagatacaagattcttaacagatatgtgatttgcaaaatactatcccattcttgggttgtcttttcactttcttgatagtgttccctgaagcacgaacactttcatctttgatggtgttgactttactttttcttttgccacgtgtgcttttggtgtcaacatctaagaaaccactgcctaatccaaagtcacacttgactcaagtattttcttctaagagttttatagtttaccttatacatttagatggtgattcgagttaattttttgtttatggtatggggaaggggtccaacttcactctttcacagcaggacatctggatgttggtgaagatgattcttttccctattgaactgtccctattgagttgtcactcaactctaaaatcagtaagagtttatttctggactctcagttctgttcagttgctctattcttatgccagaaccattgtctttattactgtagctttgtagtaagttttgaaatcagaaagtataagtcctccaactatgtgtttttcaagactgttttggttctcctgggtcccttgaatttccatatgagctttaggattagtttgtcaatttcagtattaagaaaaagtcagctgggaataataggaattatatcaaatcttttgatcaataagatttttttttttttttttgagatggggtctgactgtgtcacccaggctagagtgtaatggcatgatctcggcccactgcaacctctgtttccggggcccaggcgatcctcccacctcagcctccagagtagctgggaccacaggtatgtgccaccacacacagattaattttttgtatttttggtagagacagggtttcaccatgttgcccaggctggtctcaaactcctgagctcaagtgatctgcctgctttgggctctcaacgtgctgggattatagccatgagccactgtgccagccttggattttatcttttcaagcaacttattagtgtggtttgttgtgcaaagataactgatacaccattccacatgggtgagcatctgttttgttacgggtaaacagaaaagacggtgacaacatagggagatctccactccacaaaaaaaataaaaataaaaacttctcgggaggctgaggtgggaggatcccttgagccccggaggtcaaaattgctgtgagcagtgatcatgccactgtactccggtctaggtgacagagcaagagcctgtctcaagaacaaataataaatataaatgaaaaagtaaatttccaggttgggcctctttcattgcttcaagaagctgctccaagtgctgcctgctgccctgcccatggctggagggattttggtgcactgggaatgcagcaggttcagcaaccactgaaccaaggattcttattctcagccttggtgcctcctgtttggagtaggggtttccaagggaaatgaggaccttggctgcctatgtctgtccccatgccgaacaggaggcccagagccaagactgagaacctaatgggtgaaaagacaagaggctttagttaagacaagaggaggctaagattgagagcttcaagatgttccacagatcctgggaagtgttcttcttcttggtagtgactctaatggtagtttctttgtcccagttgtttcattcctaagaatgtattgaggcaactctgaattagagaaaatgtactgcaggtgtatgactctcttttctatcgtgtgtagaagagtgagagacacctcaatgttgagaggtcaggtgggtattcagaccaggggcccgaggagaccctgggagggcagtgtgcttctgtgaccctcctactacctctgccctctgaagactccagcccatggttctgccctttctcagtccccaggtaggatgggaaacaaagtgttaacagcagagaaagcaagtttttggggttcactcaagacctaggctacagccaggtcaagtgcctgctttattcaacaggaagcgctcaagtgggactcaccccccacctttcacagtgtaaagtgaatagggagcaaggcaggaagctagaaaaataatgcatggatctagacaattcagaaaaacccttctaagtcagcttaaggccaagactggtcagtgtgagagaacaaaagaggtgacagaaaagccttgggcagcctgagccatgatgggcctagcggaagtagttgggacattcgtgagcaaccaaatgccaggcttgattaaaggcatccacgacagccggctccaggggcccttcctctgttgctgccaagttctgctccagctgctccaggctggacatgcccaggatgaccgcgtccccgtgggcaccctgcaagggagacggccagacttcaaccctcttctgctgcacagcgactccactcacagccgtcccagccacctccctgctgagatctggggtctctgtttatatttatatcttgtatgtccagaaaggacttaaggtgccttggatagctgtacccacgtgacttgaaacccgcatcctttcccctactgccgcacgacgcttccacacagaactacattcacagcccagttctgcccccagcagctgtgtaaaaatggctaagttggctgggcacagaggctcatgcctgcaatcccagcactttgggaggtcaaggtgggaagaacacttgagccaaagtgttcaagaccagcctgggcaacagagagagactctgtctctacaaaaaacaacaaaacaaaattagccaggggtgatggtgcatgccttgtcccagctactagggaggctgaggcagaaggatcacttgagcccaggaggttgaggttgcagtgagctatgagtgtgctgctgttctaccgcctgggtaacagagtgagactctgtctcaaaaaaattaaaaagcaggctacgttattaagcttgttttgacattcgatctttttttttttcaaacaaaaatatttttccttgtgttttgtacacaaaagggggtgggaggtagtgcggtgtggtggtggcagcggaaaaatatggaacacttcacaaatttgcgtgtcatccttgcgcaggggccatactaatcttctctgtatcattccaattttagtatatgtgctgtcgatgcaggcatgacattcaatctttttctctgttttcagcattggaatgagaaaacttatgtaaaacacagctcccacgtactgaacatctaccggatatatgccagacactatgcaacatggaaggctgaagctggagataagtttgttgctgttattttcattgttgtttgcttgttttttttagacagggtcttgctttgtcacccaggctaaggtgcagtggtgtaatctcagctcactgcagccttgacctcccaggctcaagccatcttcccatcccagcctccagagtagctgggaacgtaggagcaagccatcacaacctggctaatgtttttgatttgttgtagagatagggtcccattttcttgcccaggctagactcaaatgcttgagatcaagcaatcctcccatctcggcctcccaaagtgctggattacaggtgtgggtcactgccactgatcaggaaataagttttaaccaggaagacatgaggcatcaagagagagaaaccaaaagggtgagatgggtgggtcttagttaaacctgtgttaaaatgtctgccactttaatagctgggtgaacctcggtttcctcatcaataacactgggataatcatacttcagaaagcctaaggaataagaaaatccctgtaatgaaaatccctcactacaaagcctccactcagataccatcaaagaccagtgggaagagtgcttatgagaattggaagaaagaaaaatttcagaggaattcagaaatcaaatgctttgggcttcacctaaaggtgacgctggtccccctggaagggaagaagctgagcacccagggtcgctggttacctgcagctgtgagtggtggtacatccaccggagggcagccgaggtcacactgggggcgctggcgccatatgcggcctgcagggccttctccaccaacgcaatggcctcgaagtggtgctccttccagaagctgtgcagaggggatgttagcacaggggtcagtaccatgggggtcacactggg

SEQ ID NO: 97575 - DNA, 46942 bp, Homo sapiens
  misc_feature (1)...(46942): n = A,T,C or G
nnnnnnnnnnnnnnnnnnnnnnnnnnnnnnnnnnnnnnnnnnnnnnnnnnnnnnnnnnnnnnnnnnnnnnnnnnnnnnnnnnnnnnnnnnnnnnnnnnnnnnnnnnnnnnnnnnnnnnnnnnnnnnnnnnnnnnnnnnnnnnnnnnnnnnnnnnnnnnnnnnnnnnnnnnnnnnnnnnnnnnnnnnnnnnnnnnnnnnnnnnnnnnnnnnnnnnnnnnnnnnnnnnnnnnnnnnnnnnnnnnnnnnnnnnnnnnnnnnnnnnnnnnnnnnnnnnnnnnnnnnnnnnnnnnnnnnnnnnnnnnnnnnnnnnnnnnnnnnnnnnnnnnnnnnnnnnnnnnnnnnnnnnnnnnnnnnnnnnnnnnnnnnnnnnnnnnnnnnnnnnnnnnnnnnnnnnnnnnnnnnnnnnnnnnnnnnnnnnnnnnnnnnnnnnnnnnnnnnnnnnnnnnnnnnnnnnnnnnnnnnnnnnnnnnnnnnnnnnnnnnnnnnnnnnnnnnnnnnnnnnnnnnnnnnnnnnnnnnnnnnnnnnnnnnnnnnnnnnnnnnnnnnnnnnnnnnnnnnnnnnnnnnnnnnnnnnnnnnnnnnnnnnnnnnnnnnnnnnnnnnnnnnnnnnnnnnnnnnnnnnnnnnnnnnnnnnnnnnnnnnnnnnnnnnnnnnnnnnnnnnnnnnnnnnnnnnnnnnnnnnnnnnnnnnnnnnnnnnnnnnnnnnnnnnnnnnnnnnnnnnnnnnnnnnnnnnnnnnnnnnnnnnnnnnnnnnnnnnnnnnnnnnnnnnnnnnnnnnnnnnnnnnnnnnnnnnnnnnnnnnnnnnnnnnnnnnnnnnnnnnnnnnnnnnnnnnnnnnnnnnnnnnnnnnnnnnnnnnnnnnnnnnnnnnnnnnnnnnnnnnnnnnnnnnnnnnnnnnnnnnnnnnnnnnnnnnnnnnnnnnnnnnnnnnnnnnnnnnnnnnnnnnnnnnnnnnnnnnnnnnnnnnnnnnnnnnnnnnnnnnnnnnnnnnnnnnnnnnnnnnnnnnnnnnnnnnnnnnnnnnnnnnnnnnnnnnnnnnnnnnnnnnnnnnnnnnnnnnnnnnnnnnnnnnnnnnnnnnnnnnnnnnnnnnnnnnnnnnnnnnnnnnnnnnnnnnnnnnnnnnnnnnnnnnnnnnnnnnnnnnnnnnnnnnnnnnnnnnnnnnnnnnnnnnnnnnnnnnnnnnnnnnnnnnnnnnnnnnnnnnnnnnnnnnnnnnnnnnnnnnnnnnnnnnnnnnnnnnnnnnnnnnnnnnnnnnnnnnnnnnnnnnnnnnnnnnnnnnnnnnnnnnnnnnnnnnnnnnnnnnnnnnnnnnnnnnnnnnnnnnnnnnnnnnnnnnnnnnnnnnnnnnnnnnnnnnnnnnnnnnnnnnnnnnnnnnnnnnnnnnnnnnnnnnnnnnnnnnnnnnnnnnnnnnnnnnnnnnnnnnnnnnnnnnnnnnnnnnnnnnnnnnnnnnnnnnnnnnnnnnnnnnnnnnnnnnnnnnnnnnnnnnnnnnnnnnnnnnnnnnnnnnnnnnnnnnnnnnnnnnnnnnnnnnnnnnnnnnnnnnnnnnnnnnnnnnnnnnnnnnnnnnnnnnnnnnnnnnnnnnnnnnnnnnnnnnnnnnnnnnnnnnnnnnnnnnnnnnnnnnnnnnnnnnnnnnnnnnnnnnnnnnnnnnnnnnnnnnnnnnnnnnnnnnnnnnnnnnnnnnnnnnnnnnnnnnnnnnnnnnnnnnnnnnnnnnnnnnnnnnnnnnnnnnnnnnnnnnnnnnnnnnnnnnnnnnnnnnnnnnnnnnnnnnnnnnnnnnnnnnnnnnnnnnnnnnnnnnnnnnnnnnnnnnnnnnnnnnnnnnnnnnnnnnnnnnnnnnnnnnnnnnnnnnnnnnnnnnnnnnnnnnnnnnnnnnnnnnnnnnnnnnnnnnnnnnnnnnnnnnnnnnnnnnnnnnnnnnnnnnnnnnnnnnnnnnnnnnnnnnnnnnnnnnnnnnnnnnnnnnnnnnnnnnnnnnnnnnnnnnnnnnnnnnnnnnnnnnnnnnnnnnnnnnnnnnnnnnnnnnnnnnnnnnnnnnnnnnnnnnnnnnnnnnnnnnnnnnnnnnnnnnnnnnnnnnnnnnnnnnnnnnnnnnnnnnnnnnnnnnnnnnnnnnnnnnnnnnnnnncgtgtccctgctccgtcccgtgtctctgctccatcccgtgtctctgctccgtcccgtgtctctgctccgtcccgtgtccctgctccgtcccgtgtccctgctccgtcccgtgtctctgccccgtcccccatgtctccgctccatcccatgtccctgctcatcccccatgtccccaggcctgcctggtgtcctgcttccagcagctgatggtggagacctgctcctgtggctactacctccaccctctgccggcgggggctgagtactgcagctctgcccggcaccctgcctggggtgagtcctgctcgctgcctcccactctgtcagccattagccggggggtcacagcgagcctcacacatgcctctgacccctccccaaggacactgcttctaccgcctctaccaggacctggagacccaccggctcccctgtacctcccgctgccccaggccctgcaggtgagacgggggtgttggggtcgcggccagggatcattgccccaggtagcgtggcaggtgacacccggctgtctcttccagggagtctgcattcaagctctccactgggacctccaggtggccttccgccaagtcagctgtgagtccccaaagtggtggggtgggggtgtggacagccaggcagaccccacaggtcccacagagcccacccaagacaagggcagggccggaactgacccagcctatgccccgtggtctctgcccccacatccgcccgtggtacccaggatggccgggggcatgggggagccgtggccacagcaaaccttccgtctgcagggatggactctggccacgctaggtgaacaggggctgccgcatcagagccacagacagaggtgggtgcaccctcgccctccagagaggcatcacagcccctctcccctcaaagcccccctccccatcatgaaggtctgggccagcgccctcatgcctctatcctgccccaggagcagcctggccaaaatcaacatcgtctaccaggagctcaactaccgctcagtggaggaggcgcccgtgtactcggtgagccttggccccctgcctgggctagagcgggggcagcgacagtggctggccctgcacagaaggggcacgggggcctgggcccgcccctcacacccgcaccccacccgcaggtgccgcagctgctctcggccatgggcagcctctgcagcctgtggtttggggcctccgtcctctccctcctggagctcctggagctgctgctcgatgcttctgccctcaccctggtgctaggcggccgccggctccgcagggcgtggttctcctggcccagagccagccctgcctcaggggcgtccagcatcaagccagaggccagtcagatgcccccgcctgcaggcggcacgtcagatgacccggagcccagcgggcctcatctcccacgggtgatgcttccaggggttctggcgggagtctcagccgaagagagctgggctgggccccagccccttgagactctggacacctgaaccagacctgccagggctgtgcgatctcttggcctggtccttgcagctgtggcagcagcaggctccccagcggcccagggtgggccagaccagcagcccaggaagcagcacacgcggccgtggggaggcaggcaccgggcatgtcggcgcctctggtcaaaccacctacactgcctggggtgggtctcaaggaggcccggggcggaggggggttcccgcgtgcacacgagtgcggctggacgtgccgacacgcggtgatgtacccatgctccgtgtgtctgtgtctgcatgtccacacgtctgatgcacctgtgtacgtgtgtcaagcctagccacctcagctgcagggaggcagaaggcaaggcaggccccacggacacacttgggctgctctgaaataaagctgttgactccacctggcggccagtgtgtgcctgtgtgcccctccagccgccccgcgcccggtgagctgaaaccctgactgcacctggcgggacgagccccagcctagcctcgccggttcgcgtccacccctcttcccaccaggaaactcagtctaggacagagaagggtagaagggcgagacaatggggaccaggggcatcaggacccagattttgtcaaacgagccccaggtccccatcaggccccttgcggcctgttggagtctgacttgagtgagtgctacccggctcaggaatgcccctcggggagggcaagggacacagacactccccggagacagagcagagcaaggcacgggagcccaggagcaggcagtgggcgcaagtgctttattcaaagcgaggggtggggggtgagacccgccagcaggggcctggggcaagaggcggggccaagctcacacagggagaggggcaagaatcaattctgttcttcagggtcacaggcagcaggcaagagagttggggggccgggtccagcgcccactgtgccctcagggagcctccccagggcagcattgcatagtgaccagccgactggccttagcctgacctgcgctgagtgggggaggccctgcctccctgccgggcacctttggggaaggggtgcgtgaaggcattggcaggccctgcaatatgagccgaaagacccctggacccaagggggaggctggtcaggggcagggctggggctcaggcgtcctcaagagtccacagagaaaagacgcaagacaaagtcagacgaggcctatagcaaacccactcggtccgctacaaagaacatgagatgagggctgcaaagtggcaaagtggctttatgcgcaggctctgggccgagtaccaggagaaggtgcctccggaggaggccgggatgcggctggggctgtctggcacggggaccttcgtggccagccacgtggccttgggacgcccgcgtccagccagggctgaggacccaggccagagcccctcccgcccagcacccgcgacgccagcctggatgctggggtcactaagtgaggtactcgttggttccctggatgggccaccctttctgccctgggaggaggctctggggtgtgcaggagggagccagctaacaggtcagtgttctgggcagaagtggggcacgaagtaacacaggccctgaggacacagggacacaggtgacacgggccttaaaagtggcttgtgacatgagcaacccaggcccctgaaaaggggtgacctgaagacagaggttccccaggtggggtgagggacacccgacgatgcagcacccccccagggaaacgtgaggcttcaagagactcagtgtggggccctcgctctcctcctgggcgagcagggccgcggcgccccagcactggggctgccaggtatcgacccgcgggtcacacgcagggccgcggccgggtgggcgccagggacttcggggcatgcggggcgtcgggccgggcggggtggcagctgcccggcctgcccggccctagctctcttccaggtggaggctgatgaactcctggatacacctgcggaactggagctccgtggggctgcccgccagggcgcccgggggaccaggggcagcctcggcctcgcgcatttcctccgccatgcgcgccagacggagcctacggggaggcacagcgtgagacgcccctgccctggaggccccgcccctgccctggaggccccgcccctgccctggaggccccgcccctgccctggaggccccgcccagccccgagggcccggccgcgctcacagtgtcacgatgtcagcgttggccgcctgcactgcgatggccaacgggtcccgctgctcttggtccagggcgtgctggtccgcgccccgcttcaggaacaggcaaacctggctgaggggcgaggtcggaggggcgtgtcgkggcggggcggggcggggcgagtgtggtcgcgggggcgtggccggatagggcatggcggacagggcgtagccgggccggggtaggcgtkgtcggggcacagggcggggcgtgggttgcgcgtctcacccygtgcgrcccagcagcgtggcgtggtgcaggggcgcccggccccggctgtctctttggttcacgtccgctccgttttgcagcaggaactcacagacgatcaaggagccctggggagccggggcaactcagacggagccacggcaccggcccctctccgcgcctctgcaccctgaccccggccttgggcgcccrcagccgggaccgaacttggtccccaccgcggacaggcgacccttgtgtgggcgccacagaagatgcaaacgcgactgtgcacctgtgtcctgcgcgcagcccccgtggctcgctcacccctagcacggcctgcaccagcggcgtcttgccctcatcctccgcgtccgcccagttgacctcggccccgtgggccagcgccgccgccagcgcaggraggtcgcgggcacgcgctgcgcggtgcgccaagagccccgggtgcagctcgcgcacgtccgccaggccccaggcctcggcctcagtgtccccgtctgcctcaccgctggactcctccgactctgcaccctctgtggggagggggcggtcagggaaagcaacccccggggctgcccaggggctgggcaggggcctcgggcgagggcaagacgccacccaccctcctcagtgacgctgtccaccacagagcccgagccgaaagccaggacgtccragctgrcatccgagctgcccccraggccactgtcgctactcagacctgcaggtccgcagggaagggggtcctgagggtgggaggcccagactccytccagagccctggggcaaggctggaactccacccaccctccaggggccacccctagggacaggaccagctcccacccagggccggggggagccagctgcaggctaggagcaaaggagagaaaaccaaataacagctcaaaggtgccaggggtagccccctaaagcccaggccttttgggaagcccttccctcccgctcgccgccttacccggcacccyccgcagtgggccccccagccccgtctgtggctggcccaggctgaaatgtctccacccaaccaacgggcagcatggctccagaagggccctaggctgagggccggctggcagcgccctctgcttccccagcaccccgggccacccgctgtgtgcacacacccaggygcacacagcccaracacacatttgcacagctcacccctgacagtcagggccttggcctccagctgtgtggccaggaggccccccgccccttcagatgctgctccattccctggcaagggccatccacactcaggcacccttcaggccagcctccttggccctgccctgccacctggctgggcccaccccacacttactgcgagggccagcccctgcggcccctgcgtcgaagtaggagaagagcgagtccagctcgtcgggacagaagagggagtctcggcggaacttacgatccagggtgcccactgcaggggcagtgcgtgttcagagtgtggaacaggcccggggtggggcagggaaccccaggtcacgccgggagtctgcggarcctgaggtgcccccagagccctgccaccagccccttgacggagtccatccccgaccaaggcaagcccctcccagccctgccggggcatggcctcccacctgaggacagagcggccacacagggcagaacgggctcaagccggaccttgcggcgggcagtgggagcgcggggagagctgtggggccgcaggcacttctgcaccctccagcgtcttggggcctccagggctggtgccatgggcgccttccgcagaaacttcttttccacgtatttgtccttgatccaggcctccttgtcctgcctggaccagggggraacatgaggctgtgcccccaggctggggctccctgactgatccagactgtaccccacctcaccgggagctgctggctgtgggtttcctgctgcctgcaccctcacactgggcctcatagatctgattcacagcgctgtttccaagctcacacatcagctagcgggagacagggcgagcaggcatcagtgcgaacctgcagaccccagctcccgcccccacaaacggggtcccgtggcctccaggagccccacacgcacctttagcagctcaggctcccacgagtccagcgtcagggaccgcaccttggagcagtggacacccaggctcctggagagcagaggtagggatgagtctgggggaggcaaggcccccagctccggcccaacccccacccccggcctggccctcaggggcccacctgtggatgctccagcccaacccccacccccascctggccctcaggggcccacctgtggatgccggagcactcaatgcagagcagcacgcccaggttgatgctggcccagcgggggtccggctggccgcagtcgccgcactggctgttgccggccacactctgcacacgctgcagcacactctcgcccttcacgccacgctcccgagtgtcggtggcggagtcgatgctgctcgtggacggggatgctgtgcggtccagcctctggaggatggggtggagctgctcggtcccgcaggggctccagcatggtttccccagcaggccccctcctccccagccagaagagccaatgcaggccagggcccctcgagcacacgcccgcacacgcacgtacacgcgcacaccctcacgtgggcagatggcccccccctcgagcacacgcccgcacacgcacacacgcgcacaccctcacgtggacaggtggcgccgagcacacgcccgcacacgcacgtacgtgtgcacaccctcacgtgggcagatggtgccgagcacactcccacacgcgcatgtatacgtgcacaccctcacatgggcagatggtacctgcacacacatgcacatccacactgcacaagccagcatgccagtgcacaccagcacacacccagcttgcaggagccacacacaggcgtgtgcacgtgtgtggggcaggggccatccccmgtggcacgtaggtgtgtgcaccggcacggggcaggggccatccccagtggcasgtgtgtgtgtgcacaggcgcggggcaggggccatccccagtggcacgtgtgtgtgtgcacaggcgcggggcaggggccatccccggtggcacatgtgtgcacgggcttggggcaggggccatccccggtggcacgtgtgtgtgtgcacaggcgcggggcaggggccatccccggtggcacgtgtgtgtgtgcacgggcttggggcaggggccatccccggtggcacgtgtgtgtgtgcacaggcacggggcaggggccatccccggtggcacgtgtgtgtgtgcacaggcgcggggcaggggccatccccggtggcacaygtgtgcacgggcttggggcaggggccktccccggtggcacgtgtgtgtgtgcacaggcgcggggcaggggccatccccggtggcacgtgtgtgtgtgcacgggcttggggcaggggccatccccggtggcacgtgtgtgtgtgcacaggcacggggcaggggccatccccagtggcacgtgtgtgtgtgcacaggcgcggggcaggggccatccccggtggcacgtgtgcacgggcacggggcaggggccatccccggtggcacgtgtgtgtgtgcacaggcgcggggcaggggccatccccggtggcacgtgtgtgsgcacgggcttggggcaggggcaccaagggccacacctcgctatagcaactgtcagggctctcgcggtaggcggaggcgatgctggcctgcacagcctggacccaggcttgccgcagcttctcggagtcagcctgcagcatgcagctcctgcaggcagtggaggggcgggcgtcagctccggtgggcaggtacgccccccgccccaccctgggctgggcctcctcacttggtgggtgacagcacctcgaagcagaacctccgctcgatgtcctcacacggcttcacagagcacaggcggaggtcatccaccaccacggtgagggcatcctgtgggcggcaccgctgtggcccctgccctcagccaccacccggccccgaccaccmacttcctgcttcaccttggagacccggaggccgactgcctgagccccaagccccgtgtccagctctctgctccctgactgttccggctccggcgtccactagtgccccggccctgtgctaaccccaactgaccagtctgccctgtggcccaggtggggcgtccagccatcagggccccagccccaggcccagggcacaccttgagcttcttctggtagaccagctggctgttctgaatggagaaccagcgcctaggtgggtggggggatgtggygagtcaggcggggcccatcccagggctgctgtgacccctgcccccacctgaggaccccacccccgcctgaggaccccacccccgcctaaggaccccgcccccacctgaggaaggcctctcaccggttccatgtcttgaaagcgttgctggccctcttgaagaggtagccctccatcaccaccccactgggcgcgtccacgtcaaactccactttggactcatcgtaggagaagtcctggggggatggaacccgccccctcagtgcccaccccaggggccctgctaccctccgtgctttcccggagcacaggtgggggtgaggtccttgtctgaggctgccacacggcccacggaccacacgctcagacgagagaccctctgttcaccacagccacttcttgacctgagcaaggcccccagccctgcaacccgtggggcagacccctcacgttcacagctgggggcccgagagtgccggccccaccccagccctgcagggaccagcaggctgcgatcaggaaggaagctgcgcccccaccctccgcatcctgagtgccccattcatgtggccagctgggcggacagagccccattcaggaggcctgggagtcactgagggccctgtgtgtcccgccatctggcaggccagggaagcagaggggaggggcggccacctgctccccaggccacatgggatgggaagggacagctgccgccaaccccacggggaatgtggaggtctggccggagccagcccctcacagccgcatcagcagcaggagccgagactggtgggaggtgtccatggtgctgaagtgcccttggggtagaggagggaaaggcaccgccccatctggtctcccccgacccacagcccgcccagggcccgtgctcacttacctgcagcagcgtctggagggccggagcaggagggggtagggggagaaagccagtgagtgacggctgccaactcctggtgactggtggacccgtccccaactcctggtgactggtggacccgtccccaactcctggggggctctcccctatcccaaaatagccactcctgcctgcagccaacctctgcccgggatggtggccggggctgctgtcccacaggcaagcaaaggccccgcaaggagccagtgactgaggccacagaggtgaccaccgcctcaaaaggagatcccagcagcggccccacccacacgtgcccctccactgcacacatcaaagggagcagccttggtcccctaragagggtgtgggcagggcaggtgggagacaggcaggaggaaggggcggggagggtgtgccgggcatggggtgaggacgcaggggcctcccaggcgcctggtgtgcagggagccggctgcgcggcctcacccgctgctggatggcggcgtgctttcgctccatctcacgcttttccaccgcagagtcgatcaccagctggtccagctgttgggggtggcattagggaaggtcacggaggcctggcccagccccacccctcccaaaggctcacctcggctgckagcttcttcatgtaggggtccagctggtgcaggaggctgtagccctgctggaagaagctggactgggcgtgcatgaaggacagcatctgcgggggcagcacaggtgaggcccaagcacacccggtccagcccccaacatgcagcctgtgctcaggggcagcccccacgcactcacagagtccaggatctcaaacttcttcttggcctgcagaacattgatctgccagagggggagcccacaggtgagccccggaggctgaggcagccccaagccctgcacctgccatagagtccacctgagctgcttgtggttccctgagacccccaggtcgtcttcagctcccagctctgggccagcctcatcctcccatggtcctggactgcttccccatgtctggagttcccacccatgggcaaagcaagaatcgtcactcctgctcaaaatccctccagttctgtacaaggccgttgaggcctccattcgctacagctggtccccgccccccagcccatttctggggctgacctggagcacatagtccagtgccaggtggcggaagcacttcctggtgagggtgagggccccggtggcttcctccacctcgtggggccggtgcctcggggcctgggcgttcctcaccagggacagctcyaggtcctcccgcaccttgtcaaactgcttctttgtctccttgaacttccgcacatccctggaggccaagtgccaggtggggtgagagatcagggagggcacctgctggatcctggagtctcccacatcgttgtttgtgtgttttttgttttttgagacggagtttcgctcttgtcacccaggctggagtgcaatggtgctgtctcggctcaccgcaatctctgcctcgcgagttcaagtgattctcctgcctcagcttccctagcagctgggattacaggcatgcgccaccaggcctaattttgtatttttagtagagatggggtttctccaggttggtcaggctggtcttgaactcccgacctcaggtgattcacccacctcggtctcccaacgtgctgggattacaggcgtgagccactgcgcctggcctggttttgtttgtttgagacagggtctgtctctgttgcccaggctggaggctggagtgcagtggcacagttatggctcactgcagcctctacctcccaggctcaagcaattctcccacctcggcctcccaagtagctgaggctacaggtgcgtgccaccatataaggcttatttttggttcttgggggtgtctttttttttttttttttttttgatggagtctctctctgtcacccaggctggagtgcagtagcacaatcatggctcactgctgcctccgcctcctgggctcaactgatcctcccacctcatcctcctgaatagctgggaccataggcacgtgccaccatgcccatctaatttttttttttttttttttttgtagagatggaggtctcattacgttgcccaggctggtctcaaactcctggcattctctggccttggcctcccaaacgctgggattacaggtgtgagccaccatgcccagccccacccccctccactccaggccctttctttgctcctgggcatagcctccttcctcaccagcctatcccaggcctgcccgcacccctgctgaccccgatcatctgctccaggcctccccagcccctccccacctcactctcaagatctgtccagcccagackccagccatgccccagactccagacccccaaacccaacgtggactggacctctctgctgtgggggctggacaccccacccacacatgcagggtgtggaaccccccgcactccacccggctgtctgcctctgagccttctgccttgtggagccgctgcacagcctggaggcctgggcccaaggtgcctctgctctgccccagacccccttcccctccaagggagggagcgtggcctcagtgttcttcccccagccctgggkgccactcactctttgacaaagctctggagctgctgccgcacggacctctgggcctggtcaaacaggatctgggggcagaggcgggcagagatccttggggtctgtcccgaaagagccccagatggaaggccccatcctcaccagcagagggcactgcccccaggcccagatgcaggggcgggtcccaccctgcagggctggcctcaagggggtcagrggagcagcccccaggcctgagttggcacccagaggcgatggctgtcacccctgcccctctgtcccacctggcccttgatgagtgcagaggccaaggctgcctcatcacagcctgagccggagccccactgcctcctggccctgggcggccaccctggggtgcccatccctgcagcagggagcactcagccagagccgggagcacccaggggctgggcctggggagctggagcctgggctctgaatcggaacccgaagtagagaaggaccgggcacaaccaggagcaaagggacggctgagccatcctgccttgtctacttcgggacctcctctgttcagtctgcggctcaggttcccaggctgcagccccacatctcacgggtgcctgtcctgtgtgtccatccacgtcagtgccagggcccccgggggccacccagacccaaatggcagccaggccagcctgggacgagagccctgcccagttgggggaaccctggataaaccacccctcccccagggtctagtgtggcccttgcctgggacacggcagagcccccagggctgtcccccaaccccacactgacttgaaaatgtgggattccccccccccccgactagaggagcagacacgtgccccccccaacccgacgccggccttcaggtgagccagcgcagctcggttccaggccaggcacagcccacaggtggcagggaggccgcgctcaccatgtggtagttcaccacctcctgtaggctgtcagcgaacctctgcagacattcctggaggagcagatgggaacccgtgctgagatggcaaatccgggcccaggtcacccagccacgccctctgagcccctgggcggtgcagacaccggcctgcttctggcctggacgccctcaaggggctgcctccctcggcctctcccccaaccccaccttgaggtcagaggtcagtcggcccctcaccgagatgacggtgtcgccctggcactgctgggacaggtcgcggacgccgctcacgaaaagcctgctggtgctgacgtaggccttaccggcttccaccatgccactgcacagcttcaccagctgtgggccagcggggcgtggtgagcacagtgggcactggcgcctgcactcgccaccacacacggccactcagaggcaggaagagctcccagggtaggttccacscagggcgttggcactcaggactcagtgccccggtgcagcttcctcacgcctgggcctgcctggggcttggaggcccgtctgggaggggagggtggggccgccacggctcggctgggagggaccaggagccaggcaggggacccagggccagcaggaccagcagaaccagcccatgtggggctcatggataaggctgcccactcccagctccacggcctgttgccccctcctctttctcagcccatgtggggctcatggacacggctcccctctccacggcctgttgccccctctttctcagcccatgtggggctcatggacacggctcccccctccacggcctgttgccccctcccctttctcagccccagccccagccacaccaaggctcagcccayacagcayctgtccccgtgtcaccagcccagcagaggggacgggcagccaccgtgggtcggggactcaccacagcccagcccctcccagatgggacgagactcagggccagccacatgtgtgcatgtgacatgtgcaccctggaacacacatgctaagacacagggaccaggacctggagcaccacacycatgctccacatatggggggtgtaagtggcttagtaaggcctggagggcgagtctggccatgtggccatcccaagcttggccgggcacagggcgctccaggcccgcccttcaccttgtccagtttggcctcaatctccaccacgtccgtctccacctcgtcaatggtcgccctaaagcaagaacggggctggctggggtcacctgcagcctcagccccctcggggcttcacctccccccgcacctccctgaggggctccaccatgggaaggggctttcaggaaacaggctgggagacagacgcctgcctgctacgggggcaggactgggaccaggttcagtgcacttccccccgcccccccaaccccaggcaggcagaggcagccgctgctgtgccctcggggaagaaggctggaccagcctctcccaggacagccggccgctgggagtccctcagggacagtgcccaccaagggctgagccagcctcacccgcctctcctctaggagttcagagtcaaccctggacccatctggagcccctcaaccctgcggcacctcccctcaccccactgcactactgcagcccatccaggtctggcgcccatgcactgtgggacagggtgggggcagtagggcagctgctctcggtcctggcagcaccaggaggacccagaccagctggggagagacgcccccggctcccccaacctcacagctgcaagcggcatggtccgctggaaagacgggtaggccatcctcctcagagcccactcccaccaggacagcctgacagtggggctgcctggggagagaagagttaaggcatgacatcaccagagaagcctcggcgggagaatccccggaagacaggaggcagatggatcgggcacgtgaccaccccctccgggagcaggcaacagggaaacagggccaggatcccggcagccctccacacaatcggctcactggctgtccgggccatctggcctcctggggattgggcaccacagggcccgggctggggccaggactccaggtctagggcaggggtccaggagcagaggccatcagggcctacagtccctcgtaccttgctaccctgaccggtgtcccaggcctcgggggaggggcctgtggtttacatggggcgtgtcctcaattaggagctggagctgcaggcaccaggctgccccagccagggaccttgaagggtcccagccaccccagaaggacactaggtcctctctgagcagccctctcttgttcccaaggggctaagaggactctgaatcccgaagcagggggcgatggagggaatctcgctgtggtgtccgctgaccgccagtgcccagcctgcagcccctggaccctgacctctacctcagctggaggatcccagaacagagaagggaccatcctcccaggagaaggcagcagagagcgccacaccccaggagttgcagccacccctgagcagggccggatgcagagacagctgcacccagagctgccgccctcgggtttggggcgcccgtgtccctggagagccagcaaggggggatggctgcacccaggagctcacggacgtgctcatggggacagggtgggccctggcagaggccccgagagccgctcccactgctgggagcccctcagctctcccttcctcagtcctggggacctaggcctcctctgctgtgctcagcccaggatttcctcagcagcttggaggacggggaggagggtgaggctgccccccaaccaaagccatgactcagcgcctgaagccccacccaggggaggggcacactgaacagaggccaggcggttcccctacacgggctcccctggcctccggcccactgcacctgggctgccactaggccctccccagaccaggagggtgcgggcagggtccccctctcccgggctggggcgaccaggctccacgttacagaccacatcttcccgcccaccctgcctggccccccaacctggcggtaggccaggaaactcaagttacgcccttagggcctgcccccaggacagcctcagggagcccctcgaaccccagttaaatcacagcctaaccccaaaacccactgggccaggccattctcatctccccactccagtccatgccccacaggggtgaggcactttcccagggcagtcgctctacggcacctactgcagccccacagcccccataactggctcctgtaacaggctcccatgagagccggttaccagagagaaggcccagaggtgagtgggttccagcacccccacacgactggaagagggcagtacagggccgtctgcgtggaggaggaggtccattaggcttctgacggaggggccagggagaaggtgggtgcttcagccagggtccagcccccagcagggaggccatgcccacacctccccacagcccgggtcctcagtgcaggatcctagggtgctcaagttattcaaccccttttcccaggtcagcaacagaagatgggagagcagaggatggccccagttcctctgcccagggctgggggccactctcctggctggccctgagcctcccactccaaggctcctgagcctcctggtgagggctccagggatacagaggctccccgtgcctccacacacatgctgacttgccagcagatcccaagagacccagcgcgcgcgtgcacacccacacatacacaatcaagcacacatgtgcaaacatgttcatgcacaaacatgcctgcacacactggtaccacacatacatgtgtgttcaaggagacactgcacagacacgcatcaacatgtgtacctagtgatggaacacgcgtgtacaaggtgatgtgtctgttgctgacatggctaacacagtacgtgaacccacacagacaggtggtgtgtgcacacgcttgcgtgcactcatcggcaggctacatgcagaagcaagcacagccccgtggcacagctcatccacacgtcctgtgcaaggcctggtgtccggagggaggcacgcagaggggcaaagttcacaagagcgcaccccgcacgagctcgtgcagaggagggggcctcacgcaggtgcgcacttggggatgcagagaggtttctttgcctccattgtcgtttgccaaatgtccaccaagcaaagccgatgcacacttgtgcacacgtctgtgaacatgtagttcacgcaggtgtacacgcctgcacgccacgaatgatggaaaacatgcagactcggtgtgcacacaacccctaccccctacctgaccttccccgccgctyttctcggccgccacccctccaagcccctgggtcattcaaaccacttcacgtttccaagcaccctaccccaggccttaaacgcggctccagctgcctgttccccacgcgctgctctggacacaggatcaagtcagagaccaggggccgacgcccccacggacccagacgaccctggccagagctggactgcagggcccgggaggggctcagcccagtggaggtgcagacacagagcgggggcggacggtcccgaggtgcccacggctgcccacgcgcacgccctccacccggggcggccgcacagggcaggagcgtcttttgttccaacccccagggcatggcggggcggggccgccgctttgtccgaggccggtcctccagcccctccccggcggccgcggcccggcccggcgctgacctccccaccccgccgccgggcacaaaggcgacagcgacgcccccggcctgcgcccaccccggcggccccgggcggcgcacctgaagcgcggggagtccttgacgcactcctcgaactccacggtcatggctgcggcggccgcggcgctcactggcacgaggaccgcggcgccgagcggcagccgcgccggcccggaccgctcgtcccgcccgcgccgcctyggcgcccgcccgccccggaatgaggccgccgcgccgcgccccgccccycctgtcaccgccggggagcgtcgccaaagtcagccgcccgcycgcaccgcccgctgtcactgccggggagcgtcgccaaggtccgccgcccgcgcgcgccgcccgctgtcaccgccggggagcgtcgccaaacgcctctcgcagcgtccagggaccaccccggtccggaagtgaggcggggcctgccacggccgtctccggggacagtcggtggaaatgtggggcgcggggagggcgcggggagggcgcgggcccgcccgctccaaccatcccggccgttgcgcaactcagggcgtttgcaaaaaccacgtctgggaggacttggccgcaacgcggcgaacgggcgcgctcggggagtgtgggcggcggcgaatgaatgagcgagtgaacgaatgcacgcccgcgagagcgcggggtgaccgcgtggttggtgcgcgcctcccggggcgccgcgatagaggtagagcgcctgcgctcggcggcgggccggcactttgcagccgctccctaagcccggccccgcctccgctccccgactctggccgccgtggcgcggtgccaccgcgcaggcgcaagagcggccggggccgggggggagggggggggggcgtgaccaggccgcgtccgcgcgcgcgcaggattcctgcgctggaggccgcctctgacgccaccggctgggctccgccatgagttcggcgccggcctcaggctccgtgcgcgcgcgctatcttgtgtacttccagtacgtgggcaccgactttaagtaggtttcccaggcgcagcggcgggcgccacgtgggcccgggcggaggcgggaaggagggcgcgggcgggcaggcggatgtctctggacgcgggttccaaacgttcggggaaggaagcggccctggcctcagacggcggcggagaccccagggcagggcgcccccggtaacctccgcccgcttctgcccgcagcggggtcgcggccgtcaggggcactcagcgcgccgtcggggtccagaactacctggaggtgcgctcagccggtcacgggacgcccggtgaggggtaagggggaggctcccgcccgcgcgtccccgyggtccggcctcgctcacccgcccgccccgcggctcggtcctgcaggaggccgccgagcggctgaattccgtggagccggtcaggttcaccatctccagccgcacggacgccggggtccacgccctgagcaacgcggcgcacctggacgtccagcgccgctcaggccggccgcccttcccgcccgaggtcctggccgaggccctcaacacacacctgcggcacccggccatcaggtgagcccgcgacctaagcagccctggggctgtgccttcccgactccatctgtcgcgggcggaggctggagatctggacagacttccttgtctggtcggagctcgagggggaaggagagccaatgtgacaccgcgggcgggcggggtcgttcctccggtgagctttacctgccgccatagggtcctgcgggccttccgagtgcccagcgacttccacgctcgtcacgcagccacgtcccggacctacctgtaccgcctggccactggctgtcaccggcgtgatgagctgccggtgtttgaacgcaacctatgctggactctcccggcagagtgrgtgtggccctgacagcggggagggggcgggcaggccggccccaccctcctgacggtcaccctggtccctgaagctgcctggatatggtcgccatgcaggaagccgcccagcacctcctcggcacacacgacttcagcgccttccagtccgctggcagcccggtgccgagccccgtgcgaacgctgcgccgggtctccgtttccccaggccaagccagccccttggtcacccccgaggagagcaggtgaggaagggcccctgggctgrggccctgccctcaagtcacgtgctgattttagctccagcacctcccccagttttaaggcaaggtgaggcgggaggcaggcagccgggagtcctcaggacctggacagctggaggggattcgcccggacgccccccagcctccagctgtgccctccccccaggctggggagcggagaacagggaaggctgcttgtctctgaaaaacccctgccatgcctgatggaagaatgttggcagctactggaaaggtctcactggtgccagtggttctggtggggtggtttctgctgcccccagcactgtcccgagggccacccmccaggtggcagcttctgaccagaacctcccctattggygtgagccctgaaggggggaagaacttctgccagccccagacttctgtggcagagcagcaggtacaggactgggggtctctggcacccgcaccagccacgttcccagaccctgcaccaggaccctaggtgagggcccagggcaagcccctctgggatggccaggctacctgcccagcctccagggtcctgctgcctccttgcccaagcattgtttctctggttttaagcccctccaatgggcctcactgggggcaggagatcagccagggcccctggtggccaagctagtgggaaccaggctcgtctttaggcccaccctgtcactctcccgtccaaggccacatagtaggctgaggatggcaaacactgccccacagacacctacaggtacgtgtttttccaggaagctgcggttctggaacctggagtttgagagccagtctttcctgtatagacaggtaggctctgttctggggccgtccccagggggtggggctgagggrgggcaggcccctgtgcagtcttggctctgggtcgtgggcggctctgggtcacaggtacggaggatgacggctgtgctggtgggtcacgggcggctctgggtcacaggtacggaggatgacggctgtgctggtgggtcacgggcggctctgggtcacaggtggctctgggtcacaggtacggaggatgacggctgtgctggtggccgtggggctgggggctttggcacctgcccaggtgaagacgattctggagagccaagatcccctgggcaagcaccagacacgtgtagccccagcccacggcttattcctcaagtcagtgctgtacgggaacctcggtaagaaaaacaggcacgagaagctcctgtcatgtgcccagtgactactgtggccgaggcatygggtggggggccaggggccactgacggcagcaactgggggtgaagcagccccccgcccagggctgcagtccctcaggccagcccgtagcccgtcctgggctggcccactccctggtcatgrgagtggtctcagcggtggggagggtgctgggccggtcttgccccaggctgacgcagggtctggtrcgtccacaggtgctgcctcctgcaccctgcaggggccacagttcgggagccacggatgaccctggacactcaagccaaagttaggccacaccaggcccaaccctgtgctggtcaagccagggcagtcacagctgcttggggcccacagcactgctgcctggtctccacagtagcctccctgcccgggtcccagcaccctggatgcccgtctctgtcccaggcgggatggggcacagtgcaggacacagccatgtacaccaagaagagagtaccaagtagtcttttgttcagcttttactggaaactgctgtctaggaccacctgccctaaccaggaataaaggcaagacagcctggagaccagtttgtttcttcagctgcaaacagctgcctgggcaggcaggtgacacaaggcctctgtccccagggatgggacctgcagggtctgttcacccagggcacccacagtcctgaagtgcaggcccagggtctgtccagctgggagagggcagaggtggcggctgggtgagttgccggcctcagctgggggcctgggggaggcccttcttcagcagagatgtgaggaagctccccagctcctcgtyctaggycagaggcaaaagcattgtgggtggtgcaggacagggaggaatgttgatacctgtgttgaccgcggtggggtgggggtcaccccttacctggtaggtccaggagaccagcagcaccttggtgcctgggtcctcagaaggggcggcggcctggaggaggacggactccacagtcacagagccgtctgggaggtgctgcacacagtggtccttcaggacgctgtggggaggctcggtgagaccctgcctggcctccagggcccaagggagtggggggggggcggggccgggcgccyacctcttgaggtggctgtagacgcgcaatgccgtctcctgctccttgcgtgtgtcatgcaggtgcacgcggcaggtgaagcgcagctggtgctcagccagacccagctctttgagggcttgctctgaggacaccagccggaagttctgtggggcagggacaggtcagtgagcgcagcagcggccctcccccctccagagaccgtcctggcactcacgctgtccttcatgatcagggtgccgtgcaggagccgaggcttcttggcctcagggagcagccctgcggaggaggtggcaggagccatcaatgtgagggccgctcccagccgcctgccccgagcaccctgccctgccctgcccagcccgcataccctgcgccatctcccgcttcagcagccccagcgagatgcctacggggatgctggggcttgtgggcagcgtcaccgtctcgccattggccggcatgtagcagttgacccctggaccccgggggaagagagagcctcagcccaggctgcccgtgctgacccgaggtgggccccacgccgcccgcccggctgcctacggagctcctgctcgatcttctgcttcaggaactccatcttcttggcctcgccatgcaccagcagcacgctctycggctctgcctggcccaccagctgcatgatgcccttggcgtccgcgtgtgcgctgaatgacatgtactccacctgcatcttgacctccagctacagaggccacggggcgtggacagtggttaccaccaggaggtgcccctcggccctgccagcccagtgcggggtcgagactcaccacctgccgcccctccrtctcgagcttccgctgcccgctgaggatcttgtggccgacggtgccctgcacgcagtagccgggcatgatgacctgggggcaggcacagagctcacagccagggaactccagccttggcacctcaaggccttgccrgggatgcccccgcctgaacccctggaagctgtttccacctgccagcggcgcccgaccaagcctagctgcagactccaaagggctcaggttttggcacaagactgtccagggctgggctggggctgttctgcccgaggtggacaagctgtgtcacagagactgagcagctccaggcggacatcgcccccgttccccagcagcagcagccacgtcccttggccagcacgaggccaagccagtgagagctcagagacagcatgggtggaaggacaacccgtcggcctccagcttccagattcccacacctcaccatgcyctcaccatgttcttttcgtttccggcccatttccggaagatctgcagggactgcccagcgtgcagcattcctggcgtggcaaacayaacctacaggacacacagggccaggtggggggtcagggcagcagatgcccccacccccactgcaggcccaagcccagacacctgcggaagacaggagaccgacgggtgtggatgtgctggccggccctgccgcgggcctcaccatcggtcctgggttgtcagcaaaagcccggtcgaaggccttgatgtgcttgaactcaaacatgttcctctgcacaaaagtcttgcggatcttctggttggtccaggggatgaacagcttgtagtagtggttggccttctcggtcagccccgtggagaagtagatgggcaccttcaggttcatgcgctccctggggaccaccggcccagtcagcacagtggccacaggggagaatgctgcagggcaggactcggccgggtcacccccaacacccgtgtctgcacagcccacgcacgggccaggttgagtccagtcgcgaccacttgtcccattaagccctgcagcagccgggctcagcggagaaccaggaacccctacaagagccgcacacggtggcgctgacgggatgtcacaggcttcctggggtcacacagcacacgagcggccccccaggacagcagcaagcagggccaagatgccaccgctacgctggacagggctgcccaccaactggactgtgttcaggccgggccaggggctccttaaagagccgtcctggcggcacctaccagaaggtctccaggaggatgcagagctcctgggcgcggcccagcgcgaacacaggtatcagcacctgagggggacacaaggcaggagccctgggcacatggcccctcgacacagcaggcagcgtccagtgagggcacggccaggtgcccaagagctgcggcctcatagggaccttagcctctcatctgctcccagtcccgtcccagccgctctccagagacagaagggagccgtatgagagacaggagggagccgcatgagagacagaagggagctgcatgagagacagaaggagcctggccagggcttcgtccgcacctgaggtaggagggaaaaggggctccctaggaaagggtctctgagttttcctcctcaatgttgagcaaatcttcttccctccctgcctgaaaatgcagtaccccccaccctgagaccctgacccatgccaagggcagccaagcctgccagaaagaccagcccagcatggccgagggcccatgtccccacccctgctgcagctaccttcccaccacgctccacggtctcgtggactttcttcaggaagtctcgctcccggcagcgcttggagtcacggatggtcgtggcgtacgtggactctgtgatgagcaggttggggcggcacttgtcaatccaggcagctctggaacacgggggtgggggtgtgagccacgatgcactgtccccacggttgcagggctgggtgtgacaagctggaccccagtaccacgcccagccgccttcctaggtcactctggctggaaagagccagctggtaaaatgctgtgggcagcacacttgggaagagagaggagagacagaggcacccacccagacacttcggaagagcgagacagaggcacccacccagagacttgggaagagagagaaggagggacagaggcccctgcctggaccctgtgcyttcgcgcatttgggcccagaacgaagggggctctccaggccgcacaggacatgggagacactgccagrctggccactcaagggctggcaccctgacacctgcaagggtcctgagctccaggggggcccacgggacaaaaagacacctcagcctacttaccctaagtgtcggtctggggtcatgttataatcaccctggtgaacgatcaaggatgccatgaggagggtgcctcccaccccagcagcccctcccaagcctcaagcccttccactgacygtgtagaccacagactctgagcccactttaatctggaacatggctgccccyagcacgtggcctgcatagtaggccttgatctccagctcatcatctacctgtggaggacagggctgcgctcaggctgtgtcctcacagcagaggggcggggagtgagggaggcgggggacgggaagcgcgggaggcgggggtggggagcgtgggggaaggggagcgagggggcgggggcgggagcgagygaggtgggggcggggagggagggagggaggcgggcagcgagggaggcaggggcagggagtgaggggggcgggggcagggagggaggcggggcggggagcgagggcactgcactgagcttttcagtccctgttgctcacacacagcatccagttcacaagggacgggcaacgtggacaaagaacgaaagacaacggacaaaaaactgaagggacctgaaattggagtttccagcgtggactttgaatacatgayagagaaaagacaaggttcagaatgttggcggccaggcctaaggtggatcccttggggtcaggaattggagaccagcctggccaacatggtgaaaccccgtctctactaaaaatacaaaagtaagccaggtytggaagtgcgtgcctgtaatcccaactgctcaggaggctgaggcaggagaatcgcttgaacctgggaagtggaggttgcagtgtactgagatcacgccactgcactctagcctgggcaayggggcgggactccatctcggtaaaaacaaacaaaaaaatactgggctgggcacagtggctsacacctttaatcccagcacttggggagaccaaggtgggcagatcatctgaagtcaggagttcaagacratcctggccgacacggtgaaaccctgtctctactyaaaatacaaaagttagctgggcatggtggtgggtgcttgtaatcccagctactcagtaggctaaggcagaattacttgaacccgggaggcggagattgcagtgagctgagattgtgccattgcactccagcctgggcaacaagagcgagagtgtcaaaaacaaaaattggcaaaaaactagacttcttttaaatttaatttattcatttaaaacttgccgggtgcggtggctcatgcctgtaatcccagcactttgggaggctgaggcggytggatcacctgaggttgggaattcaagaccagcctgaccaacacggaaaaagcccgtctctactaaaaatacaaaattagccggatgtggtggtgtgcgcctgtaatcccrgctactcgggaggctgaggcaggagaactgcttgaacccgggaggcggaggttgcagtaagccgagatcgcgccactgcactccagcctgggcgacagagcgagactgtgtctcaaaaaaaaataaataaataaaattgagagacagggtggggctgtcacccaggctgcagtggcgcaatcatggctcactcaaactcctgggctcaagcgtcctcccgcctccacctccgcctcccaaatagctgggactataggcacgcacccaccacgccaggctaatttaaaaacaaaattttggccaggcgcagtggctcactcttgtaatcccagcactctgggagaccaaggcgggtggatcacctgagatcaggagttcaagaccagcctgaccaycatggtgaaacccccgtctctactaaaaaaaaatacaaaattaactgggtgtggtggcacacgcctgtaatcccagctactcgggaggctgaggcaggagaatcgcttgaacccagaaggcggaggttcaaggtgagctgagatcgcaccactgcactacagcctgggcaatgagagcgaaactccatctcaaaaaaaaaagaaaaaaaaaaagaattcaacagatgaatttaacaccatatgacacataaccagaagagaatccatgaactgaaagacaccagagggaatatccatcaggaaacrggaaagacaaacagatgacggagtttcaagaggttgaacgtcaggctctcggggtccctggaggagcaggaacggggcagaaacaacactggaagaaacatgatgaaggcctcaagccacagatccaagaggcctcaaactctaaacaggctgaggatacatgtcagcccatcagagcacaagcaccaaaaaccaaggctcctgctcagaccctacggctgcccatgcccagagacagaacgttgtttgcaaagtgcagagacaaaatactgtcaacctaaaatcttacacacctaagggaaaaaaagtcctttaagaacgaggataaagtaaatccatttgcaggcaaataaattttttttttttgagccggagtctcgcgtctcgctctgtctcccaggctggagtgcagtggtgggatcttggctcactgcaagctccgcctcccaggttcacgccattctcctgcctttcagcctsccgagtagctgggactgcaggcgcccgcaccacgcccagctaatttttttgtattttgtttagtagagacagggtttcaccgtgttagccaggatggtctcgatctcctgacctcgtgatccgcctgtctcggcctcccaaagtgctgggattacaggcgtgagccaccgcgcctggccaaggcaaataaaaattgacagaattcagcaccagcagacccacactcatattcttcaggcagaaggcaaattatcccaagtaaaaagtagaaaaaatgcaggaaycccaacaaaaaggataaktatataaataaaactaagcaaatgttggtgttaccaggcattagaaatgatgtctttctgggtttaaaatgtactgagggagttgccaggtgtggtgactcatgcctgtaatccgagcactttgagaggctgaggtgggaggatccctggagcccagcccaggagttcgagagccttagcaacacatacccatctctacaaaaaataccaaaataaattagctgggcgtatgggcacatgcttgtagtcccagctacttgggaggccgaggtgggagatcacctcaacccgggaggccgaggctgcagtgagccaagatcacactccagcctgggtaacaaagtgagacactgtcaaaaaaaaaaaaaaattaaagtttcacaacaaaaaagataaacatacttcattttgacaagttcaatcagaaaattaaatgttccaaaatacataggtacctaatataatttcaagaaatataaaagcaatacccagagattcgagtgagacacagacaaacccataatctttgtcagaaatggaatttcacctgtcactcgctgatttaaccttcacttcttccctgacccacacccagmaccaggcaccctccagagctggcccatctcccctccagcccctgcctccctgcccggcaacaccccgggagctccagcgagtctctggccgctccaagcgctctgagggcaccagcctgtcccactctggccatttcaatgccgctcggacagagcctygtgggttcgtaagccagtgcatacccccaccctgcacgtgctctcccgggtcggcgcccagtctggtctgggacccgcatcctcgcgctgacgcctcctggtgtccccacggtgctggacgraagagtgaggtggggtgggctcaccctgaggccccagccttccagaaactgtgtagaacgggcggagggcatggttggtgtgggggtgggcagtgactgtgccagctgtggccctgggaacctgacctggaccgtctggtggaggtggacagccaccaccttcttcatgcagtctttgatcatctgggaggtgaagaagttggcctcgcccttcttgtctacggcgatcttgcggtagtcctccagcaagatggggcagatggcctgggtggggtgagtcatgtagatggggccgtcgtagcccaccatctcgctgaagtaggggagrgccccgcagtggtccaggtggaagtggctagggggacgcagcacaggtcagcctgggcccaccctgccccagccttcacccccgctctgggcttgtgggtcactggccccttcattcgcctgctgtgcgccaggcctcatcccgagtaccgaagagtcagtaatgagcaaacacaaaactgtctccctggaactttcagtctcaaagtctagcaaggcaataagcaaacgggaaattyaacacgtcggtgacggcgacatgctcgcgagacaatgcaaagctgctgagggaaccgcgcataggggagccgctggcttttcaggcagtcaggacaggctgagtggagctgcaggtgaaggtggcacagacctgagggcaagggcagcgcctggcaagccccaggaaggcattggggaccccaccgtgtctgagaagaaaccacaaccacgaggggctcaggggcagctgaggacactgcctccggagaggagaaggggcttctccaggcttcacgggcctggctgctgggaggacagggcagggaagggcagggggccagcaggagtgctgtggccgtccagacgaggccacccagaccagcgggtcatgagctgctgaaccctaaaggctggggtcagggcagactcgggactctggaatcgccaacaagacagtggggtttaaagatcctgagacagtgaaggcatcagagagggtgaagcctggagggccgggttcagaaagtagggttcagagggcagggccggaagaacagacagagaccaggccatgtgtgtgaccagtaaggcaggcagggagcagatcctggggcctagaagccccctgaggatcaaggatggcacaggccccttgccaaacgctgccgagaccaagcaaggtygcccaagccccacaggcacagacatgggaccctcaaggcccccaacaggaacccacctaatgatcacacagtccaggaagtctgttaggcggccgttctgggtgatgtaggagaagtcagggaagcgtcgctaggaaggatgtgggggtttcaggttgcacagtggtctccaggcagcatctggggccacccatgccccagggaggggcccccaggaaggggggrtctatgtgcagactcaggctgggcactcccatcccgcaggtggcaccaggacccctggctgctcayagcatccggaggggccgaggttacccccaacctcactgacagargtgagctggaagctgagcccagggtctcacggagtccagcctacaggaccccggggctggggctcagcgccagcacagggggaccccaccatgcaggggctcacctcggccaggcccacccatccctgctccccacagggtgcagccatccaagcacaaccactgctgcccaccaccccactgtcccggctctgaggcccagggtccagctgtggatggccggctctcccagcctctgggcctcctgcccaagggactcacgtcgtcattgaagcccatgtgcattccacagtccagcatgacattcttgcccgcaatggagaccaggatgcagcttcggcccacgtcctggccggcccctactcgagggagggcagatgagtcactgctgcgccccccgccccctgtgctgcctccccaagctctgcaggaccccagtgcactgaggaaaccggacraagtctgctgtgtggacagacacatgggccaagaagcagggccacccctactcacaggaagggggacacaggggaccatgccccacaccatcatgtccagggtggaggctggcagcccacacgccctcccccgccagcttcccctggcctcttaaggtggccacggcctgctggctaagtagtgggcactgtgctgtggccctcagcctccaacagagacaacggctggtctgtggggccaacacctcggtcagagtcactcctgggctgtggctggacccccagcagagctgcaaaccaatgaggccaccttctccaggatctttccccaggcaggcaaggcagtaagtgactaagtgctggcactgggtgttctctggtggtgcggctgtggaggggcgccacacagcctcagccatgccatagcgaacacggtgccagtggtccagcagtggccagcgtggcaacacgagcctcacaccactgcacaccatgcagcccccaacacagaccctcatctgcagccctcccacactcctgacagccaagcagccctgcccagctgctccagccagaggccttggccagccaaggcacactcagccccctcatgtggcctgggggcccgagaggaaagggtcacggcccctgcacagactgtgcctgggcaggagtctgatggcagtgaacagttttccccttgaatcccacccacctccccctgccagccactcgaagtgtccaaagccagcaccacacatcaggatgacggggccacagccgaggggctgcctgccacagagaggggatctcaggttctcttccaggcctgttcctgcccccgctgggtgtgagctctctgagagcagggtctcagctgtctcctccctctgcatctcctaccccaagccacgccaggctcacagaggccctctggcacctgtgggaagggagggccgcccctcttcatgcccagggacctaaggccacagaggcacttgtggcacacggccccgaggcgtggggcccgggctggttttctgaattccaaagcccagtcctgaagtactggcagtcccgcctcccgacaggacccacagtgatcccaggaaggaaagtggaaaggtgcgggaatagagcctggagatacacgaggggacagggctcagaagacaggaggagatatccctrtcagcaaggagacagacggcagacaaacaagacacccaaagcacgccagacgraggttactatgacagaaaagagcaaggtgagagaatgaggaagcctcaaaacttccagaaccatgacaggagactgctccgwgaagccaacttttgagcaggggaggggaggggtagggtgggggagggggagggacggggtggggaagggatggtccaggggaggagaagaagcggggcgggcggagggaggacaggcagcagggagggacaggcaggggggagggaagggaccagcagggggagggacgggcagggtgggtggggggacggccgtggggagggatgggcagggtgggtagggggarcggcggcgggggggggtagccacacacaggccaaggcgtgggagtgaccccaaggacacagcagtggtccagtgagcgcggacacggagcccgaggcagtccctggtgcagggaagcggtgcaacaggacttcggctttgatgataccttggctgaggtgaccttgagaatatacccaggtacagattgcgggtaattgaagccacatgaaagatcagaaagatcagatgtccagagagtgggcagaacaggcagccaagaggccaaatgggaaaggggcaggctgggaggaccccacggaggacccagagagcaggggagggcagtggggcccatgcaaacagctgcaaaatgccatggggtgtgcacaggccaggggtgttcacagcacagtgtccacaccggggcggggggcaccctccgaggaagcgctcacgccatgggggaggacatggaatcccgtcctggtgtctgtgctggaaggtgccctcgaccccctgcccggtggaaggaccaggttccaggacagcacagggcaggcacctgtggaaaacgctaaggacatcaggatgactggccaccaacaccatgtccctccagctgtttctgagaccctggattttgactaattttttccttcttcacatcgttctatactgttacgactttgactttcttttgagacatggttttgctgtcacccaggctggagtgcagtggcacaatcatggctcactgcagcctcaacctcctgggctcaagcaatcctcacaactcagcctcccaagtagcttgaaccacaggcacacaccaccacgccctgccaattttagcattttttttttttggagtgatggggtcttgccatgttggctaggttggtcttgaactcctgggctcaagcgatcctcccacctctgccttccaaagtgctgtgattgcaggcgtgagccacagtgcccagactgtcaggacttttaggagtacatatttgcgttttttgctatttttttcagtgttgcagaaatcaggtagaacaagagctaaagtgagagttgattgtaactcgggcgtgagcacacagagtggtggacagaaagcaagacgtgaggaggcagaagcggggctggggggctgaggggcttgcggggttaaggggcttgggggctgggggactggggggctgaggggytggggggctgagggtctgggggtctgctgggctgaggggctgggggactgaggggctgggggactgagggtctgctgggctgagggtctgggggactggagcgctggggggctggggggctgatggactgaggggctgaggggctgggaggctgaggggctggggagctggggggctgagggtctgcggggctgaggggctggggggctggggggctgaggggctggggggctgaggggctgggaggctgagaggctggggagctggggggctgagggtctgcggggctgaggggctaagggactgaagggctggtagggctggaggcggcagcgcgcggcacggggaggrcaaggcaccgacgaaagcgcacagcgagcgcgaaggccccgcggccccatctgcgacgtcccctcacggccgcctgaacctcggggctcgcgttctcgcgtcactgccggaggcccggggtgcagggactaggccgcctctcggctcccaccagggcccgcgcggggaggagaccggaggacgcccgcggcgcgcacctggctccacgagaaacgggagggagcggggcgcccagcccgcccggagccgcatacggagcccaccccackgccctcccggcggctcccactcacccaagggcgtgactctgatctcaggcatcgtctccgccgcgctcccggacccgcgaggcccgcctgcmgtgatgcactgcgcaggcgcaacracctcgctgcaacttccggtgcgctagccggaaacgcgggtcggggcgccgggcctcctgattgggcagcatccaaccaatcagggcggcgggcgagggcggggcgagggcggggcggtgggcggggacggggcccgcacggcggctacggcctaggtgagcggctcggactcggcggccgcacctgcccaacccaacccgcacggtccggaagtcgccgaggggccgggagcgggaggggacgtcgtcctagagggccggagcgggcgggcggccgaggacccggctcccgcgcaggacggagccgtggctcaggtcggcccctccccaacaccaccccgggcctccgccccttcctgggcctctcggtggagcagggacccgaaccggtgcccatccagtccggtgccatctgaagcccccttcccaggtgagactcgtagcgctcgctcgacagggtctggtcccacccacaaggcctggggcgccgtggggccccgtctcctgctggccccccagcctgctgtcagcccccgtgctctgtgctcaggccgccytcgcgcccggccctgaccttgggccgttgggctgccctgggaaaggcctggaggtgtcctgggtcaccttcctgggctggcaagctgcctgyctcctgcacagccactgcccttcctgttgttcccgagccaccagccacagctctgagaagctcctggcagcttctgtttgccactggctcgaatctgggcaggaaggcaaggcycgcagaatatctggtgaccaagaaggaaaccccagagcctcagagaccatcttctcagtggacaaaattaaggcccgaggaggggaggggcytgctggaagtctatgggactgcatctttctgaggcccaggagcagccatcccccacacctgaagcccggtgagctcacatctggggcctccgcctggtgccaagcatgcaacccaacctgtggggcctgcaacyccaggcttcagcaccctgcaggcaccagtgctccagcagcctgggccacgggctgggcagggcttgcagcccatgatccctagtgatgaagggcccagtcctagggtgctgagcaacctgcccacctgctcctggccaggagctctcaccacggctgggtgcccttccccctcccccaccgatggagtccctgcagccagggaggccaggacagggctcccagcaccaaccggcctaggaacccccaygccctcttcctggtcgaggtggaatgcagctgactctcaggttccccagagcaggtgcgggcccgtggggcacccggggagacagggcaagggtgcttggcaacactcacacaaagcatgggtkcctggatgtctgtggatctgtggagtgactatgtgaatgccagcagaatccaaagcagggcctgggccactcgtggaaggctccctagggctagtacaagagcctcgtggcaatcttctgagtggtaaaacccatctgtgtgggacatggagtttcagcaacaggagtgaaaacacgtgtccatccatccagcaagtgccagccctacagcctcttttctgcttttggggatgtagcagtgaggaagatggggcagcctgcccggcagcatccccccacccccggccccacctgtctctgctttctgctgtgtctgttttcttgtctaggacttcagaacttcctgtctttgttgtcatctgaccccaccccagatggctgctcgcactccccatgcacccagatagatgcctaggatggtgcttggctctcggcaggggcttagtatttctccagctggtaaaagcagatacagcatctagagagagaaacaaaaacaagaaagcaccagcagagacacctgctgcagacagcggggyctagtggtctgataaagccagagggggccactctcggggtcagggactgacacggagtcagtggcctgatccacaggaggggctgtgccaaggtccctgaatgcgcaatcctgatgaagggtgggtcagggtggtgtgcctgagagccygcggcttggctgggagcagagccaggcagctcctgggaggaagctccatgaggggcatgagtgttcagtgagcggcaatgggatcgcagctattttgttcccctccacacacagaaaatgagccacagagcaagctgaccccagcgacacagccccccagccctactgtatttccgttcctatcaaaaaatggatgactcggagacaggtttcaatctgaaagtcgtcctggtcagtttcaagcagtgtctcgatgagaaggaagaggtcttgctggacccctacattgccagctggargggcctggtcaggtgcgtgtgccagggctgcctcctgaggtgggcgctcccctggcccgagtcccatatgtggcatctgcctcccgactgcctgtccccaccagctttgctgcccgtttccagatgggtgtgagcccccgcaggctgggcagcgtcccctgcaccccaggcgggctgccccaggcctgggcgaggactcgagccccyctcccttccacaggtttctgaacagcctgggcaccatcttctcattcatctccaaggacgtggtctccaagctgcggatcatggagcgcctcaggggcggcccgcagagcgagcactaccgcagcctgcaggccatggtggcccacgagctgagcaaccggctggtggacctggagcgccgctcccaccacccggagtctggctgccggacggtgctgcgcctgcaccgcgccctgcactggctgcagctgttcctggagggcctgcgtaccagccccgaggacgcacgcacctccgcgctctgcgccgacrcctacaacgcctcgctggccgcctaccacccctgggtcgtgcgccgtgccgtcaccgtggccttctgcacgctgcccacacgcgaggtcttcctggaggccatgaacgtggggcccccggagcaggccgtgcagatgctaggcgaggccctccccttcatccagcgtgtctacaacgtctcccagaagctctacgccgagcactccctgctggacctgccctagaggcgggaagccagggccgcaccggctttcctgctgcagatctggrctgcggtggckagggccgtgagtcccgtggcagagccttctgggcgctgcgggaacaggagatcctctgtcgcccctgtgagctgagctggttaggaaccacagactgtgacagagaaggtggcgaccagcccagaagaggcccaccctctcggtccggaacaagacgcctcggccacggctccccctcggcctattacacgcgtgcgcagccaggcctcgccagggtgcggtgcagagcagagcaggcaggggtgggggccgggcccgcaagagcccgaaaggtcgccaccccctagcctgtggggtgcatctgcgaaccagggtgaagtcacaggtcccggggtgtggaggctccatcctttctcctttctgccagccgatgtgtcctcatctcaggcccgtgcctgggaccccgtgtctgcccaggtgggcagccttgagcccaggggactcagtgccctccatgccctggctggcagaaaccctcaacagcagtctgggcactgtggggctctccccgcctctcctgccttgtttgcccctcagcgtgccaggcagactgggggcaggacagccggaagctgagaccaaggctcctcacagaagggcccaggaagtccccgcccttgggacagcctcctccgtagcccctgcacggcaccagttccccgagggacgcagcaggccgcctcccgcagcggccgtgggtctgcacagcccagcccagcccaaggccmccaggagctgggactctgctacacccagtgaaatgctgtgtcccttctcccccgtgccccttgatgccccctccccacagtgctcaggagacccgtggggcacggaacaggagggtctggaccctgtggcccagccaaaggctaccagacagccacaaccagcccagccaccatccagtgcctggggcctggccactggctcttcacagtggaccccagcacctcggggtggcagagggacggcccccacggcccagcagacatgcgagcttccagagtgcaatctatgtgatgtcttccaacgttaataaatcacacagcctcccaggagggagacgctggggtgcactgggtgcctgatttcctgcagggggacacaggggcacccagtgagggtggggagggccctcaccccagggacacagctgaggtgggtgcacctaactccaagggagctgaggccccactgccaggctcagggggctgtgttagccccagggctcaacaaacaccctgagaaaaggccagccttgggggcagggctgctgtgtgcccattctcccagagaggtcccatcactatgcctgttgtacaggtgagacaagagagacacagagtcacccagaaccaagaggctgggttgggaggacggttgggagggcagacatccgcctctccatgcaaaagaggagaggcctgcgtgggatgtgtgcgtggaggtgggggccactcccagccacaacagtggcctggacagaaaggggatgcaattcagcagagtcttcctggatgtcacccccacctcagggtctgtgggagctgcatatggtgccggcaaaggctgccgactgcagtatgggccgggagaactgcctgggtctgcgtgggccccagggcagggctccctccgggtgttgccttctgtacaagtgccatgcttgtgccgtttgcgtgtcccaagtgcgagtgtgctatttgcgtgtgccgcacgtgtgccgtttgcatgtgctgtttgcatgtaccatgtgcatgtgtgccatctgtgcaatgtgcaggtgccagttgcatgtgccatgcgtgttggccgtgagcgtgtgctgttttcgtgtatgtgccatgcacgtatgtgctgcgtgttggccgtgcacgtgtgccacgtgcatgtgtgccatttgtgtatgccgtgtgtgctgtgagcgtatgctgtgcgcatgtgcgtgccatgcgctttgcgtgtaccatgtgtgtgctgtttgcatgtgccatttgtgtcatgcacgtgccatttgcgtgcgatgcgcgtgtgccacacgtcgtttgcttgcgtgccatgcatgtgtggcatttgtgtatgtgccgtttccgtgtgtattgtgtgtgccgtgtgtgtgccatttgcatgtgccgttttgtgtgtgccatgcgcgtgtgccatgcacttgccgtgcgtgtgccatttgtgtgtaccatgcgcatgtgccattcgtgtgcaccgtacacgtgtgccatttgcatgtatgctgtgcacgtgcggcatgcatgtgtgccgtttgcatgccatgcatgtgttccttgcgtgtgccgtgcgtgtcccatgcacgtgtgccgtgcatgtgccattcgcgtgtaccatgcgcatgtgccgtttgtgtgtgtgccgcattcctgtgctcgtgtgccaggttcgcatgtgcgccatattcacgtgtgctcagcatgtgccatatgcatgtgcggtggtagtgtgtgtccctcacaggtcctcctcacaacaccatggggaagaagcaccagccagggcacacctcctggtatctgctaggtctgccaggccctagctgaagctgagtgccccccagttcccctgggagggcctgcgcctggagtctgctgtgtccccgagggcacccccaaagcaacacagaggcagaggagtcccggccctgcacacctggtgctgctccagctgccgctcatttgcctgtggcccttcctcccttgtttgcgtgcccccctggcaaacaaactctacccccagcaggagccacctgtgtgcctgccacgcaggagtggcccagacgggggtcagcagtgtgagtacagctggccatgcggttcctacagcttccaggcgtcagactctggcagaagggctgagaccctcaaggaactctgctcccaagcagactgggagggcagcaccaccaccccagggccctccccagctgcagggtggaggcctggctggccggctgcccactggcctgactggtctgcaggcctagggggcccatccctgctgcccccggctccggccagcacagccttgagtgggagccagaagctcccggggctgggtaggaggcatttctgtgcttatgaaaagccccagggctgggtgtctctgcatccctcccacgcagctgagacctcagagccctggaggcccctttgccccctctcctctccacagcctgctgggcaactccaggaatcggggggtggcaaggggctcagccacaggcagggaacaaggccacggccagcgactgagcagagcctgcctgccggtcaacgctggccatagagcctggcagtggcctcaggcagagtctgacgcgcacaaactttcaggcccaggaagcgaggacaccactggggccccagggtgtggcaagtgaggatggcaagggttttgctaaacaaatcctctgcccgctccccgccccgggctcactccatgtgaggccccagtcggggcagccacctgccgtgcctgttggaagttgcctctgccatgctgggccctgctgtcctgggcctcagcctctgggctctcctgcaccctgggacgggggccccattgtgcctgtcacagcaacttaggatgaagggggactacgtgctgggggggctgttccccctgggcgaggccgaggaggctggcctccgcagccggacacggcccagcagccctgtgtgcaccaggtacagaggtgggacggcctgggtcggggtcagggtgaccaggtctggggtgctcctgagctggggccgaggtggccatctgcggttctgtgtggccccaggttctcctcaaacggcctgctctgggcactggccatgaaaatggccgtggaggagatcaacaacaagtcggatctgctgcccgggctgcgcctgggctacgacctctttgatacgtgctcggagcctgtggtggccatgaagcccagcctcatgttcctggccaaggcaggcagccgcgacatcgccgcctactgcaactacacgcagtaccagccccgtgtgctggctgtcatcgggccccactcgtcagagctcgccatggtcaccggcaagttcttcagcttcttcctcatgccccaggtgggcgccccccaccatcacccacccccacccagccctgcccgtgggagcccctgtgtcaggagatgcctcttggcccttgcaggtcagctacggtgctagcatggagctgctgagcgcccgggagaccttcccctccttcttccgcaccgtgcccagcgaccgtgtgcagctgacggccgccgcggagctgctgcaggagttcggctggaactgggtggccgccctgggcagcgacgacgagtacggccggcagggcctgagcatcttctcggccctggccgcggcacgcggcatctgcatcgcgcacgagggcctggtgccgctgccccgtgccgatgactcgcggctggggaaggtgcaggacgtcctgcaccaggtgaaccagagcagcgtgcaggtggtgctgctgttcgcctccgtgcacgccgcccacgccctcttcaactacagcatcagcagcaggctctcgcccaaggtgtgggtggccagcgaggcctggctgacctctgacctggtcatggggctgcccggcatggcccagatgggcacggtgcttggcttcctccagaggggtgcccagctgcacgagttcccccagtacgtgaagacgcacctggccctggccaccgacccggccttctgctctgccctgggcgagagggagcagggtctggaggaggacgtggtgggccagcgctgcccgcagtgtgactgcatcacgctgcagaacgtgagcgcagggctaaatcaccaccagacgttctctgtctacgcagctgtgtatagcgtggcccaggccctgcacaacactcttcagtgcaacgcctcaggctgccccgcgcaggaccccgtgaagccctggcaggtgagcccgggagatgggggtgtgctgtcctctgcatgtgcccaggccaccaggcacggccaccacgcctgagctggaggtggctggcggctcagccccgtcccccgcccgcagctcctggagaacatgtacaacctgaccttccacgtgggcgggctgccgctgcggttcgacagcagcggaaacgtggacatggagtacgacctgaagctgtgggtgtggcagggctcagtgcccaggctccacgacgtgggcaggttcaacggcagcctcaggacagagcgcctgaagatccgctggcacacgtctgacaaccaggtgaggtgagggtgggtgtgccaggcgtgcccgtggtagcccccgcggcagggcgcagcctgggggtgggggccgttccagtctcccgtgggcatgcccagccgagcagagccagaccccaggcctgtgcgcagaagcccgtgtcccggtgctcgcggcagtgccaggagggccaggtgcgccgggtcaaggggttccactcctgctgctacgactgtgtggactgcgaggcgggcagctaccggcaaaacccaggtgagccgccttcccggcaggcgggggtgggaacgcagcaggggagggtcctgccaagtcctgactctgagaccagagcccacaggggacaagacgaacacccagcgcccttctcctctctcacagacgacatcgcctgcaccttttgtggccaggatgagtggtccccggagcgaagcacacgctgcttccgccgcaggtctcggttcctggcatggggcgagccggctgtgctgctgctgctcctgctgctgagcctggcgctgggccttgtgctggctgctttggggctgttcgttcaccatcgggacagcccactggttcaggcctcgggggggcccctggcctgctttggcctggtgtgcctgggcctggtctgcctcagcgtcctcctgttccctggccagcccagccctgcccgatgcctggcccagcagcccttgtcccacctcccgctcacgggctgcctgagcacactcttcctgcaggcggccgagatcttcgtggagtcagaactgcctctgagctgggcagaccggctgagtggctgcctgcgggggccctgggcctggctggtggtgctgctggccatgctggtggaggtcgcactgtgcacctggtacctggtggccttcccgccggaggtggtgacggactggcacatgctgcccacggaggcgctggtgcactgccgcacacgctcctgggtcagcttcggcctagcgcacgccaccaatgccacgctggcctttctctgcttcctgggcactttcctggtgcggagccagccgggccgctacaaccgtgcccgtggcctcacctttgccatgctggcctacttcatcacctgggtctcctttgtgcccctcctggccaatgtgcaggtggtcctcaggcccgccgtgcagatgggcgccctcctgctctgtgtcctgggcatcctggctgccttccacctgcccaggtgttacctgctcatgcggcagccagggctcaacacccccgagttcttcctgggagggggccctggggatgcccaaggccagaatgacgggaacacaggaaatcaggggaaacatgagtgacccaaccctgtgatctcagccccggtgaacccagacttagctgcgatcccccccaagccagcaatgacccgtgtctcgctacagagaccctcccgctctaggttctgaccccaggttgtctcctgaccctgaccccacagtgagccctaggcctggagcacgtggacacccctgtgaccatctgggccccagagccaagctgtgtccctgtccctctgtgcccagaccaggcctgcccaggtaacccagacccactgttctggaaagaggcccggagggctcccagggtacccgcaacccacaccgtgagctcaggaaaaggacgcagggaggccccggccagatggctggaagcccaaatcaggccctgccgacctgaccatgtcccaccagggcccccatcctgcaccctgccaggcaccacagcagtg

SEQ ID NO: 97576 - DNA, 45996 bp, Homo sapiens
gtacttactaaatgctgaacactatgctaggtgtttcgtctgtagtatctaaaatatttataacagctgccgggcgcagtggctcacacctgtaatcccagcactttgggaggccaaggtgggtggatcacttgaggtcaggtgttcaagaccagcctggccaacatggtgaaaccctgtctctactaaaaatacaaaaattagccaggcatggtggcacacacctgcgataccagctactccggaggctgaggcaggaaaattgtttgaacccaggaggcggaggttgcagtgagccaagatcgcaccactgcactccagcctgggtgacagaacaagactccatctcaaaaaaaaaaaaaatgtatatatatatatatatatatatatatatatatatatttatatttataacagcttttcaaagtatgtattattatctccatttatcaggcaaaaaaaactgagtaaaagagtgtcctttgcccatcatcattcactcatttagtaaacatttattgtagccttacacaccaggacttacgctacatgctgtagacatgaggatgaacaaagctgataccactctgccttcatggaacttcttggtgggtagaggagacgatattcaaaaattattttacaacccatggcaagtgtaatgtagcctgaagcctatctgactgccctggattgaagccacctccacccttaccagctaagcaaccttgggcagctctgttaacctctctgcacctcatcttccttttctgtaaaatggggataatagtagtagcaactccataggggtgctgtgaagaattaaaaaattaacccaggcacacagagaagggcccctgcacattccaggcatattgctgctgctgctgctgatgatgatgatatgaaagagaggcatggggtgctcgtatgtgatagagcaggacctacttcaggggacatctgattgaggtctacaagatgaataggtgttaccttggcaaagtgtgtgggaggcaggggaggggagcagagtgttggagggatgttccaggcagagagaacagcatgtcaaagcatagggggcgggcttacctgaggaactgcaaggagtgaagctgaaatgggcccggctgggaagcaggagcctgtgctacaaacacagctccaggaccgggttctctgcaccacagtcttgatccaggccatgggagatgctcagtaaatgtttgtcaagtgagcgagcagctcatggacaaacggctatgctgggcccacatggttctgttgtcacccaagtccattgtcccatatacagcatgatatgtagacagccccttcccagctgtcacactgtatacatccatgttttggtccctcttttcttgacagtaaactaaatcctgtgagtttgggtgcagacctccaatatctgggactcactgaggtggccgcagctagaattcccatgctatagccagggactcagatctaagccaatggtattcagactctttagtagcagaactctgccttgaaataatcttagcagaaatccagtatatggtacagggacaggcagagcttctgcccttgaggggcagacatagggcctcagcccctgtgcacctgagaaaacactagggctctgtaaagcacagttagaaaaactagggttgaacccaaaccccatcttccaggtggggaaacttaagatccagagagggagtgactctccggagtcactagggacagacccagaactggccccagacatctggtatcaattctgctacaccaagattttccggcacttcgccctaactgcccccagcccctctcatcgtgcagggagtcttgagatggggtgggggcacatggatgtggtcttgtcaagagtctagcctccagccccagttagggcatggcccacatgagacaaaaatccacagggcaggcatgggtgggttgctcagggtcatggcctggttatgccatgtctttttttttttcctgctgctgcttcttttttaattgagtttgaggtggttgttttttgtttccttaagaaatggaaaagaatgaagctgcgtaaatacaactatattaactccctggaaaacctcctgccattttaactctgttactggagaaataaaagagaaataatttgtccacccacacttagctctttctgacgaaggtaggtgaatattgctttgctaatcgagggtgactgctggaagtggagccacgctgactgatcccagattgagaggcagccacagccaccccaaaaggggtggcagagccctgcctgtggacagggccggagtcatcggcccgcatggcccatcttccacaggtctcccccagccgatagtgatggaggcactggacgaggctgaagggctccaggactcacagagagagatgccgccaccccctcctccctcgccgccctcagatccagctcagaagccaccacctcgaggcgctgggagccactccctcactgtcaggagcagcctgtgcctgttcgctgcctcacagttcctggtaaggatggcacaggcctcacaagggtctggagagagggtgggtggagggccagcctcccacttcctccccaggatggccacctggaaggcaggaggataaggggcctccctggtgttcctcaggagctccaagccctcaaggctgggataaggggaaggctggaattctgagctaccgcaccagcatctgagacctcacaccctgcctccctaacctaagaatccagaacacagggcctccccgacccctgagctcccagccgtacagggttctcctgagaactcctgtctgtggaggcctttctaggagactactcttttgatgtacatatttgtgaggtcctctctggaaagggctttctcttggttcccttcagtcagcttttctccaaggagagtcctgaggcctccccgggcacgcagcaccggggccctgctctcagctgcccggtctggaccttagaggttcaggagcctccatgcagggccaggttgaggctgcaggtgagctctgctgggggaacacgggggaagggggccggctccatactcagcctgctcccctgtgccccagcttgcctgtggggtgctctggttcagcggttatggccacatctggtcacagaacgccacaaacctcgtctcctctttgctgacgctcctgaaacagctggaacccacggtaagtaagctttggggagtcctagggtagcagggatctgttgggggcctctagtcccaccctccccaacctccagattgggcttctctgagttcagaagatacttccaagcccctgaagttcttctgcctgctccccatcccagacctgggacgtgattttcagaatcttggttttgtcatcattgcaagagctgagaactctgcccccaccaccaccctgacctgtttatctgatgttccccaggcctggcttgactctgggacgtggggagtccccagtctgctgctggtctttctgtccgtgggcctggtcctcgttaccaccctggtaaggcgcctcctgaccccaacctcaaggctgtcctcctctgaccttgaggcctggatttctaccagctcccatctgacttataggctggacattctgggtggggcaaggagggatacctatctctttgcacaagtgtgccagcctggggcaagagcctccttctttccgaaaattggtttgcagtgatctgggctaaggaaaggggatgagacagggagaagactggtgtaggaactcccaagccccactgagaaggcctgaagccacaagaaacagagagctgggagagggaggggcagggaaggagagtgggcatggagcctcccatcgaggccaggggcagtgccttgtggacaactcccaggagagcagagctgctctagacacactgagggagtgggggggcgtcaatcccatgggcactccaggaacacggggggcagccagcgtggtccgaaatctgtgatgctgtacaccccaaccaggtgtggcacctcctgaggacacccccagagccacccaccccactgccccctgaggacaggcgccagtcagtgagccgccagccctccttcacctactcagagtggatggaggagaagatcgaggatgacttcctggacctcgacccggtgcccgagactcctgtgtttgattgtgtgatggacatcaagcctgaggctgaccccacctcactcaccgtcaagtccatgggtctgcaggagaggtgggaggggtggaggaggggtgggctccacgggcccttgagctcttagctcctgatcagaagagtggatgcctgactctgactcctggtgcccagggcagagctggcctcatagcttagccagtgtagacatgtgctatccaggtcattcatagagatcaaagtgccccaagatgaatgctgagaaatactgttactgcacacgcacacataggtgtacacatgttcacacacactctcccatgctcaagtaagtttgggtggttttctttgctgcaggacttgtcagggcctttaacatgcttatgttcattgtaaatcagcaagggggcagtatgtggcatttcccaaagtcacttgaccacggaactctatttttttgttttacttttattttggattgagggggtgcatgtgcagtgttgttacctgagcatattgcataatgccgaggtttggggtacaaatgatcccatcacccaggtactgagcgtagtgcccagcagttagtttttcatcccttgcccgcctctctccctccctcctctagtagtccccagtttctattgttgccatctttatgtacctgggtacccaattagaacctgtttttatagggtagctcatagtgttccacagagcacactttgagaagtgtagacaccctcgtttcagagtctaggtgggtgagccagatcacaccaaatttgagttacccatgtgatgtcacagaaagaacactgggtgtggagtcaggaaacctagctttttgtttcagctctgccacccccttactgggagagcctggacaactcttggcccttcatggggactcagtttctctttctatgtaatgaagccccatcctgtcctgtgtctgagactctgagtatagtagagtttgcccattgtagacatccttgcggccaccgtgctgctcctgggactccctccttcctgacagcgggggtcctggcctctcctggacaatatgtccttgactcaccagcagcctcatcccagggctgttgggcccgggactgcagtggggagggtctggagccatcctctcgggcccaagccccgcttctgtgcttcaggcaggtgtcccctctctgagcttcctggggaccacagggtagaacttcctccaacggtgatggaggagagtccagggtaaggccatgttggggtagctttggatggaacttttagaactggagccccaaatccccactaagttaacatctccactgcaggaggcaggagatagggagtcaggccaatgcctcagggctgagattcacgcttctttgtcagggggtcttgtcacactcccactcctcttcctcaaccccaccctgttcccagctgatctctccctccctcattttcccagccctggagaccccagctcatgcccgtccctctgcccctgaggctcacactccctttcctggtccttccaggaggggttccaatgtctccctgaccctggacatgtgcactccgggctgcaacgaggagggctttggctatctcatgtccccacgtgaggagtccgcccgcgagtacctgctcagcgcctcccgtgtcctccaagcagaagagcttcatgaaaaggccctggaccctttcctgctgcaggcggaattctttgtgagttcccttgagccggtcgccccactgtgtgcagacccatgtcaatcatccacctgcccaggtggtggagcgtggtgcctggaactcagcatctgcagtagattagtatcactttattatcagctctcccaccatcttgggcaagctgctttccctctgagcttcagtttcctcatctggaaaatggggatgaaaataatagaattgttgcaaagattaargagacttataacatgtgcagagcacccagccaggtgatggaggtacagtgacaatgctaagtctttattgcccagtgctgtgctctgaaagccacagagaaccttcacttctaactcttctgttttcccactttcctcctgccgagcattgttcttctgcctttgaaatctctctagtggcctcccctcgttaccacccctggggccctagcttaggtcctaatcacctccaccctggcttctgcagcagcctccagctgcctcctattggactttgaggggctcaataaatggcacccctgtttacctgcctgagtgctcagccagttaagagctaaggcataggagattacaatatcacctttgttgtcaataaaatacaggttggaaatgtggcttagcagggtacagcaagagtgagcctcccgatactgagacccagaattacatgcactttccaccctccacaggggtgccggcacatctcggaccttgccgcatgggggcacccctataattctttcctggcaggagggccctgagaggaggaggaaggaaggggctgaggctccaaagctccattcctcaaccaaattcaccaaacaggtaactcctcacttctgtgagcaggaaaaggcaagaggccaagagtatctggggtgagttcctcctggtagaagccacaggggtacagaagcaggtgcctcctccctcatagctcccttcctttggcctccgccctgggcctgtctggaccgggtagctctcccctgtgagaagacctccatcatcatctgatctgctgctccaagttctccagaacttggtaccacctgcatacaccatcagcaccccttacctcgtgtggccccagcctccttttccagccttatgccccatgccccacccctgcagggactgtcyacttcaaactgggccagtctcgtccgtgcctttctcctcctgtgcctttgctcacatcatcactcactccagatgcctctagaaagccttctttaaccaccccagcctcagctccttctctgagctcccactgccatcatctccccttcgagaaagaatcacatcctctacctcatttcctgtccggtgggtctttgttgaggaaggagcgtggcctgagcacccactctgggggcagttttgcacgtgttgtatttttattttgattttcacaatcctggaaagtgtgatgatcctcattttacaaagcccatacttagtgtgtccaaaaacaatgaacagtgtgaagttaggtgcagtcaggggctaagctggtggacagactggaaggaaatgcagaggcaagaggcatggagagtcatcccggaagatgtcaggaggagacagactcataggtgaactttttttttttttttttttttgagacagggtttcactcttgttgcccaggctggagtgcagtggtgcgatcttgtctcactgcaacctccgccttccagttccaarcgattctcctgcctcagcctccctagtggctgggattacaggggcccgccaccaggtccagctaatttttgtattcttattagagatggggtttcaacatgttggccagggtggtctcaaactcctgactttgtgatccgcctgcctcggcctcccaaagtgctgagattacaggcgtgagccaccgcgcccgggcagaggtgaactttaaagggtgggaacaacttggagagatgggggtaggggagaccagygccctcaggaggcagaacgtcacaagctcagactcagaggcaggactgagaacagcagattaacaacaggggagaaacaggcctaactggaagtaaagagaggccagattcaagaagccctcacatgccaggagagaagttcagactcagagctctggacacagacagtggttgggaggtgcagatattcctgggatctcagaaagaggcttctctccttctggagaatcagggaaggcttctcagaggaggcgggacatgagatgaggatggggtgtgtgttaccacagagcaagcagcacgaacctaggtcccgagatagggatgcccagggaggaatgctgcccagggagcatggaagaaggcagccattggccaggtcactttttgtctttttcttcattcatcagctatttattgactgtctatatatggcaggctggctctccataaacaatagtcattatcatatttattacacactcagcatgtgccaggcactgttctgaatgcgtcgtgagcactaactctcttaatagtaaatgtttgttgaatgaatgcgtgcactcaagccagcccctgggctaggagttgggggcacagcagcccctggattcaaacatctgtgagggcccatagctgctcacaccccgtgtcctccttccacaggaaatccccatgaactttgtggatccgaaagagtacgacatccctgggctggtgcggaagaaccggtacaaaaccatacttcccagtgagtactcactgtcccagagggatgggggcaggctcagcttcacctggggatcccctcaccctgaggaggaccctcagctgggcctcyaggggtgacaggactggaggaggtgggacagagggctgggggttgctggctgaagggaagcgctgccctggtgaggccagaggcgagtacrtttcctcgcacagcactctctggtcctttgccctgcctggccacatgttgtgctggaccctctagaaacccaaagagaaagggtggtaatgacagcagttcctagccacactgtggtaaccgaaactcttttcagagtgggcagattttaaggaaaggaagttaaggcttagagaggttaagtggctcacctgcagtcccacagctaggaagtgcagagctgaatttcagacctgggcctctgtgatcccagagtcaggctctctgtctacactgtgtggagtgtggtcgaattgtaagccctctaacagggacatccactcccacaggcaaatgagttgtctctgtcagggagtgagctccccattactcagtatattcaagtgaggcggcacgagcagtcccctagaaggtctgaaaggggttttcctcctttgggggcagttagaccaggtgacctgatgctcctctttcagccctggggtatcattttcagataacttttatcaagcctcgatgagcctgccaccctcgccaagttctgaccccagtccccagggctagcttgggcgttgacttgttgaaagtgaatccccataaacctactccattcagtttgtggagtagcgaggcttttaaaaagcagttttgccatcagcatctccaacaacatgtaagatgtcatgacttatttttaacttttaaaatatcgacttgtagttgctatggttacacagtctctaggtagttccggttaaacaaagagccatttaaggccaggatgcattattcagggatgctcacctcttccctcgwcttgccctccccgatcccagccctacctggagggagggactcgagtatcctagaaccttggactttgctggctgctcagaatggccactgggggaaggtgggagcagactaggattccgtgcagatgcagtccccgctgcattccaagaggcttgagctgcctccaaccatgccctgagcctccaggcccccgagcccaataaagaatcttgtctgtgtccagcaagaatggagcctgtgccctcagagactgggttggggggtgcagagggcaggtgaggctgagcagaggctgcctctgagatccaggacgcgctgaggtttgttctctcattcactgggcacacatttcctcggctcctgccccaggggctgaggatttagacataaataggacacagactctgtgcacaaggagcttccagcctagcgggggagagaggtccatgcacagttacagtcagagtgaacagtaacccacaggcagcattgagaacaagatgctgggagcaatttctgtccccttctccgccgtgtcccaagcatcaaagcagtgctgcctggcacatggtagacattctgcacctatttggactgttttaatttttgtagagatggaggtcttgctctgttgaccaggctggtctcaaacttctggcctcaagctgtcctcgcctgcttcggcctcccaaagtgctgggattataggcatgagccaccatgccggggtctgcacctatttgaatgaatgaatgaataatatctctcaaatctacatcctcttctccagcctcactgccaaatgatgtttttgaggttagggctttcatgttgtccaattccaggggacacaatttacatagactacattgacataagtgccccctggagccgtgccaggctggacagccctgtgatccttgacacttcttacttggatcattgcagtaaacctctaactggtcttctggcttccacactctcctctccatcttctaccattgtcaccaaaatgaggcaaaacaaatctaattgtgtcattctcttccttaaatgccatcattgttgtcaccctygtaatcctcaggtttaagtccagcttttttttttttttttggggagacagagtctcactctgctgcccaggctggagtgcagtggcacagtctcggctcactgcaacctctgcctcctgggttcaagcaatttctggctaatttttgtatttttagtaggaacagggtttgactgtgttggccaggctgctctccaactcctgacctcaagtgatccgcccacctcagcctcccaaagtgctgggcttacaggcttgagccaccacgcccggcctaaatccagctttctaagcctggtttataagaccctttgtcgcctggttcctctccagcctcaccactcaccactccctaccctgcactgtgcacgtgaatctgacagaacagcattgcctgcagacaaggagaagggagacggcccatacagagcttcctgcccctctctgctgcaggtcccccaaaagcccccctcccgtttaccctgtctcctctccatccctgccaccctctacaccccctcttcacaagaactgccccaaatcacctgccaaaaccttagacattggggttgggctaaagaggcgaagcttgtgccctttacctccccaatttctcctactgggtttaggatccttctttttatcctttaacttgtggaacttgtaataatgtcaggaataacagcaactgatacttcgtgttggtcctagttactggcataaggactctagttgttaaagttaactcctttacaagataagcaaggtcaytgtggaatgaccatccccagattacagataaggcacagggagataaagtaaattgtccatgttgacactgctagtaagtcagaatcaggatttgaacctagcctctctggctcagcggtgtagactcttaatgactcccctatactgcctgtgagagcctcctaatgtgcacactggaagtgcctttagtccagtcctccctattataggaaagaaactgagkcctggacaagtgagctgatgacaaaactaaaccagaacccaggaatctggggccccagccagcttcccccttaccccatacaacctcagtcttggcctctgcaggctgacagaatagtcaatgcagagaggctgtagctggaacaaaacaaaatctactccaggaagaagagcagagtgggggctgggcacagtggctcatgcctataaccccagcacattgagaggccgaggtaggaggatcacttgagccaggaattggagaccagcctagtcaacatagcaagacctcatctctaccaaaataaacaaataaaaataaaaaaataaatttagccaggtgcagtggctcatggcttagtcctgcttactcagggggttgaagcaggaggatcacttgggcccaggagtttgaggcggcagcgagccataatcgtgccactgcactccagctgagtgacagagacccttttactatgggatttgacatgtgaataaattgaaaggaaaaaaaacctttttgcatatgtggacatgaggctgagaccccacagtcttaatccagatagaggagactatcgttttcatgttaatagcctccgtcaactttctactcccgaatcttaacagccctttatatttataaagcactttacagtttacacagaactttcacatctcttttctcattcatcttcccaacagcccaagcaagtaggcatctttgcctccatttgacagataggaaaactaaggcttagaaaggccatgtgttttacaagcctacacagcaagtcaatgacagtgtgtactcaagctagctgtctcttgctgaacaagatctgtacaggaatttccctaggtaattccattgttgacttagctgtctcctctccagaagctaagatgcagtgagtatagggcaacttaagaggcacaggctaaggatagagacagaggtagagacccggggacccccctctctctccaccctcctcctcatcctgagtcctcacctacaaaatgaaccatgaatgggtcaatgttttgctgctgggcaagggaaggaagaactgctaatgtcgcagaagaagtgtgggtatgctggaataggccagagcaagtgggtcctgcaccagagggcccagtttccagccttacttgtctcccaccaccccagaccctcacagcagagtgtgtctgacctcaccagaccctgacgaccctctgagttcctacatcaatgccaactacatccgggtacgtattcccaccctgacggcctcttgctcaaggggaggcctgagtcgatgggatccatcctccagccttgtccctacaccagtctggctcctgccagctcctgtgaagagcctgagtgtggggatggggtcctgggagcactgcctctgaccctgacagcctggacttggctggccgcagggctatggtggrgaggagaaggtgtacatcgccactcagggacccatcgtcagcacggtcgccgacttctggcgcatggtgtggcaggagcacacgcccatcattgtcatgatcaccaacatcgaggagatgaacgaggtagggacccccgtccccattctaagtgtctgctacattgcgccctacactaagtatcttgttctcaaattaatctttatgacaatctcaagaggtcggcggygttcactccgctgccaagatgaggagatgtgaggctcggtaaggttaagtcatttgccccgggcttcacagatagaggcatgcctggaggtggcctctccacttccagtgcccgtgaccttaaacacagcactctgctgcctcccagcctgccaggacagatgttggctactcctgtacccataagggcccatttaaccgaatctccataaaagtccttcagatgggtagcacttctgttttccagaggaagaaactgagactcaggaaacggaagtagcttatagagtttgcagctgagatttgaacccaacactctgtagcagcaaccctgttgcccttgtgtatctctccgctggccctgaagagagtgtagagagttgtgggaagggaacaggattgtatggcagcctgatctgggcccctgcagaaatgcaccgagtattggccggaggagcaggtggcgtacgacggtgttgagatcactgtgcagaaagtcattcacacggaggattaccggctgcgactcatctccctcaaggtgaggcctggggcagggctgggtgaagctgaggatgagtgtaggggcttaactgggggctccacagagaacaggtcccccaagtccactgtaactgacataaaagccagtgtcactcccagattttctgataattacggatgagtgagaggtgaatggacttgggagccagaggtagaatcaaaccccttgcatttcccagtcctcagttacatttcatgctgttgggctctctctgtctctctactctgtcattcataatgcattctagctatgcttcaaatgtacccaaggccaggactgtctggatgaggggacttcagcagcctccagcactgtgcttataattgagggttcatcatgactttgagatcctccttagaaacatctcttcacctgggatcctgggcttctgrcctgtagtgcccaatctgtccacaagagggcaggcactctttgctgctttggggttgtacagggggctgtggttacagaaaacagcaagaaaaaggaagacacacaaaatatgagcaatacaaaacagcccagaagagtgggagaaggtatcctcccaccctgaagttgtgcttcctccaggatcagcataatagaggagactgttcctttgaaatcgggattagtggattctgtttgtgagaaataagacccatgtttagggaaggctgtaattgtaataaccccaaaggctggaagaggtgaaccaggcatcaggaagctgatgccctatccaggagcagccaaggaagttcattgatgctgacagccacaggggttactgagcacaagaccggagacttggccctctgagctgttccctctcccactgaataggggccaggtagggtgtcgagagcatctcagcccccaagagcagtgcccccacaagcagctctaagatccaggtcttgttggagggcatgaagggccaggaagtgaaaagcagaagtagtggtcactgtcacagccaggtaactcaggacttgagaaaatggcttcctgagtagaaattccccagaaagasaggctgagatgaggcagggctgctcaccttctcaatgccatggagatgatgagggaagaaccagggcatcttggagtttgagggaatttacttttgtccataagacattacgagcacctggcctgagcttggttctgggttggatactgtgaacacagagcttcccaaagcttggactctttccttgagaagcattgtataagatggtaagtactgagctagagataggtatatagaatataggatatgtatatcatatgatgttatattggatgaatataggatatgtatatcatatatgtatgtatatatgatatacatatcctattatacctatatataaaatatatataatataaatatataatatataaaatatatataaaatataaatatatatataggtgtgtgtgtatatatatatgtataaaagaaggacactctgccagctgatgtgctcagggagggcttcctgtacatggtggtgctgaatggggtcttgaaggataagtaagagttgaccaggggcaaacaagtcaggagaacattcccagtgagaaaataataaaagtaaggacatggaagatggaacacttgtgtgcatgtatgtgtgcacatgtgtttgtgtgtgctgctgagattttacctacaaaccttttggagtgtgggagcattgagtacaagtacgcaggggcaggaggtgtgtctggaagggcaggccctgtagcagttgtcttcctagccaggtgaaggactgaggagagtgggtcttattctgagagcagtgagagacattgaaggatgttgtggtctgctcaggctgctataacaaaataccatagaccaggtagcttgtaagcaacaggtttatttttcacagttctggagactgggaagtccaagatcaaggcaccgtgaccctggtgaggacccacttccagggtcatgtcctcacgtggcagaaggagtgaaagctccttttgtaagagcactgatcccattcgtgagggctccgttctcatgacttcatcacctcgcaaaggccctcccttcaaataccaccatgttgggatttggtttcaacatgtgaacttaaggggacacacacattcagtccaaagccacaggttttcagcaggagagcagcatgtccagatgtgtgttgtacacagactattttgactctgtggatctgagacagttggggatgaggcagaaatctcccacactcgagcaatgataaaggtcaaggtggcagtgaagcggggagtgtgaagaggtggtaaaacttgcagcactaattgcagcactaagatagaggcgagtcacgcaggcgcaggcgaggcacagcaagaggcgaagaagagtcccggggctgggttatgtgacaaagggatgactgggggaccatttgttaagataaggaaccctggagatagtaataaattggagaaggggctcttggcccctcttggatgatcctgaagttgttggggcaggaccaaaggcaagatccatgccaacgctgctgaccaacccccaaaaccaagctggctttgggtctgtgtctggtgccactgggcaatgtggcctagatggaagggtgaaggggtcccactctcagtgttcttcctgtgttcttcctccttccatctcatctctatctctgggctggtttgtgagctgaaagagttcacacatacctggggtgggcctctgtctcctcgacagagtgggactgaggagcgaggcctgaagcattactggttcacatcctggcccgaccagaagaccccagaccgggcccccccactcctgcacctggtgcgggaggtggaggaggcagcccagcaggaggggccccactgtgcccccatcatcgtccactgcaggtgggtcctcccagccagccactggagcggggcagccccccacccgctgggctgccctgcccctcaccccaccggtcccctcggccctcagtgcagggattgggaggaccggctgcttcattgccaccagcatctgctgccagcagctgcggcaggagggtgtrgtggacatcctgaagaccacgtgccagctccgtcaggacaggtcagcccaygggcgggagtggggacacacaagggagctagagccccgagcgggtagagggagagacccacatgtgcatgggcggggggtgaggggcagatggaaaacactggyacggactgatgggcagacaaggagtagcgaggacagctgggtagaggggcaggatccagacagtggggggccagatgaagagggaagaaaagcagagctggtggataaaaggacagaggccgaaagtggtaggacatgtcatctgtgtccctgataggaaggggcagagggtaatggttggcaagggttggtctctccaagacgcacaggggcaaggcctggcaagtgattgctactccatggcttttggggcacctcccacagcccatccctccacgaccctgcccccactgtgcatctctgccgkgcaggggcggcatgatccagacatgcgagcagtaccagtttgtgcaccacgtcatgagcctctacgaaaagcagctgtcccaccagtccccagaatgactgcgcttctcctacaaggttctctgggcactgcccagcctgagtctcggccctcacccagggccctgcctcgggtcctgggcctgctccccgcttcctccccttcagtcagctccctctgtcctctgtcagcctggcctgacccctaccctccagcattgctcttcctactgtacatattggggagtggggggcagggtcgggaagggacatgccaggccaggcctggggccccggggcctgacccacaccacgcagaccccgggctccagtttttaacgatggttccatcaatacctgatccagaatgtttccstgctacactttgtgtcctgctgcaatgtgttctgtctgtccatccatctctgccctctgtaccggacactgtgtctcctcagccaggaaggggtaatgagctccagcccctaagcaaccggacttgcctgcctcggcctcacccgcacttctcccaaaaggcagatgacggggagttaggcatggggagctccagaaggtcaccagagagctttcagctgagggagagttctctaggttggagtgggcatcacagccagggtggcctctgggtgtcagatgctctcaggagggtgcccagcctgtgaggcactggcaaggtagggggcagatggggcatggagaacccagaggatctaggccctgttggggaggggaggggagctcaaggtttgggtggggactcagcccagatctacgtgagacatttttctgtgtcactgtgggaaagccttcccagaagtctcactgcgtgttgctctgcgtgtgttcccatgtccatgcgtgtgttgagagcccatcaggagggcatgcatgactctttggcaacatgtattatcttggagccacgtgtttttattgctgactttaaatatttatcccacggcagacagagacatttggtgtctttttataattcgctcgtggtcattgaatagagcaataaacggagcattttgagcaaaactaacctcctgggtctgtgtgatttgcctctcccctccactgccttccttcctgtacttgggtctttgtgcccctccccagcatgagcacagtgagcttggcccttctgctcactggagccccttgtggagactgggagtatggagcgagtccaaatttgtaaagccaaactgggaacattctgcaggattctcacacagcctcagccctggccctgacacatgctctgggccatggggagcctcaaggacaggtgtggaaggcttccagggaaggcacagtggctggcaggtcaccatttccaacagatgtgccagagaagccaaggctagggtaaggagacattcaggtcacacccaggcccctccctgttggccaaactcttatcccatgttagctccacagatcccaacagcagctgcagcccagtaatttcccttgtaaggcctgggctcagagtagctcctcccaaggggcccagggaatctgcatgtgggctgagatcctgagccatcctggacactcctgctctattcttgtcccctgcccccctgggatggagcaaaagtagccatgatgccactgctggcaggtgggggtcaccccagggcagaaggaggggtccagggcaagggtgctgaccaacaagtccttacaagrtgccagaaccttgggtgggatccagggtccaggcatgcggggtgtgctacagatgatgagaaaacaacagggtgggctggacacggtggctcacgcctgtaatcccagcacattgggaggccgaggggtggcagatcatgaggtcaggagttcgagaccagcctgaccaacatggtgaaaccccayctctactaaaaatacaaaaattagccgggcgtagcggtgcacgcctgtaatcccagatactcaggaggctgaggcaggagaatcgcttgaacctgggaggcagaggttgcagtgagccaagatcgtgccactgcatccagtctgggtgacagagactccatctcaaaaaaaagaaaagaaaagaaaacaacaggtggctgaagcagcccagatggaagtccttgagaagaggtggccatactctccagtcaccctcaagcagagacctccccacaacccccggaggatgggccctcctactcttctacccagattagggagattgggctgttgaagtgggaagaggaaggagacctaacatttccctgttcttccccagggtggccttgtaaasatactcaggctgtgtatgaaccacacataggagtgcaacatgaatgggaacccctggatttgtgtagcaacgcagcagatcccagaggccctccccagttcaccgtgtcccagtccctggaaaatacagacctgttgctttgctccctgagccctgctggactatgcatgcacctgtacctgagtgtgtgccygtgcacacacactaccctgagcccctcagctcagagaggtccyacccagcagcagtgagagccaaaacctgtaccacaagggaacaraaaaagtacccctggactgccaccctcagcctccttcccgcctggccttcagtgtttcccccagcctggatccagctttgcttcccgcctcccttctccaccgccctccccctccccccacaaccaagcagtgtgccatctagctgagacagctgcagagcctgactaaggaatcgcccccagggggccagacatttaaggaacagatgacactggtagcctcactgttggggcaaaggaagaaggagacgggccaccctacagtccaggcactagctgagcctccaaagccgtggacacagcattcgagtgttgggagggactggtcagtgctgaaggtaaggctcccctcctccctcaggaaggggacaaagctgaccaccttctgagcccagaggggactatagggtagagggcaggaataggaacaggggagtagtctcagaacccaaaggtagaagcagcccaggcagagatatattagggggtggagagagggaatagagtttaacccctaactacctgggttaaagaaggctttggagccctctgggacgccactggactggagtcaaaagctaggagtctagtctgagtgaccttggacaggtcatttctttcagacatcagtttcctcatatacgaaataggactttaaaaactgcaatgctgggccaggcgcggtggctcacgcctgtaatcctagcactttgggaggctgaggtgggcggatcacgaggtcaggtattcgagactagcctggccaacatagtgaaacgccatctgyactaaaaatacaaaaaattagccgggtgtgatggcgggtgcctgtagtcccagctactcgggagcctgaggcaggagaattgcttgaacctgggaggcagaggttgtcgtgggccaagatcgtgccactgcactccagcctkggcaacagagcaagactctgtctcaaaaaaacaaaaacaaaaaaactgcaatgctggccacatgcagtggctcacacctataatcccagcactttgggaggccaaggcaggcggatcaatygaggctaggagtttgagaccagcctggccaacaagatgaaaccctgtctctactgaaaacacaaaaattagctgggcatggtggcacgtgcctgtaaacccagctgctggggaggctgaggcaggagaatggcttgaattcgagaggaggaggttgcaatgagccgagatcacccaaaaaaaaccgcaatgctggttaaataaaacattgagaaaacatggtgctctgaacaggaatgaggaaacgctatcatctggtatggaaaaaatctccaagacacattaaatgaaaaaagaaagggtcagaatagtgtgtataatgggctaccttatgtgcttttttaattaaaaaaaaaaaaggaagatgataagaacacatgagttttcctatttgcatgatggaggtctagaaggagcctagagactggctacctgttgcaatggggaaggttgtaagatagacgcaggagtgggagggagccygtccatatggatttttatattgttttattctttaactatgtgattgaattaccagttcaaagaaaaatgtaagaaaaactaaacctttgcctttaccatgtcgcaaacacaagcagaattgtagtgatgttttgtcatctgttttagcattccaccagtgccggggtccccagggcccaggaataagagacacagcttccttctaaagcccactccagtatggcttagtcaggaagttctttcttaggtctgactgcattccctcctgatgaaacatccagcactgcctccttagtgccatgtagctatcaataggtatcctcaactccctccaggccttacttggttggctgggtaagtctaagccctataacctctccctctgagaccctggaatagtttggagttactcagtgagaggacaggcctattgggtctggtaactaaccaggaaaaggaagctaggaaatgaagaaaagagagctcgactgctctcctggccctctcctgtgtgcttccatctcctcttatgtctgaacacacacataacatctctgaatctccctcctactccctgtcttgtccttcatggcctcatcctcttccccagtctcacaggtgagtgcccacgcctgctgtcaccatgacaaccattcacagccggcagatgctgcaggagcacgtgtccatggagttctccagctccaccacccacgtgcagaccttctcccagacaaccaagatcgtgggaggcaagtggaatgggggcagggaagggatcgggaagggcagctattcttcctccacacccatcccttgggtggccccagttttgccactaatgggcccctctggagcccacaataccaacagcaacccccacccaacgtgtgcttctaatcttggctttgttaaagcttcagccagctggatgttcaacacagatcagatctccaggaaaacagcttagaaaagatcaatcatgtggatgtgtgtgaatgattgataaactcttaattgctgaaggagatcagagccataggtgaacagattctatctccaaaggtagaattycaggcataggggaaattaggaaggtagccaccttatctacatatcagtaatgctgaccctgctccacttaagaaataggagacttggggctaccagtggagaaagaaggtgaacacataaacaagaaggtgaccttaccttccaggcttttagccctctggggccagacttggaaragggcagatccaagggaaagctgagaaatggtctcagagctgaacagagtgttttagtcacgtctctagtggaaagagattaaaagatggccgggggccaagacattggataccccttctcacagtcattgcccctccctcaaagcctcaaagggatagagtccctcaaagtcctccgtgcacagaggtcaaggccagataaacactctataccaaccaacacctcctggccagtgaggcagagcaagtggaacagctgggactcaaggcctatggtctagaccagaagttccaaactcaagtgatttacagcagtgattctctgctgtggccgcacatcagagtcaccttagtgcagggggtgtgaggagggcaaaaatatggcagtacctgagtctcaccccagaccattcaatcaggtatttcttataaagttctccatggattatatatgtgcagccaaagctgtagaccactgaccracagggcccaggcagggaacataaatgtggggaaaagactggggtaaactagagactgtatatcccatctaaaggggcagccactattcacctcccactgactgttgccatatgggaatacaggttcagtgttgagaatccagaaatctgaatttttatgtgaaatctttctctttcagatgtagggctacttttttgtttaaacattgtggaggtcacataaaagacatctgcaggccaggtgtccactgcactctgcctgtttgagacctcttgytagtatttaaaagcaggccatgagagcttcttaacacacttttccccctctgtcagattagtgggataataaaggcacctacttcagtgggatgctgtgaagatggaataaaatcatctctgatatgtgcctagcacagttcctgactcaaggaaagtgttccatgattcagagcaattgttgtgaattgataactcaccagccaagaagattgtctgtagttttatactgcaaaaacagttttttttgttttccaaatataaaattatatttccacattgaagatgtgctttcagataaggatattcccatatatagctccactggagtgggactgtgtcgtgtcctgtccctcactcaagaatcactactcccaaggcaatgaatgctgaacccacagaatggcagggagaaaatctagagcagagctcagccaagctgcagacctcccaggcagaagcaggcctagcccctcttaatgctactgggggaccaggacttccaggagagaagcctaagagaccaagaaaattccaaaagagaagcctcctttaaaaaaaaaaaattaggactcagggctgtggccccataaaggtaatggaccactgaggtgtgggaaaggagttcgcctcccctagtggttgaaacttgccataacacaatggcccatcgactcaccctgctttctccccatgtagctggtcctgctcccacttccctaaatgctctttgttcccatgctccaccgtcctctcaagaaagctctgtcctcccatcgcgagctgggcttctacctggagcccattctgacctctcgcctgcccccacagaggaggtcgtgaggaggaagtcctcgagcatagtggagttcttcagcttagtgacccggagctcaaacatccctgcgggcgacagcgtccctgagttcgtggagaagcctcaaccggtcaccgcgcccgagggtgtgttgctgcctgtggctcaccgggctccagtgcttcgctttctaatcgagtgcccccaccctccgtcctaccccaacgacctccaatgctaaaccctggcagagcctggccgagggttcctcccctgcccggggccaggcccaggtgtctgggaggaggcagagagcmggcagagggtggcagaggctctagcctggtggctaagaggcgaaaacgcgtcctgtgctcatcgcaggggacaaagccgtgttccgagcccgggtgcaggggaacsccaaaccccacatctcctggaagagggagagcggcatccccatcaaggagtccgccaagatattctacgacagcattaacaaggaacacgtgctgaaggtgcgggggccaagcccaagtccagttaccgagaaggccagaggcagggacccccagggcgggccgccagtcttctcaccgatgagagccttaacggcggcccgagagccgggcagtgggaaaagcagctgtcattgcccgagaggcgcggcaggataagagaggccgagtcaggaaccgggatattgccggaatgagcagaggacccaaagtacccccggggcagagcagagcaggggcagagccagaacgtggcggggcgggacgcaatggaagcgaaggggcgtgtccacaaggcgagtgagccaaaaggaacgcgggaccaagacggtgggcgtagccatggagggcgggaccattgtgggtggcgaggtgccggagggactcgccgtagagtaggggtgagggtcaggggctccgggctcttcagctgaaccctccccaaggaccgaccatccttaggtctaaccagcttctggatcactttctgagagctgggcctacccagctgyaacccctggctccaggcccttcgaggaaagggagggatggatcacggggagatctaggcctataattacttatgatcctataatcactcgggtcctgacccgatttcccgttgtgaaaggcaaagagcctccttttttccccacagacagaagtagtctgctcccaaagacccatcatcactggaccctaagcccccyacagcacacacgagctgccccagtccccctgatggccacctcttacacaagctcattcattcagcagacactttctgagagccttggcttctgagagcctagcaggcttctgcaagcaccatgcagacgggcatcaagtcagccttactcaccactgttscttctggggctcagcccagtgtctggtacagaggagtaaattgtattaaatgaagtctcagccagatgatgccagaaactgcagatagagttacaaggcaggggaagccctgccttctgggagctcacagccaagggggagagtccgatggagaagcagacagttttaytgctatggaatcaggctacaaacatgcatactcacactgactgctagctggtacctccaaatcatacaggctgctcaatcctccacacatatacccaacagtcagttcctattgtcccctaaaaaaaaaaaaggcctcctaccttatctgacagaaagtctccctgtggttccttttccttcccccactaatggcsggactttgatccagctggagccackgacttcggatgactctgacaactataagtgcattgcaagcaatgaccatgcagatgccatctataccgtatctctgctggtaacagaaggtgagttggccccttcctcttggcctttcttcttagggaccagactccccctgtctgaacctgtccctctgtctatcctcaggtcaagagaaaatggacttcaaaaagatgctgaagaagaggtgaggctggcaggtccttctgcccaagatattgtctcctcatcmaggccaaagcctctcaaaggcctctcaacaaggccctgagttccaagaatccatggagtagggaggggtttctcaaggttggagaggcattgtgtacaagcttagtcccttcctccttctcctagggcaccccctgctcccaagaagaagcagaagaaggtggcaaatgagaaagagatgctggagattttgtccaaagtgcccaagaaagactttgagaaggtgtgcatggagtatggtttcaccgactttcgggggctgctcaggaagctcaaagagatgaagaagaaagtagaggtggaggtaagtaccctgcagggagcaggggcctgcaggctaggggcagggcttcacccaaagtgctagtgcctgtgtatttctcagcaagaaggtctccccarttctgcacacacatactcagaggcgtactctccactgtgaaagcagcaagggagcacaagtcaccttccttctacttctgtcttcaccactcccaaacatacttgcatggactttggagtcagatagaccgagattcaaatcccagttctaggctgggtgcagtggctcacgcctgtaatcccagcactctgggaggccaaggtgggtggatcacctgaggtcaggagtttgagaccagcctggccaacatgatgaaaccctrtctctactaaaaatacaaaaaaaacaaaaaaaaacaaaaaaaaaaccgctgggtgtggtggcacacacctgtaatcccagctacttgggaggctgaaacaggagaattgcttgaacccaggaggtggaggttgcggtgagccaagatcacgccactgcactccagcctgggtgacagagcaagactccgtctcaaaacaaacaaacaaacaaatcccagttgtactgccttattagctgtgtgaacttgggcatctctctgagcttcagtttcctcatctacaaaatgaaaattatacttccttctttcatttgtttttgtgttgttgctgtcattcattggttcactcaaccaactcattaagcctctacactggaattagggaatctatataatgggcccaggtacatagtgactattccatgaatgatggttttttactcatcccccgtaatgttcctctcctcctaaatctttcagttgatcactggagcactgcacgttgttatctaatgagcctagtcatttctccccacatgcttaagagtttctccaggattgaggacacagtctgggcaggctttgggtaccactgacacttgtcattttattatcataatctctcaggccatccggattctgaagcccctggaagacaaagagaccaaggttgacaccacagtggtctttgactgcataatggaactgaaagaccccaatgtcaagatgatatggatcaaggtgggggatgcctagccagggtccaccttggcaatatctcttcctctctacccccttctctcactgtatataagccatagcctctcttccatcccatcaagaggatgcctcctggtatggttgaaagaggctggaattgggctctactcttaactgtttcacccctttgttgtgtgatgtaagagagtcacattcctctctctatgcctcagtctacccatctttaaattgaaaggctagattagacagtcttgaaggtcactgaagatctgtgcctctaagggaaagcatctaatgaactcatgcatattaagagctcgggcctgtgaggaggcctgtggggaggcaggaatcttggatcccaccaaaccagatgatgaggctatagagatcatagggatctctgtctttagagggttggacatgcaccctccagcttaggctggcgctggggaatggagacctctggaagcttcctcctaaagcccttcatcagctttcctacctgttccatgaggcagggtactgagccactgaggatccagtactccctgggcaagtacgatgtgaagcagatgggcaccaagtacatgctggttattagcaacgtgaacatgaacgatgctggcatctacagcctgtccgtgggcgataagcggatgagtgcagagctcacagtgctgggtatgagtgggggcatgcaagggcacaaggaggacatgtcgggttggaagagaggaatggccagggttgggatccatggggatattgaagagaggactatgggactgtgcaagaaaggaytgtgtggggatgggagtcaatggagggaggaagcatcagatgtaagggagaggactatgagataataagtgccttggggctgtgtagcatagtgattaagaacatagactctaggccaggcgtggtggctcatacctgtaatcccagcactttgggaggctgaggcaggagaaccgtttgacaccagaagttcaagaccaacctgggcaatatagtgaaaccccatctctacaaaaataaataaataattggccaggtatggtggcacacacctgtagtccttgctacccagcacgctgaggctgcagtgagccatgatcctgcacttcactttagcctgggtgatgaagcaagaccctgtctcaaaaaataagttaaaaaaaagaacgcagactctggagctaaactactagaggtcaaatcccgctttctgccacttatgagctttgtgatttaggtcaagttatttaacttctctttgattcagtttccccatctacaaaatggggaataatagaatctacctatgtgataattggatgaattagtatggctaggatggtgcctggaacgtatctaaaaccacataagtgcttttaaaattgctgttaccattactggggagaagaccacatgaacatcataggaggggactccaggagagaagggctcgaaaacaaaaccaaaggcagggtgctttcccccagccatgggctacaggaggccagtgacatgtgagtgccctcttcaccattccacccctcaggagggaccagcccaatgactaccactcctactgtttgctgcagatgagccactgaagttcctgggagagatgaagcctgtgaaggtgacagagcgccagacagctgtgtttgagatccgcctctccaagaaagagcccaactttgtgtggaagttcaatgggaaggagctgaagagggatgacaagtatgaaatcacggtgtccgaagatggtctgacgcacacgcttaagattaaggatgccagactcagtgacagcggcgagttctctgctgaggcggggaacctggtacaaaaggcccagctcactattgaccgtgagtggttgggcaagagcctaaggggtgggctttatggcacagcaacctccatgcaggtagtcatcatttatatatccatctatccatccatctcctttttgcaaagccctgtggtaggtactggaaagacagggggatctcctctctgttaacccctagtctagtaggggaggcaggtatgaaaatgaaattagaatagcagttattattccacgagtcaagacacactgggtcttattatcagctgtgagatcatggaccaagaaagtattagtctatgtctctaatgtcatatattacagcacatctgtgtcactctkgactacttacattctgctatcacaactactttgggagttcgcacataatgtaggtacaccaatgagcatgtcacacatctgaaccgcacctggaatctatatcacatggaatcatcattgctgtgatggagggagacacaagggctgtagaagaccaaagaaaaggcatcacctggcaacatcagaaatgatataatgaaatgatgtccgagctttaccaagaactaaaaggagttccgctttcaaagaatgagggagagtagagaacatccccagcagaggtaatactgctttcaaagaatgagggagagtagagaacatccccagcagaggtaatagcatgtataaatgtccagacattagaaagacaatgcaggtatggttggagctccaagggggcattagagatattgagcactgtaaaagttctcaccccattttacatacgaggaaactgagactcagagaggtaaatgagttgtatacagtcaactagcaagtcagggccagagctgagactctccctgtcgggtacttctgtgagtcacatattacacacaaacacattcagcatcacaagttcttktgttttctggggacagaaagagggacagggcttttggctctatagctgcagaaaaaagatgtcgtggtttgggagcaggcccaagtgtctgtctgtccacaggcatccccatcaagtttgtgagcaacctcaaaaatgtacgtgtgaaagagaggagtcgcgcatgcctggagtgtgagctgacatccaaggatgtgacactgcgctggaagaaggatgggcagctgctgatgcatggcactaagtacagcatgaaccatgagggcaagcragcagagctgatcattgaggatgcacagctcagtgatggtggcgagtacactgtggtggccatgcaggatggagaccctactgaatactacaktactgccatcgtcactgtggagggtaacacccgccctatcaatccccactgaccaatccycctgaccctggcattcccttacagtggacatcaattgcccccctcccactaactccaaccctcccgtagaccatgaccaacttgtgtctccccactctgatcaccctcacctcctaaattctgaccatctctgacctctcatgccctaaacatttatacctcctagacactgatcaccccccatcttccagactctatcccaaatttcctgacttcatccttcactttcagactctaaccatccccagcaaccctgatatcccagacgtcttgatcccgaccatctcctactacctaaccataaaccactttccacagaccctggctaccctcaacccccaatgaccctgtgtatcccacagtctagcgtaaccacaactaaacatcccaactccagtaaccacctgcatcttcaccatctatttccctctccaacccagcatcctaagtccctgctgaccacgctccactaatcaattccccactagccatctcccagttttcctggtcaccatttcccaagccactgacctttccccatccccctcccatgtgttgctccagttccccccactgaccaccccctaatcacctattgaccacattggcaagccgcctgctcatcataaattattttgattgacgcagcacccctgaccagtcccatgaccattgctaccagcccttttcccagaagtccctcccaccccaacatcctgagccagtcccttgcccacctttctccccagagcgtctggccacagtgaagagcgggatgtccgacgtgcacgcggccactgggagcccagctgagttgtgtgtagtgctgaatgacgagaaggtggagggtgtgtggctgaaggatggcaaggaggtctgaagcagaggccagggaagggggtgaaggaggtagacctggcctatgctcacactcaggcccacccctgacccccagatcacggacttgccaggcgtgcagattgtgaagcagggtgcagtgcacaagctcatctttcccagtatgggccctgagcacgagggcaagtacacattccgggccaagggcacggaaagtgaagcctctgtattcatcgcaggtatggatctgtccaaggtaggcaaagctcaaccatgcctggcccacctacaagctcatggcttctcccctgccccatgggctcctccatgccaatgctcaagccttccctgccgccccgccccacagatcctcctaccatcgacccgtcagtactggaggcactggctgcgcacgccatcactgtgaaggtaggccacacggcccacatcaaggtccccttccggggaaaaccactgcccaaagtgacatggtacaaggatggcatggaagtgacggaggaggaacgcgtgtccatggagcgcggggaagaccaggcactgctcaccatctccaactgtgtgcgtgaagacagcggcctcatcctgctcaagctcaagaatgaccacggctcagccacggccactctgcaccttagtgtgctgggtmagggcagggccagtcygggctgggctgagctgagggcacctgctgcccagactcagggcagaaggcaggctgagkaggaggccagagttagagttgaagtttgggctgggaatgggcctagaaggctggctttgcagccagaagcccgcttcctaacttcccagccagttcttggccgagtgaacctccctaagtctcagcttcttacctggaacagggtgattttttttctagtatccatttctagttaatttaaagtgcacagctaagaacacaggacataatatactttcagatgttacttaagtattgttattgacttgaagaggaaaacttgataggaggtaagatggaaatgaggtgaaagagaggtagaatttgccagacacggtggctatagctcacctatagctcacrcctataatcccagcactttgggggtccaaggcgggtggatcacttaaggtcaggagttcgaaaccagcctggccaacatggcgaaacccggtctctactaaaaatacaaaaattagccgagcgtagtggcacatacctgtaattccagctactcgggaggctaaggcacaagaattgcttgaacctgggaggcagaggttgcagtgagccaggatcaggccactgcactccagcctgggcaacagagcaagactctgtcaccaaaaaaaaaaaaaaaaagaaacaacaacaaaaaagaggtgggatttagggatggaggtgaggttgtttggaaagagtagtgagtttgaaagtgaaacagggtgaggtgggaggtcagatagagctggagataaaataaggtgggaaagatggaatggggattgggaatgggatttgggatttgtctgaacatgaggatataagaaaagagaagaggagctggcctgaatgtacttatattcaacacgccacgtacacgccatcaccacctcctctacctgcatttccatcgagctctgggatgggaaagtttgagtttcaattcaattcagcagcaagactgagcacctgctctgtgttctcactgctgtgtacacagagatgaagtatccccagcagttcctcaatccaaaaggggtgaaactggtagacagactgtaattataacgtaaggtaaacagtggtaccagcaagtactggtgttctcaaagctcagaagagggggagaacttgtttggaaggggacagggagatcagctaagggcaggggcccctaaggtctctagtctacccattgctaggcagatgggaaactcacgggggcaaggatcaaactctttgggcaagtcttagaaggagggatggtggacacagggaggggcaaaggatccaaaaagctcaaaatccagctataccctagtctgggcagacctttggtgagtgggaggaggcccttctgatcctttgttccaaagccccattctgaagctgttctctgtccccagaccgtccaaagcctccacagggccgggtggagttcctggagctctcaggtagttgtgtgcacatgaagtggaaggccccaaaggacaatggtggacgacctgtgacacagttcatagtggaacggagggcagttggcaagaagtcctggattaagataggcgaggtggacggcaaagtcaccaacttctccaccaacaaggtggaagagggaaaagcctaccagttccgtatcctggcagtcaattcagaaggtgtgagtgacccactggagacagaagaagtgtttgcaggaaatcccataggtcagtgagatagcctggtgctcagtggggaacccaggggtcagcatggggaccttaagccaggaaggaacactgatctgtggggaattccacaggaacatctctctagctgtctcatgagacagaccgattccagagtaaaaacagaacatcattttggacaggaattgtcaacgttgtccagtcatatcacatgcacaacacactcccatgggtatacccaggacgtgcacaactttggggaactgactccacttctttctccatcccagaagtcatcccagaatccaagtgagcatgatgttgctttagggataaccttgaaaccactctttttctccacagaaaatccttgacaacattggcattttaattataattgcaggctgggcacagtggcgcacacctgtaatcctagcactttgggaggccgaggtgggaggatcacctgaggtcaggagttcaagactagcctggccaacatggtgaaaccctatctctactaaaaatacaaaaattagctgggtgtggtggcgggctcctgtcatcctggctactcgggaggttgaggcaagagaattgcttgaacctgggaggcagaggttgcaatgagccgagatcatgccactgcactccagcctgggcaatagagtgagacttcgtctcaaaaataataatattattattactgcaaatgaattacttgctatacctctcccaactgatctccaaatctccatgtcaggacagtagattgagaatgatgggattgggggtcacaccgtaggaaagtttaagtcactgattctcaatgtcggctatacattagaatcacttggtttctttaataatgctaataatacttgccattcacaccaggcatagaatatgggtaggcaggacccagacactagttgttgtcagtggttttttttttgttttgttttcatttttgtttttacttcccacttgatgttaatgtgcaagcaaagttaagaatcatttgtgccaggcactgtggctcatgcctgtaatctcagcacttcggaaggccgagacaggaggatcacttgagcccaagaattcaagatcatcctgggcaacagagtgagaccttgtctctaaaaaaggaaaaagaaaaaagaatcactggtttgagtttatttaagcaggcgaggcagaagtcagcatgaggtgggcarctatctacatgctccccctcctaacctttgcactctctctktcccccacagagcctcctggttttgcctcccagcctcaagtgactgatgtgactaaagaagccgtgaccatcacgtggaatgcccctacccaggatgggggagccccagtgctcggctacattgtagaacgaaggaagaaaggcagcaacctgtgggtgccagtcaacaaggaccccatccagggtgaggtccttggaacagaggcccaggagtgaccaaaggaggtcttgctgagtggacccattaactactgacacagtccctcmtccaactcttctggaagttttaacaacatcccatgacctcctcttctatgtctctcactcttgttctcaccccatggatgcctctggcctcacgacccctcatcttcccatttcaggcaccaagtgcactgtggatggtctcctggaggacacagaatatgaattccgagttatagctgtaaataaggcaggccctggacagcccagtgtgccatccagctcagtagtggccaaggatcctgttagtgagtatgcggctgccaggtcctgacacataatggaattagcccattcaaagtagagaaagaatttcttccccgggaaagtatgacacgaggtatcacagtctctacactctggaaactgccagcctcatagagggacaagattcacacacaagagaaagccagcaaataaagattgagagtcagggacagtgaggaggtggggtgcaaaaacgttttttaaatttcgtgtatttctagttaggtgaggtaggagaggcatgctgagggttgagtaagggtgtgaggtagatggttggagggtgttgcatttaggaagcaaggtgaaggtactgcctggaagtggatgtggtggagatggttgggttaaaggctggggttttgaatacagaagctttgaatatgtggggtatgttgaatttaaggggtattgagtttaaggatgaaagtgttaaaacagtaagataactgaatttgaatttggaggttgagtgtataaggctaggtactaagggtgttaactgagggatctggagctagaagtagtgaaggatggggttcaggagtattgagtgtgggaagtgagcaaggcattgagtggagatgagttggaggggctgactacatgtctgttctaccccagaacccccaggcctggtccaggacctgcatgtatctgattcctccaactccagcatttccctggcctggcgggagcctgcagagggagacccaccctctggctacatccttgagatgagggctgaagacacaaaggagtggtccaagtgcacaaagatccccatctcaggcacctgctacacagtgggaggactcatcgagaggcagaaatacttcttccgaatccgggctgtgaatgaggctggggttggggagcctgtggagctagacaagggggtccgtgccatgccaccaccaggtgaggacacagagagggctggggattcatgcccaacactgtacctccaaaccttctcctctggggcctcatcccacaggaaaattggatgatgctaggatcatgaaaaagtcatccatagttgttgtgcctggacaaagttaggggtaacttcaggggcacccctactaaatcattgtgtgccaaatagcatctactgtgtgtcaaggtgtaaccacccaatgggttcttcttgcgcattgtacacgcaaaaccagttcactgagaccacagcattgcaacaaagagtttaatggacacaaggccagccatgctgtatgggagacagagttattacccaaatcaattccccgaaaattcaaagtccagggagcctgcttctgactggggcctcaggacttgtggggtggagggagagcaggtccaggtggagccatcagtcgtcagaaatgcaaaaacctgaaaagacatctcaaccaccaatcttaggctctacaatagtgatgttatttgcaggagcagctggggagttgcaaatcttgtgatctctggaataatggctggtaatcttttatgtctacaccttagcagaattcaggctcctcacatcctcctaacctggtggcctttcattagcttcgcaaaggtgatttagtttgggggaagactgttatcatctaagctataaactaaatgtctctcccaacattagcttggtctgaaaccaggaatgattaagggcagtttggagggtaaaggcaagatgggggttggttagatcagatctcgttcactgtcataattttctcgctgttataattgttgcaatggcaatttcaaaaggaggtgttagggttatagaaacaagacacaaggacttgccttccagggtcttgcgtactagtagaaggagacagatgagaaaacaaataaatgcttcacagggttgcagggcagctagatgtctgtatggcctgtagtgggggcataaaggaggagaggttgggaaggctttgatgaggaggcttaaagcagagtcttcttgaaagacagatccatgcctccacctctgtctcctccatctcagctgcacccaagtttgacctcagtrcccggctgaagagtcacatggtggttcgcgctgggacagccctctgcatccatgcagccttctctgtgagttgtccctgaccctgacctccatacactgtccacataaccaagatggctattgtagccatcacagtctctgactctgactctgactctgcccctcaccagacccctagtgcgacagcctggcaggaaactcctcgacaatggaggaaggccygcccccaaatatcatctgtgtgaccagttgtgccatctcctgtcactactcagggctcaccaccacctgacgtgatctggcagaaagatggcgttcccaccaagggccgagagacaattaccaagagcaaaaaccactcccagttcctcattaatagcaccaagcgctctgactcaggggtgtaccgaatcttgcttcagaatgagtttggagaagcacgctatgacatmcatgtgcgcgtggcaggtatggagagaaggcagaggcctccaagacccatccctgtacactctccaaagcacagctccccagtgccgcttgagttcctaccacaggaaagtcatgccttagggccatgargatttctttgacaccacagagcaagactttatcatacagagtatggtcggcagagagagtagaaatgggtggaggggcaggagggacaaatggagatgaatccattaaaaattggggtgactgcttaaagagagctggaagctttaaaataaagctctaaacccccaaggaaggaatggattcatttttactgaacagtaactacatgccagtctctttacccactatttctacgaaatagtcattgtcagctctattttgcaattgaggaaagaagtctcagataagtaacttaccccaggtcacgaggctagtaaatggcagagcagacttcagaaatagttttccgactccaagacaccagctgcctgagacttgccccatcttatcttccatcggacttggcagatggctggggtggggacataatacttcaggtgccccaaggtcgctgacagatcttccaactcttccagatttccctcggccccccacaaacctacggttgtttgaggaagtccccaacacagtgactctgacctggaaccacagcccagatgtgcaggaggacggtgaggctcactacrtcatcatgaagcgggatgcaagcacagccacctggtacacggcagccgagcgtgtcttcagcaacaagtacacagtgacggggctgctcccaggcaggaagtactacttcagagtggtggctcggaatgaaatcggtgacagtgagccacttgactccagggacacctggctcatcaataaggaccagagtgagtctgggacttgcagttagggttaagtctgggtgccctgatggtggggatgacataagggtcccaaagggtacccaagaggcaagataaaatctgaaaaccattgagatagaacggttaatatctgggacgctgcggagagaaggaaatattggctttcttcggggtacttaggggtgagactaaagtggaggtggggaggtacctttgggggcagagaggacggtggaggggctgcggagggacatagagcgcaaacgcgttctgctctgaggggagggtctaacggggctgagaacaggggagggctctagggagccgggaggatgtctgggatccctggaggctaggggttaagggtgggggccgcgtcgggaaactcgaactgaggagctaaagggataagaggggagactgtggtcgctgatatgacgtaggggaagcttggaggcggagttaaaggctgggaataaccgggtccaggaagctggcgctggaatgacatctcggccccaggggtgtgggaaagcgtggtttgggtggcagaaccctggagtggctggggacggggctggggggtcgggggaggcctgggggcgggtggggagcccttaagaaccagtgtaacattgggcccccagagttggtggcgctgggaatgtggcctaggtcctcggggttccgtgtaagctgaactgtaagacgtgggtggtgggtgggggccttggggcgccctcacggcctgccccgccccgcccgcgcagtccaggacctgagcgccaagctcaagccctacgagaagaaggactggcgccacgcgccgcgcttcgtgacgcccctcaagccacacacggtgctccgcggccaggactgcaccatgacctgcgccttccttgggaacccgcggcccacagtgaccctctacaagggcgacgtcaacatcacggccaactccaagttctggtacaactccaccagcggcgtgtgcaccctcgtcatccccacctgcacgctcaaggacagcggcgattacagcgtgctggtggagaacgagctgggcaaggaccgcagcagctgcacgctcaccgtctatggtgagggcgccgcggggtccggcctcgaggagggggagaggcgcaaaaggctggtcttgtgggccattggtcaactatttggctggcaccgttttttaatctgactgccaacaggtggtgcaaacattcttaattggccacagttcttaccactctcccatcctttcgatgtcatttgttatatgcctggcccctgcagacatgagagttctcaatccctagataagatgtggtttgcaactcttggtgagcctagacctgccttcagaaaaaagatactggtgatcaggactcaaccagactcaccaatcacgatctctctggcacggttctggaaataacctatatgtttacaaaattttgcgggtgattctgatgtgcaataaaaattaaaactggtctaggataaggaccggtggggggcacaaacaagggaaggagcgaagggaaccctcccttttgtacatgcatgccatgtttctactcatgtgtgcacacatagggggaagcattttattccttcccagtctactgtcttcatagccacacagctagcagcatgaactctaaatgcaaagctggcctgccttgctttctgttgcttaaatttcccccagctttcctctcatggtaaaatcccaaaccaagaaggtttccccctcccccacctctcatctcaccttctgctactcctgaaccttccatgacactccattgctgtggtctccatggttacagaccttttttatccagttatagatacctttctttggggaaaggaccttgtcctgttgctctgtctctcgagtgcttagctaagtgtctggcactgagacaatatctccagagaggctgctgagctgtgtaaaagaactaggccagggaaggcactgtgggtgctatccagctttcattccacagctaaagagatccctgataactcaaatctgcttgtaagcacagcaaatgggcccagggccctggctctgccactgaccagccatgtgaccttagtaagctacctcattgagcctgttttctcatcttctttataggactatgaggcttaaatgagacagtacacaactgcctggcacaatgtctggcaaatattaagtgctagataaatggcagctcttgccccttcacactctgccaacccaagattaagggtcccagggtccagctcctggtttcctgcataggaagtccagcagtttggaatttccctggtcgccagcatcattaatataacgaatacttcctttgctctttcagacaaagatgataagtcagttgtagcatccatcaccgagagtctgcagaagaaatcaaagcacctcatgtgagctccagccaagcccaggcatcaggaggctgttatgatgtggagtttcttggcctgtcctctgcatggcccagtgtaggaagcccagtttgctctctggtgtttgttaatgtaaacattcagtgaagggatggggcaataaacgtaactcatcctttcccgttcctgagggtgatatacagcagggaccaaggggatggatgtgattgcatgatagggaatcccagacctggacccctgaaagcctagtccaaacccacccacaaggcagtgaccagccttcttgtgactgggcctggtcttcccttcccctcctccacatctacatggcactttccccctcccctcagagcttgggggcaagtcctgctgacttcatcctgctctccatcctgctccctcccatttcttcacactaggtaggtctgtgttcagagttctgaagtttgaaaggatcaagatcttccctctttagtgtccagggttcagagctagaagggattgatcatccagctcactaagtttcaaacttacgtttttcagtggaatccttccaaaacaaaacaaaacaaaaaaaaacacaacctaagaagctactggacttgaaataaggataggaggtctttgagcctgccttctctcattattccttcactacccccttaccaggaatctctgtaaaaactaatttggaaatcactgactcatccaaccacccctgagacttgagtctcctaaatcacatccccacaaatgagcaacacctctactgatggcatatccaccaccacccaaggcttccctttctacttctgggttagggcattgtctgttaagttacaaatgctcctggagcagagtgatgtattattctgccagggctttacaactaatgaatgaatcagccaatctaatcccattgctcccagctgttcaactaagcccagagtccaggatgagggagatgcttgaagggaatctggatcattttgaaggaagcagcaggtctcaagtggggaggggaggaggtgggcagcaatagatgacactgggtaactaaaggtcaccaagggtgctgggcacctgtgcacaggggagtacatcaaggacaaatttggacagtggcaaataccactcatcccccatcctcctaaaccacatcctcacccacaccagggaagtgagacacactccaaccggcacagtgtcaccagagccaggtagccagcctggcaccaagatgcactgcccaggactgtgactaggctgtgaggacagccagagcctctggcaccatgcccccatgccctctccaagataggcatgtgccacacaggcccacaagcagggcagccaatggctcttgatttttattatttttcacatgggcagcagaagatggagttgtcccatccttgctccccttgcattgaatgtgccttgggtcttaaaaccccggagtgtcattggagccccctcctcttgctcctagtgtaggagggacaaggaggaaagcactgtgagtatgtgtgttggaggggaggggtcccagctccctgagccaggctcagcacccctcagcagctccctgaggccctctctctgtgagacttttgacagacagcaggacagaaacatatagcagagaaagacataggcagactaggagacaggctacacacacacacagagaagctggccccttcctttggcatggttcaccctagccctggggataggatctaagggtagcgtatgggacctgagctttgggcttgcccgagagagagatggggctacttgaattcttgagaccccaaactccgagaccaaagaagttctctctcctgcctaacctggacccacacctcttcatgtccccacccaccacttagagactgagattgttcaagtaacaaggatagaagagggaaaagaaacggaggctccactctcatccagtcttcccaactaggggcctgtgaaaggggctcctgggtctgagtcttctcagcacagattctcccgtttccctcaactttgtgcagatgaaaaaggggaggagtgggtgaacccagcactgccattggtcctaggcataacacatggagtcagactcttccacctggtaggggaagtgggtgggggggtgtcaagaagctgagcaccatcaccttccaggggggttttgaaagtcctgatagggtagaggtggggagatgtctacttctggctccagtctgatattaggctggctcttttagctctcagcattgtcctgaaccacgagttctgctagggagatccttttccagcctccccacacgaacttgcaaattcctcaggcagtacctgctgccccaggctggcactgcagccatcctgatccagctcctgcaggtccccaggatctgggccccagccccaggaggagagaggggtgaccagaccctggcacctcagttggccttggtcagtctgtagtgttccacaggctcccggctttcgacagctgacaaggcgacgagcatctgggccgcatagtaggtggacatgataagcgcccgagagtagggcacaggaaaacagaatttgttgagggcgatggtcaggtctgagatgataaagaagagtgcaccactgccagctgccagctctgtccagcgccagtctgccccggccagccgcagccctgccatagctcgccagcccatgaagccgataagggccacatagacccccaccaggtaggtgaaggcacctgagaggcatgggtagaggagggcatagcacaggcccgacagcgctgccatcaccagacctgtccgaagagccagtggctgcatgccaaaggccgaggcgtagaacatgtgggtcacagcaaacatcagcagacctgggggtaagaggggcaaaggcagctgagggcaagcttgatgaagaatgagtaacagggtgggggtagggatggatgtggcgatggagtggagtgtttgggataacccagcagctttgctttgggataacaggggtaggaagatctaaagttaaagaccaccaccccagtcccctgaaggactctggaactgatcactagttcccctgcgaggtcatcccctaacaaggaccctcacagtccctggcctcagaaaccctcaggctccccacactctggttcaagaactccctcttccaaatctttgcccacagcccaggaccctctatcccccagccccaggactcctcccaggcaactactatggccactgaccatgcacgaagtatccttggtcctgccagatgaggaaggcgtcacctacagcagagaagacaagccccacaaagatgcgggtggcgctggggtgggccagcaggaatcccaggccatgggccagaaggaagagccagaggcagaagataggcaggcacttgatgagggtgctgacccacgatgggctagatgagggcagccagagcacaaaatacacgcaggtggccttgaagaacggcaccagtttgggtccttcactcttcacctggaggacacaggacaagggcagcactcagaacttgggggttgaaagccagcaccctcagcctaggcatccaccccagagacactcccatccatacccccacctcacttccacccccaacctgagaagactgacacagagaaacccagcctggcctgcctctaccagccagcaggttgtggccaaacccattactgccctgaggctcagtatattaggagggggacccttctgcagcctagtgtgcttctcccttcctgccccctccttctccctcctcagggcccctttagcccctcctctctgccagcaacagcccccagctgttcactctggaatggagtgaagtcagtgggaaaccacagagacaccctgactggccaactcgt

SEQ ID NO: 97577 - DNA, 16134 bp, Homo sapiens
ctaaatcagctgtaagaaagtgttctctaaatcagctgtaagaagctcccagaaatttgaagcatcatagtcctgtggttttcatttagaaaggcttcaacatttgtttttctcttaccagcccgtgttcccaagaaaatcctcaagtgcaaggcagtgtctcgagaacttaatttttcttcgacagaacaaatggaaaaattccgcctggaacaaaaagtttacttcaaagggcaatgcctagaaggtattctgctgcctacatgcctgaaatcagggcttagggcgaccaggacaaaaggcaacaatacccagtgaactaaagcagtgctttgataacattccttttacaactcagtttgtggtaggattcctacactctgcaagactgtgaatccccagtgaaacaaaccaaaacaaagctagccactacaaggggctttgaggtctctgacactgggagcgtggatggtggtgcctggtttaggcactgacgttgtattgtgatatgatcatggaggaagctgctatgagcagggcctagtacagtgctctacatacagtatcatacagatttgactggcaaggccactctgcattgaattctcaccatgcagtgtaaagggcacataagccccttcaagctaattccaagtgaatttaactatgtatctatatatagttcacatctagcctacctctaagaaaatgctgcttatattgtgtcctgctcgctggtcctagtcctttagacctcaaagcatgagaagcaagcctttggtgtggttcagaggacaacctgagcaggcttccctgtcttttttacgcccctggtctgagaggttgctgatagcttcctttggtggttctcagggtaggaagaggctcactctagagagggagacaaagagcccttaaactttatactggggcacctgctcaccccggcttttccttcttccttcagaatggttcttcgagtttggctttgtgatccctaactccacaaatacctggcagtccttgatagaggcagcacccgagtcccagatgatgccagcaagcgtcttaacgtgagtgagcaggtctcaggaaattatgaagtgtgtctagaaacaggcattccaggcaggtgggactcctggtgccattcagtgggcagagagctcggttgagaaatagagtaaaagagtatccaagggtatctaggtttccaggttcctgacctttttcatatgaaaaagacagtatgatagagtagaaagaataaaaaactaaaaataaaaataaaactttagattaaaccagatttaaattcctgattcaccctgactacctgtgtcatcttgggcactaatatactttatctctctgagccttagtctttcatctctaaacacagaaattaattctgtcttacagaggtgtaatgaagataaaatgtgatgacatggaaggagactggcatttaatatatataccgaatctatgttaatttgctcccattcctgactaccgtacttccggtatctctgtattttgtttagatcacctttaacagaatctggcaaagtcctattaataattctgttttcgaggatactacttggttacagttttttggagaatggcttaccatattaatagctttggttcctgttccaagaacaatttgtttgtgctttttccaaaaacactgtcaataacttcctacctcccattgtctgtgggaaagatgttagtctctcaaatgttatagtaatagtaccttctaaagagttagctgggcgtaatggcacacacctgtaatcccagctactcaagaagctgagataggagaattgcttgaacccaggaggtggaggttacaatgagccaagatcatgtcactgcattccagcctgggtagcagaccaagactctatttcaaaaaaaaaagagttagtcccacagataattgtgtaatattggatcatctctttcaacagttcctttatgaaagccatattgaatttgttaaaaattgaggttattgactttaaggttttttgtttttgttttgggttttgtttattttatttttttaaaaaacagggtcttgccatgttgcccaggctggactccaactcctgggctcaagtgatcttcctagctcagcctcctaagtaggtgagactacaggcatgtgccaccatgcctgtctctactttttaagtttttttttttttttttgagacagagtctcgccctgtcacccaggctggagtgcagtggcgtgatctcagctcactgccagctccgcctcccaggttcaagcaactctcctgtctcagcctcccaagtagctgggattacaggcatacaccaccacaccggttaattttttttttgtatttttagtagagacagggtttcaccatattggtcaagctggtctcgaactcctaacctcgggtgatccacccgcctcaacctcccaaagtgctgggattacaggcatgagccaccgtgcccagcccctttttaaagtttttaatagtttttttaacagccaggtgtggtgacactttcctataatcctagctacttgggaagctgaggcgggaggattgcttgagtccaagagtttgagactagcttgggcaacatagattttgtaagaggctgggcgcagtggctcacacctgtaatcccagcactttgggaagccaagtcgggtggatcacgaggtcaggaaatcgagaccatcttggctaacacagtgaaaccccatctctactaaaaatacaaaaaatcagctgggcatggcggcacacgcttgtagtcccagctactcgggaggctgaggcaggagatcacttgaatctgggtgccggaggttgcagtgagccgagatcacgcctctgcactccaccctgggtgacagggcgagactccacctcaaaaaaaaaaaaaaaaattgtaatagaattttttaaagttttaatagttttaaaagtagattttttttttttttttgatatggagtctcgctctgttgcccaggctggagtgcagtggcaagatctcggctcactgcaagctccacctcccaggttcccatctttctcctgcctcagccttccgagtagctgggactacaggcacccgccaccacgcccagctaatttttcgtatttttagtagagacggggtttcaccatgttagccaggatggtctcgatctcctgacctcgtgatccgcccgcctcggcctcccaaagtgctgggattacagacgtgagccaccgtgcctggcctaaaagtagattttttaattacagtagtagctatttttatatcttatcagccagtcagattctgagtaccttatttacctgttttttggggtttttttttttgtttttttttttgagacggagtctcgctctgtcgcccaggctggagtgcagtagcatgatcccagctcactgcaacctccgcctcccaggttcacgccattctcctgcctcagcctcctgagtagctgagactacaggcacccgccaccacgcccggctatttttttttttttatatttttagtacagacggggtttcaccatgttagccaggatggtctcgatctcctgacctcatgatctgcccgcctcagcctcccaaagtgctgggattacaggcatgagccaccatgcccggcctatttacctgttttataattaattaccagcagaaatgtatctgctggttattaattaccctgggaaagtacagagtagtttaggaaagcaggggttttttttttttagattttattaaacttcatttgacttcttcttcacgaggcgtgattttttgttgctgtttttttttgagacggtctcgctctgtctcaaacctatcataagatgaaaatatcataagtcaaaaatgcatttaatatccccataaatccactataaagttgaaagatcataagttgattcattataagtagggaaccaactatacttaactttttattttttatttttttttattttttttgagacagagtctcgctctgtcgcggaggctggagtgcagtggcgtgatctcggctcactgcaagctccgcctcccgggttcccaccattctcctgcctcagcctcccgagtagctgggactataggcgcccgccaccacgcctggctaatttttttgtatttttagtagagacagggtttcaccctgtttagccaggatggtctcaatctcctgaccttgtgatccgcccacctcggactcccaaagtgctgggattacaggcatgagccaccgtgcccggctacttaactttttagaacccccaaaaacagttgccctaaactcagctcaagtgtgatttggtaaggccatggtctctcccattttacaaatgggagcaccgagatacccaccaagaaaaatgaaattcttccctcacacctcacaatacaggtgcatcatttagtgttctgtagttgtaagtcatagaaacaggctctggctaatacaagagctgaaagactaagggggagagctgggcggcttggaagatgcagatgggcaggaatccctggatggcttcctcaaggagaagctacaggaaggatcttgctcaagagaaagagtctgattggcctaagttacatcctctgttcacccttttgccaggtgagtgaggggccactcacttggcacatggactggaggaagggtggttcccaaatgaagagcaaggtgctgttacccaaaggcaggaaaatagatgtgggccaggccaaagcccacctttcgactattgtgagtactgtagggaaggatactgcccctgaggtctgcaggcttctatatgtaagccagccagaggtgtccatgaatgcagtatcagaaagtcagtcggatctataagcaccctgtgtgcagagcactctactaagggctttagagtgtaccaaggagtggagacatgctctcacttctgatttgtgagcttgacagggatgaatgtaaccacataagttaaatgtcatgttagacttgtagccccatatagacaaggattttaatgtccccaagctaagactctgggtgggtgcatgtccattggcccaggaatccagatggaaaccactttgtggaaatgaaatcttgtgcctaacatgctcactctcttttgccctctgtttctcttcttacttacagtgggaacgttatcatagaaacaaagttttttgacgacgatcttcttgtaagcacatccagagtgagacttttctatgtttgaaagaagaatgtgtgtacatttcaagaatttgggttttttggagggaggaggaaactgtttacttttttcctccacacgtttgatttttgacacatacacccctaattccctcaacagcagaacctacctgcagccaccaggggaccagctctgtgtaggtaaccagatggctctttttcccaagccaccatcttccagctgaccagactaaactcccaaccccagaccagggcaggggacaggtctcaagtccttcccagcatacacacagggaacaaacacataccacaaaccggtaactgtacctgtcaccctccttgtctcctccttgggccctacaggctacacatctacctttggcccctggttttggaaaaattccgtgttcctgacccatgtttagttttttcctaccatttctatttcatacattctcatacatttaacttgtaaaatagactgtgatattattacataatgtaattaaaaatatgaattaaaatattcctacagtctttagcatggcactgcttttatctctcctttttctggaaagtgaacctggctgcataatggaaagaaaccaaatataagatcacaactgtatttcactccaggaatggaactgatagatcttgttccctagtgccacagttactgctttccaaaattgtgcaacatacttgaaccaaacccatgaccttaacatttgtcttttagacacaatctttaatggttcttttccacaacatacatgcaccctttgtttgtttattattgttaattttttctatttgtttacagtattcatttgttcaagaagtttcaagaaagggcaattctaagttagtagagtagggactctcatattcctaaatgagactagaagctacaaaatgaaaagatctgcatgaacctaactggagaatgatgggaaggcgtctgggctgggaggaggctgggaggcctttaagactrtcgtcattggaagccagcrtgggagagaagggattacaactggcagtgctttcaggtccgacataagagagaacaccaaaaagtgttcttacctctgagctactagtagccttcagtgtctttttttgttgttttgttttgagacagagtctcactcttgttgcccaggttggagtccaatggcgggatctcagctcactgcaacctctgcctcctgggttcaagcaattatcctgcctcagcctcccgagtagyccgtcaccacacctggctaatttttttgtaattttagtagagacagagtttcaccatgttggccaggctggtctcgaactcctgacctcaggtgatccgcctggctcggcctcccaaagtgctgggattacaggcatgagccaccgctcccagcatgccttcactgtcttttataaaataccaacaattacatgttttcaagttaccaaagcagtaaggtctgaggccagaggacagaacacatcaaaggtatggctctctttggtgtagctcttgctctcagattcctcttttccttttctctctattacctgagtctgtttgcatctgcgggtggggaggagaaaccgtatatttttagtktactaccatctttcaatgatgattcaattcctcatattagatctgttgtcttcaaaagctgttttttattaattttatttatttatttatttatttagagacagaatcttgctctgtcacccaggctggagtgcagtggcatgatctcggctcactgcaacctccacctcctgggttcaagcaattctcctgtctcagcctcccaagtagctgggattacaggcacacaccaccacgccggttaattttttttttttttgtatttttagcagagacagggtttcaccatattggtcaggctggtctcaaactcctgacctcaggtgatccacccccctcggccccccaaagtgctgggattacaggcatgagccaccatgcccggcccaaaagctattttttaaataccaaagtttggatggaaaaacaagttggggtaaccccagcaatttaggagaccaaggcggaaggatcgcttgagcctgggggttcgagacgagcctgggcaacaatggtaaaacccagtctctacaaatgataatacataaattatccaggcatggaggtgtgtgcctgtagtcctgactactcgggaggatgaggcaggaggattgcttgagcccaggaggcagaggttgcagtgggttgagatcgtgccactgcactctggcgtgggtgacaaagcaagaccctgtctcaaaaaaaaaaaagaaagaaagaaaagaaacgaaaagaaaagaaaagaaaaaacacagccgggcatggtggcgggcgcctgtagtcccatctactcaggaggctgaggcggaggttgcagtgagccaagatcatgccactgcactccagcctgggcaacagagcgagactccgccttggaaaaaaaaaaagaaagaaaaaaacaaggtgaaaatgaattgctttattgtttatttatctatttatttattctttttagagacagagtctctctgtgtcacccaggccagagtgcagtggcatactagcttcacaagagcctcaaactcctggactcaagagatcctctaaccttagcctcccgagtagctgggactacacatgtgtgccaccatgcccagctaatttttaaaaatctttttttttttttctgagacagagtttcactctgtcgcccaggctggagtgcagtgatgcgacctcagctcactgcaacctctgcctcccaggttcaagcaattctcctgcctcagcctcctgagtagctaggattacaggcgcacaccaccacatccagctaatttttgtatttttagtagagacggggttttaccatgttggtcaggctggtcttgaactcctgacctcgtgatccacccacctcagcctcccaaagtgttgggattacaggcgtgagccaccgcgcccagcctgaattaccttcttaaaatgccatctctttttctcagagtgaacccatctcctctttgctaaaccatatctgctccccataattccatcaaggaatgttctcatggtactctacacactgtagtggagaaaggacttcccagagaatgcttctccactcactcatctgtccaaaacagtcagacacgcttcttgctagctgctctgagaaaaatagaaagtgtgtgcttcagggacagtactgactaggggctccaagtagtgtgggtgggatttgaactggtggggaggaaggctgaatgctaggagaaggagggaattggcgcaggcctaagtaaacacaagcaaaaggagaggacaggagaactgtagggactaggacccttgtgaagtcaaagtcagctcttgcatggtgggccttaatgcaggcccagatgcctggagatgcagctttttctggatacactgaaggctgyagaatgttcctggaaagagactcatatagaccaggcctggcacagtctatggccactgattttcaaatcaatgatgggcatctccctgccccacccggctcccagagagtctgatcagtaggtgtgaggcccagaaatctgcaccctaaagccgccaggtgactccgatgcaggtggtctatggaccatgctttgagaaatactggtagaggcatttaatatgtgttagagacatagatgtgtacatgaggatggctgcaggacagactgaggtctccaagcagcttgcttaaggaacagagtcccatctctgacctgtacaagctgagagggattgttcacctgctcagggcaatcaagaggagcttaagagtctgtgttggggaggagaaagggggaagaatcccaggccgcacagccttggagaaggaaacttgcaagaaagaatatagatttctatttagagaattttggttaaactttgctgtgtaatatgcaatacaccctcgcatcagtacccccattatgtttcttgccagtgttttgagtattgggcttttgtgatggggaatgtgatgaagtaccgagtctggccctcgttaggcaggaaagtcttccaaaggggatatagccacattcaggccacactgataggcctattatacccactaataagatgctgtgctaggcacaagcttacctttattgagtttgtctgtagtaggaggatacaacaaataattaccagaaatgccataagaggcttggggcggtggctcatgcctgcaatcccagcactttgggaggctgaggcgggtggatcacgtgaggtcaggagtttgagaccagcctggccagtatggtgaaaccccgtctctacgggaaaaaaaaaaatatctgggcgtggtggcaggcacctataatcccagctgttcaagaggctgaggcaggagaatcgcttgaacccgggaggtggaggttgcagtgagccaagattgtaccactgcactctagcctgggtgacaagagcaaaactgcatctcaaaaaaaataaaataaaataaaaagctgggcacggtgactcatgcctgtaatcccagcactttgggaggccaaggcgggcggatcacgaggtcaggagttcgagaccagcctggccaacacaatgaaaccccgtctctactaaaaatacaaaaaattagctgggcatggtggcaggtgcctataatcccagctactcaggaggctgagacaggagaatagcttgaacccaggaggcggaggttacagtgagctgagattgtgccactatactccagcctgggcgacagaactagactccttctcacaaaaaaaaaaaaaaaaaatgccataagagaaataccagttagaaatttaaaggaagaggagattatgctcaagacaaaatcggaaaagccttttctccagatccttcaaccctcagcccacaaaacatgttcaaatcaccttaaaaaataaatttctaaaaataagacttctcttcaatcctgcatggccttcagctcctgccctagtccttctctttctctgcagatccaaacttggaattgtcttcactcacgcttcccactcctctcatccattcctcaaacactgccatctggctctggccccacccctttgtcgggccccttcaagtccttgctttctctgctgcatctgattcttctgacgtctgctgggtttcccttctccttagattctgggagcccctcttctgggtgttctgctccttcctcatctgtaggctcttcatttttcttccagctgcctcgtcccaaaaatgttttagattttcttttttagttgtagtgtattgagaagatgctatgtgccaattctttaagcattacgcatttactccacacacatttactgaccactttttatactccagacactgttctaagcggtggagataacttactagacgagatgaatgagggccctattttaccattagatttttttgtttgttatagatggagtttcgctcttgttgtccaggctggagtgcagtggcgtggtctcagcttactgcaaattcgtcctcccgggttcaagcaattcttctgcctcagcctcccaagtagctgggattacaggcgcctgccaccacgcctgcctaatttttgtatttttagtagggacggggttttaccatgttggccaggctggtcttgaactcctgacctcctgatccacccacctcagcctcccaaagtgctgggattacaggcgtgagccaccatgcccagccaatctcccattagattttaatgggaggagacagaaggcaaataaataatttcgatagtgatcagtgttctgaagaaaacaagacagtgcaatgacagcatcagtctggagtgagggggtatagaaactgaaagaagtcaaggccaggcatgggtggctcacaactataatcccaacactttgggaggccaagggggaggatcacttgaggccaggagttcgaaaccagcctgggcaacatagcaagaccctgtctgtatttttttttttaataaacaaatgaaagaagtcaacattcagcaattgacttccaaaacaggatttttgagtctccagcacaaaacaggatttttgagtttccagattttcttctggaaagccaggctttactcagaaagaaaagagtttttaaatctcttaaactgacatcaacatggcaagaaccaggggtaccatacttgattacctgttgaatacagagaactcaggctacaacgtgagggaaatccctgcgttataggaggaggtgaaagccctccccttgcagcctagagtaggatggagaagagaaatgaggaagaagtcgggcaaagaggtcaagtgtccttgctttccttcactcccagtcacgggtgagaggggtggctggatacatccacccaggtgggcatgggctgtctccattctccttgccctactgccccacagcccagtagaccctagcccgttgacctcacttcataaacatcttgttcgggtcctcgccatccccacgggccccacctcaggtcctgtaaccatctcaggactgcagcacgggcctcccttcctgacttaccctccacatcacagccagaaagaacaagctaaggtgcaatctgatcaccagccctgctagctacaatactgtcctatacctgtgggacagtactttaagcctgtattgtcaagtttatttttagaacttcttgctagtgacctggtaattgttgcacagctttcaaaacacactgttaaaatggtcctcaaagtgaagacataatcaggcttagcaattctctttggtgattttatttgatctgtaaccaagcagcttcagctgtagctttaaataaactgaggggtggagccgggtgagaatcggggatttggtgaagatgtttcgttcccagggcacttccacaaactcacagggaggccgcaggatttttttaattttcaaagaaaatacagtggcactgaacatctgtcctattaatgcttaactattagctaagattgttaagtttcaaattaggctgtgctgcattctctttgatgaaatatctgggaagctgagcttgcggaggtttgggtgataagaagcaagaacccagagaaaatcaacttgaacaggagatgagggtggtggcgtccgttcggattccaaggtacaaaaagctgtgcagtgcctaacaggcacacacaccccattagtaagtcattcgttgtaatcaaaaatgaaattaggccggacgcggtggctcatgcctgtaatccccacactttgggaggcgggtggatcacttgaggccaggagttcaagaccagcctggcacagtgaaaccccgtctctaccaaaaaatacaaaaattagctgggtgtggtgaggcatgtgcctctagccccagctacttgggaggctgaggcaggagaatcgattgaacctgggaggtggaggttacagtgagctgagatcacaccactgcactttagcctgagcaacagagtgagcccgtctcaaaaaaaaaaaaaaaaaaaaatttctcaatttatgtggcttcttttctccaaaataatatgacaagctactaagggcagaaatgcttcataagttgtttgaacctaactaactaaagaggagttggatatttattttggcataaaagttactgaaacactaagattgctgtgaacagagaaagttgggggacctctgttaagctcttagtttaaagacatatttgtcttgaaggacgaggcaccagggcttacacctgcaatcccagcactttgagaggccgaggcaggaggattgcttgagcccaagaatacaagaccagcctggggaacaaagcaagatcccgtctctgcaaaaaaaaatttgttttaaattagctgggcatggtgacacacacctgtggtcccagctatttgcaaagctgagacaggaggatcacttgaactcaggaagttgaagctgcagtgagccatgttcatgccactgcacaccaccctaggcaacagagtgagattcccgtctcaaaaaaacaaaatgtctttcagagggttaaaaacatatactcagctgggcacggtggctccctgctgtaatcccagcactttgggagacggagacgggattgcttgagatcaggagttcgagatgagcctgggcaacatggtgaaaccccctctctacaaaaaatacaaaaattagctgggcgtggtggtgcacacctgtagtcccagctactcaggagtctgaggcgagaggatcgcttaagcctgggaggcagaggttgcggtgagccgagatcactccactgcaccccagcctgggtgacaaagtgagaccctgtctcaagaaagaaacatacactcatcaccatcactggcagctgtagcaacaaatgggtattgaccactcacttctgagctctgaagcagctcttggttcaatggaatgcttttgaattcttgcacttattaaaggaaatgcattcaacggaaaaggcatctagtcagatatcttagaatggcttcttaagtgaactgacttactcaaatcatcccctaaataactcttctctgttataagaggataagcaaagttattgtcacttgaatgctttatatatattatattatttcattttgagctaaattatgtgcatttgagatataatatgctatctgaatattttatgggtcacaaggtgccctggcataatccagtggagatgattggtctacttgtttacagaacttaaaattacattttattgttttatgttattaaacagttcaatcatgatcatttcttttctttatgatacactgttggccatgcatattgtttacttgaggtctagccctcagtcaggtttagaatctaaataatctcctctggcaggtatatactaacttttaattggcttatattcagcaacaagctgaatataatttaacagatattgaaaaatttgaataatattcatttggtaaaattaggctaagattataacgtttttcttggaggattccaagaaagtaaaagcagacttacttaaaaatagacattttcagccaggcacagtggctcatgcctgtaatcccagcactttgggaggccgaggcaggcggatcatgaggtcaggagttcaagaccagcctcaccaacatagtcaagccctgtctctactaaaaatacaaaaactagccgggcatggttgcacacgcctgtaatcccagctactactcaggaggctgaggcaggagaatcgcttgaacctgggaaggggaggctgcagtgagccaagattgcgccattgtactccagcctgggcgacagagggagactccatctcaaaaaaaaaaaagtagacgttttatgatactaaaataatttgacaaccagagtgatcctcaaacatttgtaggctacaaatgatgttatagcaccaaattctagaacctcaattgtggatttaatggtatttctggaggagatacacagtgatattctaaggaaaaccatgcctctgcacacaggcatctccttggcctcttacctgagaaggcaaaaagccactgggacggccacatcaaaaacatgtcattgcacaagaggctaccggtaaaagttaagttgctgtttttgatttctctttaattttttaaatgtttgtaagagtcgggttgcactatgttgcccagactggtctcaaactcctgggctcaagcagtgcccccaccttggcctcccaaggtgctgggattacaggcatgagcccaccgtgcccaaccagtttgttattttggtaggccctgggcagtcctacctcagtctctcctcccagtcccccctccagtcccctcagtcccttctctgtatccccctgctatagtctgaatgttggtgtccccgcccaaaattcctatgtctccccaaggagacagtgttaggaggtggggcctttgggaggtgattaggccatggaggtggaggcttcatgaatgggattagtgcccttataaaaagagacaccagagagcaccctccccctttccaccatgtgaggacgcagcaaagaggcatcatccatgggccagtaagcagccttcacccaacggcaagtgtgccagcacgcttttgttttgtttttgttttcgtagacagccagcacctttgatcatggatttcccagactccaaaactgtgagaaataaatatttgctgggttgttgttgttgttgttgttgttgttttgagatggagtttcgctcattgcccaggctggagtccaatggtgcaatctcggcttgctgcaacctcagcctcctgggttcaagtgattctcctgcctcagccttccgagtagctgggattccaggcatctgccaccatgcccaactaatttttgtatttttagtagagacagggtttcaccatgttggccaggctgatctcgaactcctgacctcaggtgatctgcctgcctcggcctcccaaagtgctgggattacaggtgtgagccaccgtgcccagccaatatttactgtttataagccacccagttgaaggtattttgttacagcagcctgagctgactgagtcaccccttagtctcaccccgcagtccccctcacattccccccctcctacctcctgagtccccccacagacccctcagctcttccagtggctgagtcctctgctatatgagcctcctatgccataaacagctggagctgcaccggtccctgtcacactgtgtcacctga

SEQ ID NO: 97578 - DNA, 12918 bp, Homo sapiens
acctctgccttcctgggttcaagtgattcccccgcctcagcctccccagtagcggggactacaggcatgcaccaccatgcccagctaattccttctgtaattcttgagcaagtgtttgctctggaaacaagcctacaatttattgggtaagtaaaggaatccatcaatggttttctacataccagagagtaatagcttaatatacaccaacacaaagattgcaggtcattcagagctgaaagaatgttagttgtccagggagcatagaaaatgactgcaaagctttatttgaagcatgcaatagtttgttaaaaagcaagaaaacaaaataatgttttgtttattctgttctccaaggatttaaaaggtttttcagctcttaaaacctgcctctagatttctttttggttcccttatcttcctttcttagatctcctacccaactcatgatgcaaacaaagagatagtaatcttgacatatttccaaataaaaataacttccaactgcttcgactttagataattcatataaatctaacaaagtcatgtcctttgttatcttcttgcataggaaatgttgatccaatcccaactccaacaggaagtatgatcagtagttttcaagttcctaggaaccatttctcataaggagaatctatcagcaaattattagattttttgcttgtcttcttaacatttctaagaagataagaaaggaaggaacaaattgcccagaccactgtccagcctacataaaacaaactacctgctccattctcctgaaaaagaaccagtcagtgataataataggaattttggaaaaatttaaaacttgtttgagcctccaaaaattatctagtctgcagccaccaaattttttcctcctagtcatagtgactcccctttaaaactcctcatgattccacactaaagaggctcaaagcatctttagttgcagccattataaggaaaagaaccctgccagttcacctactgtcatgtaaagtcctgaaacaggagttcctaagatgcttttttttttttaacctagttggaagatgtttttatgcctaatttcttatgtttggttgacttctgcaagtatttatatcttatcatgatttctatttatcatgatttcaatatagacatcagcagcttaggtttagaacaattaaaaagtatgtttaatgacattatgtgaattaaatgtctccactcaaacaggtccttaggacaaattttgatgactaattctgggctgaggcaaacacacttagagttgccaatagtttggctgaaacgtgttgctcaatatttttctatgccagtcttcagccactttacccttttaaaaattctatctctacctaaaggtacaaagaacagaagcaagtttatgaaaaacacagcgaaaaaaatgagagaattacatagacttttgcctctgtccccaggcactttacacacagggcaaagggacacaggatttaagggaattttgctggaaaggaggggttcaactaagaaacatcatgaattctttctgcactacaattgtatgaaaagggcaaaaggtgaggcatgaaaaggaaacaggtccattgactaagtaaagtgatagaaaattgagtttgaaatgacaaaattgtgttaactgcatttagtttactgtttcttacatcctctcttatttcccttttctcaatacattgtactattcttagccactgttttattacaaataaaaccttcacaggaaacagaaggttagaagaatctgaaaatcattctttcccttataattcttgacttttagatgataaatccagtttttctagcagtatgttaaaattagaagattcatctgaatatatttaggcttaaaacaaactttattcacaaaacacagctatatctatataaaaaaagctaacttcacctcaaaataattcagattatattctttttttttttcctgtttctccttcccttttttttccttttttttttaaagtgatggggtctcactctgttgcccaggctggacttgaattcctggtcttgagggatcctcctgcctctgcctcctaagtagctgggacttcacgtgtgcaccaccatgcccagccagattatcctttctgagtttgctacacggaggggtaactcatttacctatgtagatccaattccacgtagggaaaaatgagtttctctttaatcaattcccaaatgattcgtgtcatttcatctccttgcatctctaccacagaaccgccactgatttttttggacattttgacttcaataaacctaaaaagaaaaaaaaaatacatgccttgtcatttatttcattataaagtgaaatatataaacaacgtagtgtttatataaacaacgtagtgactactaaaagaacaattcatgcaattcaatttatgtgtagttgaataaaaagctagtaacagcaattctatttaccattagaattgagtatcttctctgaacaaagtattgtgttatgtttcacacgcggtttctgagctagccctcataacaatccaaaaaaatggccatcatttccccattttactttgttaaaaaaaaaagagctttcccaaggccacctagctagagcgtggcagagcctgaccctataacgtgcccttcataatgcaatcattattctcaactactggtttgtcttaagaaatgagattatttccacaatctcatgtttattgaacacttcagtccaactcatcattttactgggctctcaagatgtccagaatggtgagtgctagcatttctcctcctttaagaggctgtttttgttatttaataaaaataactagccatgaggagattcagctggttcctgtgacccatattcagggaaactttaagtctaaaagcgagacgaagaattcctggtggaactgttttcctagagataacacagacattggagatgtggggctaaatacaacaaagtgatttctcaattagaagaatctctatacagtagggccactgcccaggacccaagcatgtccctgtcatcttcttctggctgttcacaggcaagggtaagctgctagtgagtgggataggacaaactgtgcattgtcctaggaagacagcactttaaggatagggtgtgggggtagcatatacaaatcaatctgattctcagaaagtgcaaggttggacgctttggaagaaatgaaactgtcccagcttgtccctagaggcagaagaagctctgagcctgctaaaagttatctattccttctaatgatgctctaatcgaaacgcttttttaatccaacaacacagctgcaaattgcttttattctcttaaggactaaaaaagtcaagagaattgactttaaagaattattagataagaagcctaaaatagtctttcttgaaaaattgagctaaagtaatttggtctttaaataaaaatgtaatgattagtagacagtaagcgtctgtttcttgacaagcctggatgtatttccaatccccaggcccattttcacttcccaaattcgcaattctagaattcttcttactagtgtttaggagattcctttgggggaaccttctggaactgaactagactaaaagaaatgaacagaatggtgtggatgagtcaattacttcccatttgtaatgtcaagtataatttgtagtacagctgaaagcatatgattcagttcatgtttgattccactgtcacacctatccttgttttaaaacaaagcaaaaaaggaggcagtgaacttatctggttcctgataatacacttccatggccatgtccctatatagtatgatgcaacagtcatgacatggcaatttattcttgatggcaaatacagttaatagaggtcaaatattgtacctaaaatgtgaagactgatatctttttagttcactatttccttctcagttaaagcaactgtactctctgcagtaatctttctttatctcataatgcatacttcagacgcttcaggttttcctcacattacttagccatgaaatttttaccatcttttaactaaaacagtgaagctttattgttactaccatgtggaacataattgtatttcttctggatctgatttccatgggatgggcttgaggccccactggactgacttctccacctttgttgcccctcagattttgtctccaacccaatcccaacttcagaaggaagggctgttccaagaccagcaggcaccagctcatataaagtagctgaatcctatctcctaacataattgtgcaattccagaaaataaacctggaataacaatacagagtagtttaatgaaaaaaaagagccatttaatattattttcatcaacctcaagtttttggccagattgttttttgccgagttcatgaactacaataatttctgggcaaaaaggatctcttgcagataagacactgtattaaaagaaacaaggaagctgttggaattcgttgttggaaatattcctcactcattcccttgcagtgcctcggcctgcccccaagaccagttaaacactgtactgccacatcaaagaaagtacagaagaagggggaaaatttgctaattctcaccttgacagtgaatagatttcttatcaccccagttcctcccagtcttgcagactcaactgaatgtagtttatcgcctaaaacaaaacaaggaataaaagtgttaacatacagaacactcacaggagaatttagctgtttttagtacctgccagacagcccagtttatccggtttaaagtacagtgctgagtgtactcggtgggacaaaggccaattttaggcccgcaggcactttccaaataaaggtcatgggagcacaatttatctctgcgtgtgcgagggcgtgcccccgcttcgccgcccgttagcaggtcttggggtttgcatgtccttgctcttggcctgcacccgtccttatggccgttgtgcaagagggctgcaatcaaggctggatcggtacctccttccaggtctccacgcccgcccctcccctcccctcccctcgctggtgctgggaccttttaaactccaggcacccggaactggcgggggtgtttcccccagccccctctcgccccgtgtggcctagcgacccctctgaaggccgctggagctccgcccctccacgccccctggcggacgcgagggatcggcttcaaggctattcctcgccgcctgagttgcctgcagacgcccgtctgcggcttacagccttctttgcatccagcccccagctgctgcacgttttcttcctcctacactccaggcttagtcttctacatgcattcttgcaacttccacccctcgattttccaacccaagtgcagacctgattttccccttgtcgttgcatccaacttcctcaccgcccagtttctccctcccaggcccaaaagcagaccttctgcatatccaagcatccagcatcccctccttcccttttcttttcccattctcaatacctggatttgttcccttctttgcacgcaggccttgactccctccacacccaagatctgcgcttttttcctttaccccattcctgccttctgcggaattagagccacccctccacagccagggaccggggccgccccttggagcctgaggttacctgccgggatgatatgctggcgaagagttggggcgccacagccgctcacaagctcagactcacaaccacagcctggcaatcccaaaccggactcccagtgcctccgcttctgaagtagactctgcagaaacccgggaccacagggtaggtccgagcttttcctcttcccggctttgtcccctcccaggccccgcctcctcagcccacctcccccagccccgcccccgacacgcctccaatcgccacacgccaattcccgtgggatgggcggagtcagcgagaggggcgtggccacagtcaaagatggagaatccatggtgccactttcccggtgatcccggtgggggaaggggttgccgcccggcagagattcagtcccgaatcccgacagcgaagagacttgtatgccacctgcaggccggggagcggggcgcgctggggctgcaccaccccgaactttgtaacaatctagagcaccacagagtgtttccaggtcggcacaaaagcgaacgggacagggcgccctgggcggcggcagcttggccggcccgctgcctagcgcgcccccgaggggcggtaatggaacgtacctttgkctgaagaaagagtgctcccggccagcgcggggtcgcctagggggttccgcgctgcctaatgcaaaggatggaaaagttacagaagcaggtcctgacaccacctatgtctaggtctttagaaactccattgattgtttgcattagaagataatgaatgggattcttattattttcttttttaagacagggccttgctctgttgccctggctggagtgcagtggagcgatcaccgctcactgcagccttgacttcctgggctcaagagatcctcccacctcagccttccgagtagctgggattacaggtgcacayaatcacactcaactaatttttctttctttcttttcttttctttttcctttggtagagatgggtttcagyagcccaggctggtctcgaactcctggactcaagtgattggccctcctcggcctcccaaagtcctgggattacaagcgtgagccaccatgctcagttggcgggggattatctgtgatccaatgaagttggactagagatgtgaagccttagaaaacggtggattgaaaaaagaattttagtctcctccagagattatattttgtgtgttcattgctctcaaaaacatgaaaataaagagtattttatattgtgatttgtaggacaatagcatgcttgtatattgctgcccagaatttaatgctccaatatttatttatttatttatttatttatgagacagagtcttgccctgacaggctggtgcagtctcggctcactgcaacttccgcctcctgggttcaagtgattctcctctttcagcttcccaagtaactgggactacaggtgtgccaccatgctaagctaatttttgtatttagtagagacggtgttgcaccatgttggccaggttggtctcgaactcctgacctcaagtgatccgcctgccttggcctcccaaagtgctggaattacaggcgtgagccaccgtgcccagcctccaaaatttattttaaaaaattatctctaacattgaattagtacattattctttgaagataaactgatctacgtggtactactcaaggtgcactttggacaccagagggcactggtatttttcccgagagaaaagaaaaaagcatacaccttgtcaacttggtttttgaggtggcttaagggatattggcagccacctccatttattcctgtagaactgtttagagaggtatatgagctttttgaagggggtctgaccctccacacctgtgggtatttctcatcaggtggagccgagagactgagaaaagaaataagacacagagacaaagtatatagaaagaacagtgggcccaggagactggcgctcaatgtgcaaggacccgcaccagcgctggtctctgagttccctcagtatttattgatcactatttttactatcttggcgaggggagtgtggcagggcaacagggtgatggtggggagaaggtcagcaggaaacatgtgagcaaaggaatctgtatcatgaataagttcaaggaaaggtactacgcctggatgtacacataggctagatttatgtttcactttacacaaacatctcagtgtagcaaagagtaacagagcagtattgctgccagcatatctcgcctccagccacagggcggttttctcctatctcagaatagaacgaatggtcagctttacactgagacattccattcccagggacgagcaggagacagaaaccttcctcttaactgcaaagaggcctccctctttcactactcctcctcagcacagacccttcacgggtgtcaggctgggggatgtaaggcctttcctttcccacaaggccatatctcaggctgtctcagttgcgggaaagcttggacaatacccaggctttcttgggcagaggtccctgcggctttccacagtgcattgtgtccctggttaatagagaatggagaatggtgatgacttttactaggcatactgcctgcaaacatactgttaacaaggcacatcctgcacagccccaaatccattaaaccttgattcaatacagcacatgtttctgtgagcacagggttggggctaaagttacagattaacagcatctcaaagcagaataattgttcttagtacagatcacaatggactttcttatgtcttccatttctacatagacacagtaacaatctgatctccctttcttttctccactcttaattttcatcttgaatctgatgccctaagacacctgagactgtaattactttatattatatcaggttcacattgcttattacccctttctccctaccgaaagtaagcattcatatcctttcttgttcccaaaataatgtagggcagccataaaaacacatcaaatatagcacaataaaaacattgactataattgagaaaaataaggttaaaaaatgaatagctataggatgttatatagaaccaaggcaaattcaatcatcaaacatgttatatcaaatcctaaacacttgctagagatggctgcaaatttggctttaagccaatgtactagtaaaggtggcagttattggagtctcagcatctaaaacagtgtttcctaagccagtaatggaggagttgattttccactgaaaaatctggctgggtgcagtggctcaagtctgtaatctcagcacttcgggaggcgaaggcaggaggattgcttgaggctaggagtttgcaaccagcctgggcaacatagggagaccctctttatacaaaacaaacaaacaaacaaacaaacaaaaattagacaggcaagcttgcgcctatagttctacctacctgggaggcttaagtgggaggatcacttgagcccaagaattcgaggctgcaggctccagtgagctataattgcaccactgcactctaactggggcaaccaagcgagatcctatctcttaaaaaaattatttttcagatccctaggattgacattaaaatattgctataaatatgcataaaactagatatatgctccttaggctgacagctcatacaactgtaaaataaaaaaatttatagataaaatgactagaaagaaaagtagaaaacaatacatcaccattaatatcacttaaatacaacaaataacatttagctgaaattaaattacttcttgaaatgggaagatgaagttcactggttatgtgcaggttctttttttttttttttttgagacagagtctcgctctgtcacccaggctggagtgcagtggcgcaatctcagctcactgcaagctccacctctcgggttcacgccattctcccgcctcagcctcccgagtagctgggactacaggcacccaccaccacgcctggctaattttgtttttgtatttttagtagagatggggtttcaccatgtgagccaggatggtctcgatctcctgacctcgtgatccaccagtgttggcctaccaaagtgctgggattacaggcgtgagccaccgcacctggccatgtgcacgttcttttttacatagccggcctattttactggatgacatatgatggttcatttagcccagcacccctctctatttggttaatatttcatgtgttgacatcatttgtctttcatttagccagtaaaagaatctgagtattttaatagtctggccccaaatactgttataaacacaaatggaaacacaggccatgaaatttctgtaagcatttggttttgacacactcatccagataatgggattctcataaatattctaatgtggttgtattttcattttgattatcgaaaaaaaactgaggtagaatgaatagagcttggtcattgattgtccatgaagattatgagagagagaacggcaaaagggaattctgaatttggagtttgggagacaaggtgcagttcaacaaagaaggaatatacatagagtcacagatctgatggccaagatcatgggttaagtttaaggtttcttaactttgcgatgccatgggacagcaagatgatgtccaggaggcagttggcctcatctgcagttcagaaagggtgggctggagaaagaaatttgggaatctttagcatgtcttgataacagttgaagacagagtatatattatctaggacttcaaagtaaggagaaaagtcaatctcagtgagaactctgagggacacttacgtcttaaaggtcaggtagaggaaaaggagcccccacaaagagaatgagaaggagagtctgggggttaacaaagaatcagcagagcctgatgtcatagaagccaacagacaagaaagttttcaaaaaagagggagtactacagagagattaaaagaaaaagacagggtctgaaaataattttggcaaaaggaaaacctcttgaatgcacttttagtaaaaaggctctatgaggatgaagaagatagaagtggaatggttctacgaggatcagaagatagaagccatactacaggggactgaagcatgaatggggggtatggaaagggagacaagaaaaccttttcaagaaggttgattgtaaagtgaagaaaaacacttttttatttttgatacggagtctggctctgtcacccaggctggagtgcagtggcacgatcttggcttactgcaacctccacctctacggttcaagtgattctcctgcctcagtctcctgagcagctgggattacaggcgcgggccaccacgcctggctaatttttgtatttttagcagagatggggtttcaccatattggccaggctggtcttgaactcctgacctcaagtgatctgcccgccttggcatccccaagtgttgggattactggcgtgagccaccacgcctggcggaaaaatgcttttaaaagtcttagtcaacatactattgatgtctacatattttaaaaaattatttgtattacttccatgttggttgtgttggttagaatggatttgattatattgctttcatgtcatttgtgttggtttgtattggatgtttcctttttgtttctttaatgtttaaatggctgtgacaaatgtctttatcttccttttttaaaacacagatcaattctttgggctacattgctagaatgggaattattagatcatgaagtataaatatatttaaggtgcttgttaaatccaccaaatcattttctaggggggaatataccaatttatattttcacatgcagtgtaagagagtgctaattttattgcatcctagctggaacttagtttcataatttttacaaacatgtctgcatccctactaaaaggaattggtgctcctttgagagctgattgattctaggcccggggcagggaaagttcaagatgagcctgctgggtcaaaaagtaaggaagtgctctcaacaaattaggtatagcaagaatatgcctcaacacaataaaggttatatatgacaaaccaacagttaacatcatttcaacagtaaaaaagagcttttcctctaaggtcaggaacacgaccaagacatgcactcttgccacttctatttaacatagtactagaagtcctagtcagggcaattaggcaaaagaatgaaataaaaggcatccaaattgaaaaggaagaaattaaattgtacctgtttgcagatgacatgatttttttgttttttttggagacagagtgttactctgtcacccaggctggagtgcagcagtgagatctcggctcactgcaacctctgcctcctgggttcaagaaattctcctgcctcagcctcctgagtagctgggactacaggcatgcgccaccatgcctggctaatttttctatttttagtagagatggggtttcagcatgttggccaggctggtctcgaactcctgacctcatgatctgcccacctctgcctcccaaagtgctgggattacaggcgtgagccaccacacctggcaggttacatgatcttatacataaaaaaccctaaagactgcaccaaaaaactattagaataaacaaatttagtaatgttgtaggatataaaatcagtatacaaaaatgagtactgtttccaaatattaacagtgaactatctgaaagagaaatcaataaaacaatcctatttgcaatagctacaaaaatatattaaaatacttagaaataaatacgggccaggtgtggtggctcacacctgtaatcccagcactttgggaggccaaggcaggcgaagcacgaggtcaggggtttgagaccagcctggccaacatggtgaaaccccgtctctactaaaaatacaaaaaaattagctgggcgtagtggtgggcacctgtaatcccagctactcaggaggctgaggcaggagaattgcttgaacctgggaggcggaggttgcagtgagccgagatggccccactgcactccagcccgggtgacacagtgagactccatctcaaaaaaaaaaaaaaaaaaagaaagaaatttaacagaagtaaaagacccgcacactgaaacctataaaacattgatgaaagaaactgaagaagacagaaataaataaaaagacatctcatgtttatgggttgaaagaattaatattgttaaaatgtccaaagtgatccacagattcaatgcaatccctataaaaattccaatgactt

SEQ ID NO: 97579 - DNA, 16735 bp, Homo sapiens; identical to SEQ ID NO: 97451

SEQ ID NO: 97580 - DNA, 16830 bp, Homo sapiens
tgggcaagaacctcagctgggtgaagctgtcagccacctcaggcagctggcatcctcttgcctcttcctgtctcctgcctccacctgctcacatctgcctgcacctgcccgcacctggctcctcttacctcatcttgcctcctcctgcctctacctgcctccatctgcccacatctgtctgtacctgcctgcacctgcctcttcctgtctattcctgcctccacccgcccacatctgcctgcgcctgccctcacctgcctcctcctgtctcctcctgcctccacctgcctacatctgcctgcatctgccctcacctgcttcctcctgtctcctcctgcctccacctgcccacatctgcctgcacctgccctcacctgcttcttcctgtctcctcctgcctccacctgcccacatctgcctgcacctgcccacacctgcctcctcctgcctctccttccagagcctatctcttccttctgctcatcttggccctgcccctgctgggctcagctggggcccacttgccctaaaagccctacccggaagccttggctcatcctgaccatgtggaagagcaacccaactccttgggttgctctttcaatttctgtgtatcagaactagactggaacatgtttttttttctccatgtatcctccagcacacctgcaccaaactggcccttcagatttgtgcccaaattgctaacgacagtgaagaatcctgtgtttgggcctctggcttgtttttattctggaataactagacttaaaatgtgagatccctgtttgaaaagtcacatacttcattcatcttccaaagatgaaaactaatatgcactcgtgtttgccacagcagaatgggaagtttgctacagcagaacgggaagttttaaaagtaaagcatgatgaaaaaccagaggattccaagatgaattctttaactgcgggaatgattcccttttattagtaagaagaaaaatttctcaagtcatgttactgaaaaagctataacatgaaccacaaatgatttcacttgctgaaacgtctggaaaaggatttcaatggcatgttatgctatttaaatgtaatgaatgatgagggttagttcatattctttgttcagaaaggcattcataaaatttttttcaaagggagggaaaaatgtaactgtagtggccagctttgcatgctgggttccttgcgttcttcagcgaagatctggtaacacacatccaaatttactccaatgcagagtgccctgcttcagcgaagatctggtaacacacatccaaactgattccaacgcagagcgccctgggattgtcagggtccaggcagggtcagagaagagagacctgggtcctgaggatgaagatattgcctgctggcaatctctactctaagaaaggtgactggcactgctgctatttaaccaattccaggtagttacaatagcattgatactaattttatcaatttacacactccaaatctgtagcaaaaaaatatatatattaagaagtaatatcgatgtgaaatatgccttaaagctataaaaagtaatatcaattctaaaaatgttttgaattgaagaaaatacaaacttattttttaaaaaaagtcaatttttgtttattctgtctccccaaaattgcccaagctagccttgtactcacaggctcaagcgatcctcccacctcagcctcctaagtagcaggaatcacaggctcacaccactgcacccagctgcctgtcgtttgccttgacactcctcccaaggtgctgggacagggtgagctgagcccaccctgtcagctcacttgtctatgtctcctaggagactataactttttttctaattgttgactctatccaacaattagagtcctgactgatcagtgagagctccctgattggaaacaaagagtgtttcagtgacacagcacactccccctaattaaggggctgctatgctggctcctttacaacgattatctcattcagtgatcttttttatttctgtcaactcccttcacaggaaagaaactgggtccccagtacacaagagattttccacacagtcgtggcagcacttggcaagaggcaaggtctcctgtgacctttaagtcacatcacaccctaattgactgccatcctgaaatataaggaataaatattttccttctttctttttttaaaaaatgtgagagagcgttacctacttgaattattcttacacctttatgaatatatccaggtcacacgccacagagattacacacatgcatgtacacacacacacacacaccccttacgagtagcttattttacttttatttttttaagacagagtctcgctttgcctcccaggcttgagggcagtggtgtgatctcagctcactgcaacctcagcctcctgggttcaagcgatccttccacctcagcctcccaagtagctgtaattacaggcatgtgccaccacgcccatctaatttttgtatttttagtagagatggggtttcaccatgttggccaggctggtctcaaactcctgacctcaagtgatctgcctgccttgacctcccaaagtgctgggattacaggcatgagccaccacgcccagccacaagtagcttattttaaaaagtataagcaaaaaaattcccccttttctctaccgagatattgatcctacctggatcagaaacaaccctggggcctctgtttcttcatgtgtaaaatgccatccctggtgtgggtaatcactagaacctccttccagctcagaaaattcaggattcatattgtcaattccactcatggtttaatttgggcaagtgtggagttgcaaatcacctgattttcaacaattccagtatgagtggatggtacagagtactggagaggaattttaatcaagtgactcatgaagagatgccctttttttcttcctaggggaggaagagatgcagatttataaaaagccattatcatgtgaataaatacaagttaagccacattcttgaaggcttgatgccatgaataaaatgatgcagctaggtcactggcatcaacaccttcaccttggatttatttattgtccaggcattttcaggagtgagaatctcagagttagatctgcagggaatggaactgcctatggagcgagaaggactgagattgggggtgttgtagagtctcagatctcaacatccatatcgattcctagacaggccaccttcactgcagcaagagtctttaataaggccctttagagagcaacagcaacaaacagccatgtttaaactaaattagaattaaaaatcctcagctacttgccaactagaccatcctccaggggacgatggtactaaatattcagtgagtcaggatgggaggttctggtggggggtgggtcacaacatccacgagccccgggtttcagcctctccaatagagttactaccattagaataattcatgacacctctcagccccacggactctctgtaaaatgggacaacgcttcccttatgggattactgcaagggggaagctggggatgctggaaggcttcgtgattctagagccagattctctagagccaggagagcccagggcaccaccttctacccctatctgaagacccctgtggagtgggctgtcacttccagacagaagcaggttgaggccctggaaattctgtgtcagaaagaaaggcaaggaccagcggtccaggcaagcccagacatagaaaatacacactattaattaataccataacatctattcataacatctacaacataaacagctcaaattatgtcaagttccaaagtaccaaaatatgtttttattaaaaaaaccagcccccaaatccatacccatttatgaaacatgacataacctttgctgtggggttgcctctcccatgctgtggtgaatgatgtttgtagctagtggttttgtctttttaaagtgtaagatagaaaatggcactgtccccctttacaagatgacatcaacccctgggatatcttacaaatggagagtgacttccagattttaataagaaatgaaagttgtatcccatttgatgaatgaagggctaggccacagcttggagacgcagagacggtttttcctatgcagaatgctttgccgtgaaaggagagtgcatcccagaagctgcatgcctgagctcagaggcaatcgtcacctgcacattaggaaggcacctgaggtgagagcagagggaagaaggcctcgatggcagacccagagaaatcgctgtatttgcttcacagttagaggaaggaatcatgcagctctgaggcgtagtctaaatgtttgacccctttgcatcaccccttccggaagcttctaccttatggtggacttcaggtggaggggtccctgtgaatgtctgggtttgtagcagtgcttgatgtgcctgggcactgaggggacacggcagccctcagggagggactgttcaaagactgatgcccccagcacaaccctgggaaggaacaggaagcgtcatcaagccagggtactccgcagaagaggtcagagaacgtgccctcgggtggagacagggtcctgccagggagatgaaagggtccccgcgggaagaaaggggagcaaaggatggagttgcagggcccagatgccctcaggctgggaggagctgagtcacaaacagctgtccacagagtggccagctgcatggagacacagtggacatccatcaccaatctgggaaaggacaagaaggatcggttgcccctggtaatgggattcaagcctgggatgtgggttgggctgaaatgatctcacacgcccaccagcgctagagcctgagatgccccggggttgattttggtcacaaaagctctgcttactcctgacgcaaccgcatcctgccgccagcaaaggccacgtttgcaccacgggagctggaagccccggcagcctgggcagtgggaggggcagagagcgggctaaggaagaagcagggtggagcccggagcccacacccgacagactcagaggggactgctgggggagacagcactgtcagtcacgcgtcctggtgccagcctctccatggaaacgggaggagagaagggcaaacacagatgggagcacctgctaagaaaagggtttgcaaatgccacagaggtatgtagaggcacggacagggattggggaggagtggaggctatgctcatagcgggggccccaaacgtcagcagccctttcttcacaggcttaaaaatggacgctcccagggggcgctgcccccagagccggagccttaagggaacccacctcctgaggccgtggctcacggatgaccaccgttccatggctagaagggtcattccttccttccagcaagttcccacgcacatatgctgaccacctcccaggtgtagacagtgcccagagcccccaggcacagagcggggaaggctcggcccctgcttcccggtgctccacaacctcagcagagcaggccagtggggtggcggcgagcttctcctccttcgccatggaaaggagcatggggttgagggctgggagactggattctaacttccggtccagtgtccacgtgtccagtgtcgaagccccatcatcccccaaagacgtgacttatccttggggatgagtgcggcattctgggaaactcaaaccgtcaccgagctttctgtgaagtacttaggttttcccatgtagagaggtagcccagctcaatttgaggatagcgtcttacttactgaaaggcagatctcaaagccatgtcccaaaaggcagggagtctgactctctcttcaaagcaaatagatattctaacacatgaaggacaagaatatcaccttaatacaacaaggttcacattcaggctctcaacggtgaagcaatacaatgaacaccagtgaggtgtgaactcctctgcagacatggttggtgctctgcaacctcagtgaacacccctatagtgcaaagaaaaaagggaaatcaaacttcatctttttttccaagattgtcctctgcaaagaaccttcatttcagaaacccagaagttttcaaaacaactgtgggaaagagagatgagtgagttacaatcaccagttgtgtgtgtgtgtgtgtgtgtgtgtgtgtgtgcgsggggggtggggggaagggggataatgtatgtttacaggagttgtttagcaagcatctgtgctttataggttacaaagtattttctttgatatgacttcattaaatctcaaatcaggattatcatgcccattagggaaatcgaggtttagggaaaccacaggacttcggtaggggcctggaaagagaaaattcaatccagaccttctaactccaaactccaagctcttccactctgccacctggggtggatttgtcaatcccagctaagagaggtcaccctggacaactgcatggaggaaaataatgatgtatgtttagcataactttctctgttaaatgccagggagccttagatacattcttgatattgtaattaaatagctttttaatattaatttgtgattatgcttgcaaggaaagtcctaggaaacttaaaatatgctatacatctgagcacatttttatcgcacatcagaattctcrcagagtttaattgggcccatggtgtaaacagttcctcattttcatccagaacgcgtggcatgctgttatgttttcaggaaagagaaaattatcttaatttatgtaaagagtattcctaaagatatgtataatgtagtccacgaggattaaacaccaaatgtgtaaatatcacaaacttatctcagcacatattgtctctgaaatggaaacaactttctttgctgcaaacagtcactcaggagagccttgaattttgtcattttgctgtttatgtgtgtatggagggggtggtaggcagaatccaaaaatgtcccccaagatttccagtcctgtttttttccatcaaacagtaatccaggtaccgttgtgaagggactttgcagatgggattatgtttgctaaacggctgactgtaagtagggagattatcctggatcatccgggtgcaccctgtgttaccacatgagcccttaaaggcagacgaggagcaggagagccagagagatgagggagaaagggggtcagagagactgggagcacatggcgggctttaaagatggaggaaggagccacccgctaaagcatcgggacagcctctagctctgaggacctcccccagcccacagcctgtgtggaagctgagacctcagtcctacaacctcaaggaactgcattctgccaatacctgaatgagtttgggagtgaattcatcctgagcctctggaaaggcacatgaccctgcagcccgtcaacttcgtcaagtgagacgatgagcagagaaccagctgggccaggccaggcccaggcttctctgacggtgagccactgagtgagtggtactttgtcactgctgcgtgaggaatctgagcagggagtgttgagtgggagggtggcatgagcacacacagctgcaaaagagcacaggcgcccttctccaccctcctgtctctgttgctgcagggaaagcagagtaaaaaactgcagctgcaatgatgagcctgcgtgccatgcgcaaaaggctggagagaaactccgtgcagcccttcttcgccactgttcttaccgttccacctgtgtatgtcttcatttccccagaagaactgtacacatatggaagggaacaatctttttttatagctcctataccccaaaacataagcacttaacgtaagtttgcatatatttggccacaataggccaaatataaaatttaggacatccatttatcgataaagctaattctaaagcaacaatatcaataattaacacatggcagagttcttcaacgcggcatgttaattttcaatatagactttgcgtgtaatttgctttttcaatgtttttttctttttgattcgaggaggacaatcataagttgaattcaaataaaaataatacagaaccactttctgtgccctatattccttcttatattccttaatagaagaactgcaaaataaaattaatatattcatcataaataagctttatggttccaagaaacgttaaccattgaagacggtattgaaacttgacttaaagaatgagtgatgactaagtcaaaacttggctgaccatataaaagggtccacaaaagtcttttaaaaatatcccaaatagttaaaaaccatttttgctaggagatgagtccctactgggaagctttgatgaaaaaaatggagattaaggcagaaaaatatatcaagcccatggtgttgtggagataaacagtaataaaatgtgcatgataaatgatgataaaatacacaatcagayttttgtcctgcattaagaaaaaaactcctaattcctaaggtggagtggggtcatttttctggaatatgttagttcacattttccccacaacctaggattccttccatttgggtaacgatgcaaagggggcggtagagtttcagaaatcagaatagagaaatggcttgctgctcctgggaagggggcataggaatgcccacacttggcatttggaaatccctcttcatatacgaaaaacagaaagaaagaaagatggggtgggaaatattctatcacaggccagcttctgccttgaggcggactttgagcaaagtagacgtgtcacgagaaaaggcaaaaatgtaaagaacattttaaagtcagtgtgtctttcaaaggttcttaatattttctggaacacgaatcctttgggccatttagggaaatatcatcagaataatgcttttaattgcatacaataaaatatatagcattaacaacccaattttaaaaayaggcaaaagatttgaacagatactattaaaggagataaacaactttatatacaaataagggcctgaaaagatactggacactgtgagtcactagggaaatgcaaattaaaactgacatgaaatactactactcacctgtaaggatggcaaaaacttacaaaggaaaaaacaactggcgggccgggcacggtggctcatgcctgcaatcccagcactttggaaggccgaggcgggtggatcacgaggtcaggagattgagaccatcctgaccaacatggcgaaaccccgtccctattaaaaatacaaaaattagctgagtgtggtggcacgcgytcgtaatcccagctacgtgggaggctgaggcaggagaatcgcttgaatccgggaggctgaagttgcagtgagccgatatcgcgccactgcactccagcctggcaacagagtgagactccatctcaaaaaaaaaaaaaagtaaataaataaataaaaaataaataactggcaatagcaaatgttggcaaagatgcagagcaactgctggtggaaaagcaaatggtgaacccatgacagaaagtagttgggaagtttcttataaagttaaacacacttaacatgtgagccagcaatcccatcctatctacttatccatgtgaaatgaaaacctaggtttatgcaaaaacctacatgcacatgttatagccattttattcattaagtgcctcaaactgaagacaacccaaatgtcccccaactgggaaatggataaacaaactgcgctacatgcatacaacagaatgctactcagccataaaatggaatggactattgatacacacaaggatgtttcttaaatccgtgtgctaagtgaaagaagccagactcaaaaggctataaataattccacatatattacatttcagaaaaggcaaaattacaaagatagagaatagatcagtggataccagggtaggggtggggttacagggtctgacataaaggtgcatgatgacagattttttttttcgggggcagggtggtaaaatgtgcatgtctcgatagtgttactggttatacaactctgcatttgttaaaattcatggagctgtacgccaaaatgagtgacttttactccaagcatgtaatttaaaaaataaaatctaaaaacaatgcttttgttttctttctttctttttttttttttttttttgagatggaatctgcctctgttgtccaggctagagtgcaatggtgtgatctcggctcactgcaaccttcacctcgcctctcgggttcaagcaattctcctgcctcagcctcccaagtagctgggattacaggcatacaccatcacatctggttaatttttatatttttagaagagatggggttttgccatgytggccaggctggtctccaactcccgacctcaagtgatctgcctgcctcagcctcccaaagtgctaagattacaggtgtgagccaccacgccaggcctaaaaacaatgttttaaaggcatagaggatatgtaggattgcaaaagaagccaattacttggaaataaaagtgcaaatgttttctccgtctagatttgcaggccttctgaactctacccacaaactctcaagagaacccacccgctgcagcctgtggctcccaactstcctgcctacgcccaacagggaactggggatccgtattccagggaaccctctggaaacgtcacactcagttagcagattcttgagggcggtaactatagttttcagatctttgtgtcctctgtacctggaccaggtagagacttgataaatatctgtagttgttaaataaatgaaatgtttatctttgctgatctcttaaaaataaatcagttttacctacttgccatgcaactcacacttccaagtaatttgcttaaaatactttattatattaatattaaggatttatgtaataattcagatgtattaagggatatgtaagttcactatttacacagcatacatcatggaagacattaacctgaaacattacagttgactgaacctaattacataagccgctgtgaatgcaaagtaccccctaattttattttacaatgcatattaaactcattcctccaaatacaatggttccatattgtagcttgaaatgtaaaccagtccaatgtttaattttgcttttaagattaagtagcacgtgtgtaatttaaaagtgacttgaaacagcaagcagtgtcactgggcttacaattaatgaggtgttgtcaattgcaaacaaattgaatacataaagctgttaactacaacctctgtacttaacagacattcgctttccgtagctacacagctaatctttgttttcctgtgtgaaaggcaactgaccatggccttcgtgtctgacatgttgtcagtgttttgttcagctacaaatattgggctgaatgaagattgatataaaaatgaatgctatgatgtttttctaagtgaattcatcaatgaggcctcatctaccagtgtgctttccaagatgttatttggaaggtagatataaatttccaagtaaacacctccaagtttgtacccacagtacgatgtttgctgttcactcaatcagcgttgtagatgagtgcaggattccagataagcctatgagtctaacccagcacagctaatctgtcctccatccaggagacatgggtctaggtgcgtggaattaagccatcaaagctatgcaaaaggggaaatgaactggcactgagcacttccaaaagaaggaaggatacatcaattcaaccgatggtccctgtacatttgaaaacagtaaaagaattacatatctgcattaagtttcctagtatttccttcccgctcaggaattccaagctccaaggaaacaaacacaggcctgttgatagcaaacaagatttactgaaagagggagcaggacaggaaacaagggcacagagatgaccagataaacaaaacagaaactcatcagagaacgtttctgtgttaaattaaaggaattttaaagtccgtttggatgctgcatgagacaggctggccagataagcgtaaacagtgaacactgatgacgggaggtttgtgagtcatccactttacccctcttgaagttttgctttaactataaatctgacggtcaccactaatgcaatttacaatcttgaagaaaaaaagcaaatcagggttcttatctccaggaaatcaatatactctctaatagtttttgaagagtgcatcaattgtgttagccaaaacacgatgatgatttctgtgttttatacttaaatgcaatatgaagtatggaaaaagctgtttaaaagaaagccatcatgctttcaacaatactgtacaataataataaataatgagtcattcattaaaacgcaccaggtaaataggtattagtattctcttttaaaagtacaatcaaatcaagaaagtgattccctttcactgatacgactaaactacccactcaaaaatgttactttctgagttttcttcagctgtgtattttactcaaagacgtgacaacctccaaatcacagtctgcaattccagaaggtggcacaaaactagctgccccaattcccaggcagcaccccctccagaaggctcctctccatgaggagggggactgttcaggtctgcagagatgccctgggttggggagacaaactggggcttgatcccagctctactaccctctggttacatggccctgaacaacttagtttccatctctgagcattggttttgctaaccataatatgggcccacatcttacatacattaaaactgagaaaactcaaccccgctaagtggatccaccattacccactatgccctctcatggggagtgtcttgccacattgagtaggattctggtgtttaaaggaatacaagccagtacttcatctggcatcagccaatgatagttttgtgttccaatgctggaggaaaaagtagccgagttagacatatggagaaatacgctactgttcaacatgctatctccctaatggtgagcgagaacccaacccccgggggggtggggggcatccagtgtacctgcctgccattgtcactctccagtgtacctacctgccattgtcactcttggattaagagagacctggcgcagtggctcatgcttgtaatcctaggactttgggaggccgaggctggcagatcatgaggtcaggagttcgagactggcctggccaacacagtgaaaccccatctctactaaaaatacaaaaattagtcaggtgtggtggtgcacacctgtaatcccagctacttgggaggctgaggcaggagaattgcttgaacctgggaggcagaggttacagtgagctgagatcacaccactgcactccagcctgggtgacagagtaagactctatctcaaaaaaaaaaaaaaaaaaaaaaaaagacaactctctttcccttggtctctctcacttcccctctttctcccctctggtctttgattgtgacagcagcttcccaactcgtcccctgtctagttcctcccctgctaggcgtctcctttcctgtggccaccatgactacttcggacacacagagcccgtcgctagacctggtggagcagagtctaaacctctcaggcttgctcctcacgcccacaccagccagcctcccagcctcctctcccggcatgctgttatccaggaaatgtgaaagcaactctaggaaaccgaacaaaatacctccactatatatagtctcaaagctcctcacagaagaaaaacagaaatgttggaggtgaatgtccaaatgtgctttgccgcagaacaactcacagcgcctgcttctttgctcattcagatcctgccattcttagttttaaaatatgctcatattaaaacagccttgctggtaagaatgaaatcatacatgctctttaaaattttcaacaatctgtactccttgcaaaagacagttgattacagtggagatttaaaatgaaggaaaaaaactcattgttttttcattctgcatgagaggctgcaagcagctttctataaagtaacatttcctcaccgtgagcaaaagggaaaacttaaacactggctactctgccttgagaaaacacaatagactcctaatcttgaaagaaatagttaagaagtgaccatttgttctctaaaaagattagctgcttcacaaaaggattagctatggtcttctgaaaggtattaagcttacccagtgtatataaagcacaattccaattaacataacttttcaggagtatgttaatactgtaataccaggtatacttgtagccaaaaatgacacttgagctcagtatagacagggtaaccttttgtcctttgtgggctggtgaggtgccctttacctatcagctgctgctccaaagtgctccacctcccaggggaggtccttcctgttcactcacattccctccgccaagcagttaggatttgtcagggggtgacacagactccaaccatcaatcctacccaagatgttggtctttagggtgatagccccagggatgctttggaactgttgcagaggccacagctggaagggcctagcaggctcagtggccgtggaccacaggccacattcttactaaaagcttcctgtggcctggcctcgaccatggttcaggctgctagcttcctgggctcctccctgttttctgagccttgttctccagcttcactattgattctgagaactctgcggtagccgtctgccaagctccctttctcactaagttaaccagtcagatccgggatattgccaggagccacaactaatccacccggggtcagaaaagaatgaggatccctcacccatacatactgtttggaaagagccagccattctttcctgaaggaataaggctaaatcaggtgacaaataggatgtcaaagaaacagcagaatacagcttcccaggctaggtcctaaagacactgtaacgtctttcttgctttctcctggatcactctctctgggtgaagccagctcccagatcatcaggacacatagtcctgtggataggtccatctggcaaggactgaaggcctcctgtccatggccaacatcctccagccatggaagtggatcttccagcccaagccaagccctcaggtgtgctggcttcaggcaggtaagatggggcaaaattgccaaccttgctctagagctcagaaaacagaagactgtgctgaagattgagttagcatagttcataggaacagcctctgcagtacctgggaatgtgcatttccaagtatcccagggagctccacatgcctctgcttaaaatagagctggtaccaatgtctgaggttttcttgctttgcttattcattacaatgtccgctttctagaaagctcagctacttcaatgctccataacttctagattttaaaattatacattattgagactttgcagaaaagatacaaatgccaagttatatgggtcaatttttctgtattctgcagcccagtgggaccttattgaacattaaactgggttatctcagttaatcttgtaagtttttattattgggtcatcagatattccttgagtacagtgagggaagttgggcggaggggaacacattgactgttacctgatggtaaaaatcctgctgacaatcccatgtctgcctgatcttgtggtcttaaaacagctcacctggccagatgcagtggctcatgcctgtggtcctagcactttgggaggccgaggtgtaggcgtaggatcttgagatcaggaatttgagatcagcctggccaacatggcaaaaccctgtctctactaaaaatacaaaaattagccaggcacggtggtgggcgcctgtagtcccagctactcgagaggctgaggcacaagaatcacttgaatccgggaggcgaaggttgcaatgagccgagatcgcaccattgcactccagcctgggtgacagagggagactctgtttcaaaacaacaacaacaacaaacaagctcacccaccttcgcttgccctccctgctgaaaacagtcatgcctgtcaccctgtaacttgtccctatttcgagcacaaactctttctctacaaaaaagcttaagagtttgttctcttgtgttcctttcacttgttcactcagtttcccagagacatcttctgccatgcaccacggttaagtttatttgtatgcatcttgacacagtatttaaacctccaccaaatgtaccctggactcatcatggatattttccagcttaagccttctgtgggaacatcactccctaaaacccagaccagacatggaaaagtagcactcccagctctccctggatctgttctgatccctcaggggtctcagcttccaccaaccagacatcaggcagtgggaaatgaatgcaagatcctgacagagatacccggaagtaaactgcatgtggtttgaatcctgtgttaaaggaagattgtgtctccacactgggctggatgatatcttgatagagtttctgtcaaaacagaagctctccttggagcctttaaaaataattcaaaactttgggaggctgaggcaggtggatcacgaggtcaggagttcgagaccagcctgaccaacgtggtgaaacccagtccttactaaaaatacaaaaattagccaagcatggtggcgggcgcctgtaatcccagctactcaggaggctgaggcgggagaatcacttgaacctgggaggcagaggttgcggtgagccgagttcgtgccactgcacttcagcctgggcaacagagcaaaattccgtctcaaaaaaaaaaaaaaaaaaaaaaaattcaaactggttttcacatcagga

SEQ ID NO: 97581 - DNA, 56377 bp, Homo sapiens
  misc_feature (1)...(56377): n = A,T,C or G
agtgattctttcttatactttgttctgtgtttccttccttgctcttctcataatttccaagtatttagtttacttgagtgtttgcttatttcttgttcgtttcctccactagccctaagttccttaaagtcagagaacatattagttttacttggtgttgaccacagagcctgggacataaaaagcacttaaagttgaattaatgaataaaccatccatccatccatccatccatccatccatccatccatctagtcacagttatgatagaatcttcccatcatgtagatgggaaatagtaatttctcagggtaactctggttaccctgagagttctagttcaggacattagcaagagagttaaactgcctgggttccagttctggttctactgtttactggttgtgtgatctcaggcaagttaagaaaaaaacctctctgtgcatcagtttccatatctatcaactggcaaaatagtagtatcattctctaagggagggttgtaagcagtgtaaacagcaccaggggtatagtgcttatgtatgtgttttccctatgcagtctagccatgagcgtgaggaatccacttccttcctcctgtaccagatcccaaaagggcagagagaagggcaaggggtgccacggtgagtgaggctacagaaaatccctaatgcgtgctgccacatctgtgctgtgtgttggcaactgggggtggccctagggtcttcactgaagtggcattctggggatactgttcttgatgtgtagcccccagcctgatcctctggcctttttctgctagacaatctttagtggaatcttactgcttgcagttgagaaagttgactgatacagatgttaatactgaatacctatttcttttttttcttcttgagacgcagtctggttctgtcgcccagggtggagtgcaatggcgcgatctcagctcactgcaatctccacctcccgagttcaagtgattctcccacctcagcctcccaagtagctgggattatagcacctgccatcatgcccagctaatttttgtatttttagtagagatggggtttcaccgtcttggccaggcttgtctccaactcctgacctcaggtgatccgcctgcctcggcctcccaaagtgctgagattgcaagtgtgagccaccacgcgtggccctgaatacctattcctatgcctgataccttacattcatatttttatttttttttgagatgaagctccgcctcccgggttcacgccattctcctggctcagcctcccgagtagctgggactacaggtgtggctaattttttgtatttttagtagaaacggggtttcaccatgttagccaggatggtctcgatctcctgacctcgtgatccgcccacctcggcctcccaaagagttgggattacaggcgtgagccactgcgcctggcctacattcattatttcattaactctttacacagacctgagaggcagacattaaccccattttacagatgaaagaaccagctcagagaggtggagtaacttgatcaaggtcatgtagccaatgactggcagagccagggttcaggcccagggtgattcctaaattgctctctcaatgtgattaaaggccccagcaggattttctcctccagcacttgctgtcggtgatgacagagcacagctcagctcagccagaagggaggaaatcgtgtgaatctcgtccctaagcaagaaagagaaatgggtcggggcagcctgggagagttctagaacctggaggggaactgactgtgcctagcctaggtaaatgcttcaaacatgaggagtcctgtccctactgcccctaagaccagagacattttctctctgaggtctgagcccagctatcgctgaatggcctgattctcatgaaaatgtggagatagaaaacatctggggtggctgtggttgccaggcaacaaccagccattcactctcttgccagaatcaaggaggctgtctgatgctgacagagatagctgcatctgaggcctggagacctagattttggttctgatttgctgtgtggtctgggcaagtccctgcctttctctgagccttcatttcccattttttatgtaaagagcagtcagacttacaagtggcaatatgagcaggcatcagatggtcagaattagagtgatagtgtggcacaggcagaggaccagggcaggtcatgggtgagggaagactcagttctcctttccatcctgccctaggctatcctgactctggttactagctaggggcaagggacatttcctttcccaccctgagctaattcaggccacccagactccatcccaggctcacccttgcagctcagagtctaggaattgtcttcatacccacaaattagcacagccaccacctacttggccaacttttccccatggggaatttcctcagttcctgctgaagtgaagctacccagctttgggtgtttccctggacacccatcagaggaccttctgacagtttgcagagattgcattgatggtaaaccctgaggatggtgtgtttcgcagcaatcagcagagttaacattttctatttcacatccattacaaaatatgacagaagctgccatttgctgggcctggcacagcctcaaatgctttatgtctgtaatctcatttaatcctcatacaatccagggggataggaatgtaggtcctattgtacagatgaggaaatggagcctcagagaggagaagtgatttgcccaaggtcccagtaaatggtgcaggcaggactcccactcagggccacagtctggggtttaaccactacaggacactgcttcctcacagtcccaccagacagcatcagagctggaagggctccacctgctcccaactttacagatggacaaatcgaggcccagagggaagaagtgactggcccaaggtcatgtaacaagtcaatgctagagcagattctaggactgctctgctaaaaggctcaccacaccattccagaaaacaaaaagtgcctcaggcagaagcagtggatataccagaaatctcattttaagaaatccatagcatttcctaggaagtcaaacagtgcatgaggttcacaagacaaggatcttgcagaggttcttgaggttagggcagagtcccagcattcctctaggcagtaaggggcctgtgggtgtcactcttttggtcctacagatgaagctgcaactccagctactggcggaggtgatatgtatgtccagaatgttctcgactgccttgcctagctaatgcctacctgtcttcaagtgttagttagaagtcacttcctctgggaaggcctctgtgaacccctaagcttgccccactgtagattctcatggccctagctcttttccataagagcactgtcctcggtttgccctgtggactcacatcagaggcacatttaactaacaccagctttacaacttatcctccaaccacccaactccaaagatgccaccccagaatttggtattatcctcacaaaaccaaactcaccttttagcatgcgctaagctgataatgctgaatatagaaacagattggagtcacccctgcagataccaggagcactcctgaattctctgctcaatctcaatgcatccctagagatggggtcattttcttaaaggcagagaggcttcaatgtccaggtatctcaagacagcctttccttcagttacttattttagcatacaaaagaatttgaagatggaagaggggaccaccagccaaggaatgcagcccaagaagctcgaaaagttatgaaaaccaattctcattgagcatacaaaataattgagcatacaaaagaattattgtgcagtacaggtaatttaagagctttattttattttattttttgagacggagtctcgctctgttgcccaggctggagtgcaatggcacgatcttggctcactgcaacctctgcttcccaggttcaagcaattctcctgcctcagcctcccgagtagctgggattacaggcgcccatcaccatgcccagctaatttttatatttttaatagagacggggtttcaccgtgttgaccaggctggtctcaaactcctgacttcaggtgatctgcccgcctcgacctcccaaaatgctgggattacaggtgtaagccactgtgcccagccctaagagctttaaatgtagttttgggtatgtcatttccacctgactgctgactttaaaactgaaccccattaagagacaccttcattatgattataaatatgaaagagtattgaatttctacatacacatcctccacagacccaaagtcccatgataacttgtttggctcatctccctgtagccacacctagcaccatgctgggcacaaagcaggtactcagtaaatgtttattgaaggaataaatcaaacatgcttacttgtgaaaataagaccagaagtggtttgtgtgggtctaggtggctacaggtgctctcactcttcaagacaagaaggcacatatgcaccactgtgcacctgctcccccaagtacaccaggccagagacagagtgaaggtgaatgtggatttgtgtttattcactccacactatgtgaaaaccggagccagttttctataatatttttggcaattacatctatatcagtttcacaaattaccacaaannnnnnnnnnnnnnnnnnnnnnnnnnnnnnnnnnnnnnnnnnnnnnnnntccaaaatgggtcttatggaagctaaaatcaaggtgtgagcagggctgcattccttctggaggctctaggggagaattggttttcataacttttccagcttcttgggctgcattccttggctggtggtcccctcttcaatcttcaaagcctgcaacacagcatctttaaatctctctttgttctgtcttcatatattatcttctctcttataaggacccttgtgattacatcaggcccagtaggatgatagtccaggatgatctctccattttaagatccttaatgtaatcatatctgcaaaatctctttaccatccgaggtaaccttcacaggttctggggacctgatatctttaggtggtcattattcagcatactgcaggatatcgtattttgctttgttgagcaagatgctcaacacatgtttggtgaatttcatcgtaacagaaagaaaaagtactgccccagcagagagcccacaacctgagtaccctggagctgtaagagctaataaatcatgggcatagcataacccaaagctcctcccaacatagggggggtaggagctgaatcactaagtcccccaaccctcagggaattgctgtttctctttccccacgatactgatcactcctgctccaacctcttccagggatgaaaatttttgttcttattttatatcttgaagaaataacttgcatgtgttattgttactaaacaattcaaatcttttttttttttttctggagacagagtctcactctgttgcccagggtggagtgcagtggcacgatctcagctcactgcaacctccacctcctgggttcgagtgattctcctgcctcagcctcccaagtagctgggactacaggtacacaccaccacgcctggctaatttttgtatttttagtagagacagggtgtcaccatattggacaggctggtcttgaactcctgacctcaggtgatccgcccaccttggcctcccaaagtgctgggattacaggcatgagccactgtgcctggcctagaatctttgtttctgtttattaattgagaaaaggaagtaaccattttagttaaacatgaacttcagagtcagaaagatcttggttcaacttcttccctgagaaaacaccaaagtgcagatgactggtgcagagagaggactcagaggcccttggggccctggaatgggaggtcatagtggtttccacggaggctttggcagtggcattggggcctggatagtggttggggtcagggcctgggccatggagcttgcagaggcaaggatgaagatgaggaatggatgcctgtcaccaagttgggctacctggtcaaggacatgaagatcaagtccctggaggaaatctagcccttctccttgaccatcgaggagtctgagatcattgactttttcctgggggcatctctcaaggatgaggttttgaagaccacgcccgtgcaaaagcagacctgcgctgaccagcataccaggttcaaggtgtgtgttgccattggggactacagtggccacgttggtctgggtgttaagtgctccgaggaggtagccacggccatctgaggggacatcacctggtcaggctctccattgtccctgtgcagagaagccactgggggaataagatcagttagcccccacaccatctcttgcaaggtgacaggctgctgtggctctgtgctggtgtgccttatccctgccccactgaggcaatggcatcaccttggcccctgtgcccaagatgctgctgatggctagtacagaccagtgctacacctcagccaggtgtattgcgtcataacagaaagaaaaagtactaccccagcagagagcccacaacctaagtaccctggagctgtaagagctgagaaatcagctggacacggtggctcacgcctgtaatcccagcactttgggaggccgaggtgggtggatcacaaggtcaggagtttgagmccagcctggccaacatagtgaaaccccgtctctactaaaaatacaacaaattagccgggtgtggtggcacgcgcctgtagtcccagttatccgggaggctgaggcaggagaatcacttgaacccaggaggtggaggttgcagtgagccaagatggcgccactgcactccagcctgggcaacagagactccatctaaaaaaaaaaaaaaaaaaaaaaagctgataaatcatgggcatagcataacccaaagctgcactgccacctgggcaacttcgccaaggccacctttggtgccatctccaagaattatagctatctgacccccaacctctggagagagaccatattcatcaagtttccctatcasgagttcactgaccatctcatcaagacccagaccagagtctctgtgcggaggacccaggctccagctatgtatacaatatagagttttgttttgtttttgttttttgagacagggttgcccaggctggagtgcagtggcatggccacagctcactgcagccttaacctccagggctcaagcaatcctcctgccttagccactccctaacccagtagctgggactacaggcatgcaccaccacccccagctaattttttgtgtgtgttttttgtagagacagggttttgccatgttgcccaggctggtctgggactcgggctcaagtgatccgtatgcctcggcctcccaaagtgctaagattacaggtgtgagccactgccccggtcaacggagtttttacacaagaaaaaataaaatgaattaagcctgttaaaaaaaaaagatctggattcaaagatcttggttctgccacttactagttataaatagtaattttaactctgagaagcctcagatgatgtttttgtttggttttgcttttttaacttggaaaatggggataacagaacctccattataaggtggcagtgacaaataaataagatcatgcatatcaaagtgtggtctccagaccagctgcattaacatcacctgtgaagtagccccacttctgacatactgaatcagaaaccctgggcatggggcccagcaatctgtgttacaacacaccctccaggaattctggtgtagttcaagtttgaaaaccactgatatatatgtaataagcctagtacccaattggcttactattgacagttctagtatactccctctgagatgttgagttaggtaggtatcttttccccctcatgtcctacaaacactgtatgtcttaatatctgggttgtctgctaatgcaatctatcacccacacagctgccctttaatataaggtactcttcccatctttccttgcatacttgcagtaataggtagctcactatttggctgggtagggtaaaccgcctggtcaagcctgttcatacaggcatgccaactgcatatgcactgtaaagaccttcccctaaaggcctcttctccaaggtccctcagctgtgcttaggtctctctttagcttcagggtagctctcctgtatgtctgagcctcagataagcttgatcagccctgaggagcaggggaggtttccttctcaaatctgggaccatgtttctacttgcttgcctggtgttttggcagccacttcaccctgctgactcactctggtctgaggtcacgcaaaacctccaagcctttttctcaggaactacaggaacttgcgtcggctgggtcactccagtccttgatgtgtgcaattcatttcttaaaaataacattactttcaaattatgaaagacgtgcttgatatagtaagttaggaaaacacaaagggaaaaaaacctcactggtaatggtcatcctaaaattgacatctgattttcaaaaaaaggatcctatattcttgtattcaagaaaaaaaaaaaacccacttaagcaatttccatttctggggtaaagaaaagaatcagagaaaatgaaactaatgtactgcaggaataattgtgaattccagcatatatgaacatctcttgtctcataattcaaatgtacatcaatgcataacaatgtaaactcatcccccccgagactaccattgctattctttyggatatagcctccagtcctttgcagttaccatcctgtattttttaacttaactctaggtctaaatttagcactgaatttggagatagacaaacctggttcaaattctggcttttgtacttatgagttataccactttggaaattcatttaacctcctgaagcctcaatttcctcatctgtaaaagggggctgataatatctgctttccaggtttgttgtaaagatggaaattgagggccaggtgaggtggctcacgcctgtaatcccagcwctttgggaggctgaggtgagcagatcagctgaggtcaggarttcgagaccagcctggccaacatggtgaaaccccatctctactaaaaatacaaaaattagctgggagtggtggcgcatgcctgtaatcccagctactcgggaggctgaggcaggagaatcacttgaacttgggaggcrgaggatgcattgagtggaggtcgtgccactgcactctagcctgggtgacagagtgagagttcatctcaaaaaaaaaaaaaaaaaaaaggccaggcgtggtggctcacgtctgtaatcccagcactctgggaggccaaggtgggcagatcatgaggtcaggagattgagaccatcctggctaacacagtgaaaccccatctctattaaaaatacaaaaaaattagccgggcgtggtggtgggcgcctatagtcccagctactcgggaggctgaggcaggagaatggcgtgaacctgggaggcggagcttgcaatgagcggagattgtgccactgcattccagcctggacaacagagtgagattccgtctcaaaaaaaaaaaaaaaaaaaagaaattaatgagaataaagcttctggcacacagtaaatgccttcggagtttgtattgggcttgttaccgttaactcttcatctggccaactactgctcccttcttcctccaaggcagatgctgtccccctttgtatctttccccaccttgctgctctcacacatcacattccctctctgtcttgctgctgtcccatgtctatctttgtgttatagcatcagacacgacacagtgcccctctaccctataagctcctccagggcagggccatgtccactttattcttttctgtgtccccagggtccagcagaaggcatgacccagtgtggctgtcaggttagaaggggttggataagaatttgtgatggaggccgggtgttgtgactcatgcctgtaatcccagcactttaggaggctgaagtgggtggatcacctgaggtcaggtatttgagaccagcctggccaacatagcgaaaccctgtctctactaaaaatacaaaaaaaaaaaaaaattaattagctgggcatggtggtgcgtgtcagtaatcccagctactcgggaggctgaggcaggagaattgcttgaacccaggaggtggaggctgcagtgagccgagatcatgccactgcactccagcctgggcaacagagtgagactgcatctcaaaaaacaaacaaacaaaaataacatgttgatggaatgaataaacttagaagagattgaatgcatgaatggacgaatgcatgaatgagtcagtaatagcaggtatccaccagcggaatcctctttcccctagggatagaatcctccacctcccagactccatctcaaaaaacaaacaaaaagaatgtgttgatggaatgaacaaacttagaagagactgaatgcatgaatgagtcagtagtagcaggtgtcatccaccagcagaatcctctttctcctagggagagaatcctccacctcccaaggtgggccctgccacgtatgggagcagggctcctgcctggcacaggctgggatgagaggctctgcccctcatagcgagagtgtcgctaggggcagagccatcacgggtcaggggtaaagggagggggacacggtggggctggagtggtgggagatttgtagcccaggtaggggggtgcccttgcctaacttggtggggctagaacccgagtactgatgcaaccaagctggtttcctactgcagctgcactctggctcccacagtttctgtcaccccatcactgatgactgaggcgtgacctacaggagggcctggcctacatagcagagaaacagaggccttagggataaggggcggcagcctggctggctggccaatgaatccaggtccaagcttagcgggtacttcctgccgcygggtccagcgccagccagttcacctgctgtgcaaccctagctaagacatgtctcctcccccctgcctcagtttcaccatcctgggggactcttcctgctttggcatcattagaagtcctacctctctcccaggcaatcttcaaaaaattttctgatagcagaacaaaaaccaaaacctgatactcgatacctcttttgagtccactaagcagccccttaagagaagcagagagctcagagtcaggctgaaaagctgtgttaccctaagttacttccctctcttcagtttcctttcctgtaaaatggccattgataatgactatttccatccccacaggatagctgtgaggattaagtgagctgttgggtgtaaactgctttgcaggggttaggagcattactcttactcagagaggcagtagcttcaggcccaacctttcctgaggccagcccctgacacgccctcagcttgtggcagcaacagagatgggagggcctcctgggacattcctgagcctggtgtggccacagctgaagaagcaagtctgcatatactctgtggtgagagcctggctggtctcagggcttgcagggaagggagtttttagagaaggaaatggttgtggtgagacagaatgatggagcaacttcttggggatctgggtggaaagcccccactcctggtatgttctcatggtgggatgtggagcagataatgcagccctgcaccaacctcattcaccatcagaaagtacctggtgttcaccgactgctgggctagagcagaaacaggttttaacatgaaacctcagaccacttgccatttctgggcctcagaacctccctccccccaagcaattactagggtcatctggaggctggtcctgccagccaagcctctattccgccactccaagggatgggccaggaaaatagcctttggagttagctcctgatttgctggtgacatgggatgtcctttcccctctttggacctcggtactgggtgagagtgaagttgtatctggtttggccgtggcatgaccttgaacccaagatactgtggccatgccaagtattttgtaaagtttggnctgttggacagtggaaaggccaagtgctgtggaggaatgaagaaaacgcccaggacagttgagggcttcgtcacttttcactgagcagcttgaaggagacccaaccttctgtgtttccacttcctcatcagcggaatggggacatttctttttttgtggttgttatttgtttgagacaaggtctcgctctgtcatccaggctggagtacagtggcatgatcatggctcactacagcctccatctcctgggctcaagcgagcctccaacctgtgcctcctgagtagctgggaccacacgcatgcgccaccacgtccagctaatttttgtttttgtagagatggagtttcgccctattgcccagactggtcttgaactcctggactcaagcgatctgcccacctcaacctcccaaagtgctgggattacaggcatgagccactgtgcctggctgggacattcctctttaggcctctccttccttctctgtaaaacaggaggcaggtgagcttccagggtcctgggccctgtgattctgcttctcagctgtgaccttgggcaagtcagttcatcttcacctctcygcatcttggtttctccatctgtccaatgggtattttccccctccccattctcagagttgctgagctcaaatggggtgatgagcactaaggtgttttgawcaggaaaagtgaaaagggcttctgcagggcagctcctttgaagccccaatctccttgccctcacctgtcctcccaagaaggtgtaaagccttttgtggagttccacctaaaacagaggcctccggttagctccttcctcagaccctgctgggttatctgacaggcccatagcctaacctggctggtgactggctgcttctctctagctggcacagccctggtgtccaggctacgagagaagaggcctgggtctctgcccagtggcttctgcagcaaagggttttctagtcagatagaacagggtttgagccccagctctgccacattttagctgtgagctgtgatggttagttttagccattttacaatttgatggtgtcagtccgactgcaccatgggatacccagataactttggacttggactggaactaaaccactctcctgggtctccagcttgccgactcactctgcagatcttgggacttgctggcctarcgtgatatatatagatcctattggctctgtttccctgactggtacagaggccttgggcaatttgctgcttcttctgagtctgttttgaaatctgtaaaaaatggaaataataattcctagcacaaggaccactttcctgctttagaattcccattattggctgggtgccgtggctcacgcctgtaatcccagccctttgggaggccaaggtgggcggatcacaaggtcaggagttcaagaccagcctgaccaacaaggtgaaaccccgtctctactaaaaatacaaaaattagctgggtgtgctggcacctgcatgtaatcccagctactcaggaggctgaggcaggagaattgcttgaacctgggaggcagaggttgcagtgagccgagatcgggtcactgcacttcagtctgggcaacagagcaagacattgtctttacaaaaaaaaaaaaaaaaaaaaaaaaagaattcccattatttaccgaaatgaactctaaatcttctttgcaagtatttcttttcttttttttttttttttttgagacagagtctcgctctgtcgcccaggctggagtgcagtggtgcaatctcggctcactgcaagctccgcctcccgggttcaggctattctcccacctcagcctcccgagtagctgggacaacaggcacccgccaccatgcccagctaattttttgtatttttagtagagacggggtttcaccattcacaggatggtctcaatctcctgacctcgtgatccacccgcctcggcctcccaaagtgctgggattacaggcgtgagccactgtgcctggccttttgcaagtatttcaaggacatgctctgctctgtcctggcccaccttgccaaaactcatttcatccatcmctgactggacactctcactggacaccattccctttccagcctccatgcctttgtacaagctgttccctcccttgaaatatgcatattctctttagtctacctggtaaacttacacgtcctcaagacccatttccaatgtgtgctcttctcaaggctttccctgactcccctaggagttgtctgtgccctcacaatgcctggcacatcctttggctattgcattatccatgacacattggggcttggggtctgtatgtctcctccctccaaactgtgaccctttggaaggcctggctccaaatcactcatctccatataaaacaacagagtggtagtttccccttcctcgtgttctttcaacatttttcagtttctggagcacttttaagatccttgatctcacttaaactcatcacaactcagggaaggagacagagccaagattaaagcccccagttcgtcccaccttcctggccagggctttttcagaaaggagatgtccaatggggagtgggggttggttctttggtatctaaggtttccagctcagcaggagttagggaggttggggcctgcaggttggcagagggtgcaagggcagatggaggccacaggaaagggtcaggtctagggtaggtaggaaagagctggatctgatttcagatgtatacctctgtggggccttaggcagcactcatttcttcttttccttttcttctctcttcctcctctttcttcttcccttcctccctccctcccttcctcctttcttcttccttctactcttcatttcttcctcctcctcctcttttttttttgagatagggtcttgctctgtcacccaggctggagtgcagtrgtgcgatcttggctcactgcaacctctgcctcccaggttcaagtgattctcctgccttagcctctcaagaagctgggattacaggcatgcacccccacacttggctaatttttgtatttttagtagagatggcatgtcaccatgttggccaggctggtctcgaacttttgacctcaagtgatccacccaccttggcctcccaaagtgctgggattacaggtgtgagctaccgcacccggccttcttcttttttattttttttgagacggggtcttgctctgtcacccaggctggagtgcagtggcacagtctcagctcactgcaaccttgacctccggggctcaagcaatcctcccacctcagcctctcaagtagctaggattacaggcatatgccaccatacctggctgattttttacttttttgtagagataaggtcccactatgctgcccaggctggtcttgatctcttgggctcaagcaatcctcccgccttggcctctcaaagtgctgagattacaagcgtgagccaccgtgcccagcctgcaattttcaattctcaatcttccatctcttgaatcgtttttagctccataaaaggtagctctgagggtcaaagtggaatgtataagataatccaagtgtgggtgctctgggaatgaaagggactgaagaaactatagacatggcaaatacatgcccctaaatgtattcaaacacttcaactgctcccagcttgctgacaagtgatctgttattgttagaaccccctcccccaggtactctaaaaactcatcaccagaacccaagtcttttccttaagggcctagaggccctcccagtaccacgaaagctcttgaatgggatcaaggccttcttagggcccaaagatamcccctcccacttcagggcttgagggcacagtgttcaagagcttggagcttcctatagcttacaagtctctgatggtggcactcacatcccttagagagattacaggggcctgcactgcttgcccagcatggggctcatgctccatttcatccaaaagcagttctgtttgcaatctcaagggcagaaataccataatttgctctgaatgtctgctctgagctctggggaccctcaggctcagaacagggttgctcccaagtcaaacatatctctcaggtcactatggtattcctccaggaagttgtttcccaggaaagtccctgggaaacaactgggaacgtgtgtctgtcattcaggggtagcctggctcagggcaaagctrggaaagacagcaacaattttcctccatgatctcaccaggttatcctggagcccagagatgtgtgttctcatcctagttctgaccttgttgtgatcacggatgaatcacttagacttcccaggtctgtatgcctctgaatagggagagtgggccctatctcacagaggatccagcaatattaaagatatgaaaattctttgctgttgacatttgaataatgggagaaaaataccagtgggagggaactgcaaattagtgggccttgagtcagacagatcagagttttggctccagacctcccttactggccagatgacctgaaacaagtcatctcgtacttggtaacactcttcctgtgctgcttcaggaagctggttctctagaacctcatgttcaaactgcaactcagggatgccttccctgtctgtgcagggaggtcagctgattggtatgatcacatctttagcatctgtcttcccagccagactgagggctcccagcaagaattttgtctggcctgttctccagaggccaacatggggcctggcccataggtgctccctgtttctgtatcacctacaagttctttcagtcttggctgcctcactaggctgctggagaaacccagaaggtagacgatgagacccacaagtatgaggcatttggaatgcatgggctaccctgtgaagaactttaccggaggttgaaagggggcagagtgccctgaacaggaaggcacagggtggcctttggcctccagggaagggaaggaagtatgagacacaggaagaaatgcaagcagcaggaggaagagcgttaccaagctgggactccagaggctcgaggccctctccagtgcctgtgaagcctgtatgcgggctctgctccttgtagccttggagacttgagctgtggctcaggaacttggcactcagtccagtccctgctgcctcccacctgccctgtagccccatctccttgcactcacattccttcccaccatctgccacatggagctcacccttttctcaacacctggtcttttctgtctcccgaccactgtggaggttgttccctcaataggaatgcacatccccttctctacctggaagatgtagtagctccacgtccttcctatagggaagccatccaggacactgcaggcagtcagttgctctctccatggagccctgcagctccttgggcatccttctcgctatgcagtgcagtacttccttctctctatgcagtgcagcacttatcacactaggttgatggctggttttcctgtctgtctcgctccacaccccccctccacccccatcaccccctgacaaccaactgggagctatttgaaggcagggatcagctcagctcctctctgtggccccagtgcccagcagcgcttggtaccaaggagagatcctaaataacctggggcctgggttccatgcaggagggactactttgtggtatcccaaatgtccagcctgtcacagatgatattatggaggaaggtcacggacaggagcaatcttattcaactgccttccaggaaactgaggccaatggaggggtagggatttgcccaagctcccgcagcacatcagccaccgagttgggcctggaactcaggggtcctggtgcttggtccccagctctagctgtagcagctttgaacagtgtccaggcattgagccagggtgtctggagaccccaggggcccagcccatgcagctgatcactccactctggctcagcccctctggcccggctctcagccaaaggcagcacgaggctctggctgcccctgccaaaggtcaggccttcagcaatttgggaaggtggccaggccacttccctcagacacagcaagacctggagcagtgtctctattggactgtgggctctgaggctggtcccccaggtggacagtgtccttcttgccaacttgattagaacctggttaaacctgaggtaataatctgaagcccacagagcaaagcacagtatggaatatgagttcaacaaatgttcattagcgtatcattattactgtgacgacgatgagatcctacccagcacagtaactaaaagcacaggccctgaagtgtgccagccagagtgcagtcaggcccgccatttaccaagttatgcaacttatttaatttttttatgcctcagtttttgaaccttaaaatgagaataatagtatctgtctcatagggccctaggagaattaaatcatttaaaatgcataaggtggcccggcgcggtggctcatgcctgtaatcccagcactttggcagactgcttgaggccaggagttcgagaccagcctggccaacatggcaaaaccccatctttactaaaaatataaaaattaggccgggcgcggtggctcacgcctgtaatcccagcactttgggaggccgaggcgggcggatcacgaggtcaggagatcgagaccatcccggctaaaacggtgaaaccccgtctctactaaaaatacaaaaaattagccgggcgtagtggcgggcgcctgtagtcccagctacttgggaggctgaggcaggagaatggcgtgaacccgggaggcggagcttgcagtgagccgagatcccgccactgcactccagcctgggcgacagagcgagactccgtctcaaaaaaaaaaaaaaaaaaaaaaaaaattagctgggcatggtggtgtgcgcctgtagtctcagctacacgggaggctgaggcatgagaatcgcttgaactcaggaggcgcaggttgcagtgagtggagatcacgccactgcactccagcctgggcaacagkgaggctctatctcaaaaaaataaaataaaataaatgtataaggtaatgagaatggggcctacagagagtaatcagactaagtgttaactgttgttaatactattaagtggccaaaagccttgggctaacagaacacccctggcctccgacctggcctctctctcctgctccacattaaaacaaaactgaccacatcatcccttccctgcttgaaaagcttcaataactggctctaaaatgtgtccaaacccttcacatgagagtaaggtctgctcttccttgtcctctgcctgcttccctagctgcttcttccagcctgcttccattcttcccatgttccttcagccatacgcatactcactgaccctggaacctgctgtgctttttcatgcttccatgcctcgtacaagctctagtgtctgtctttcaccacccagcagattcctgctcaatttcccgtgtgcccaaagtagttgatctctcctgtgtccccttcatgttccagatatcctttcatcccagcacacatcacccagtattacaatggactgtttacatgtgagtttctctctggactgtgactgcttccagggttggattgtaccctttgcttcctgaatcctttttgcctgacttgacgccagcaggcctgtggcagaagctcaatgtttgtggaagaagtgagactcccaactacctatccctgcatcagagatgcagctctgatcagttggtgctaggtgtggcagggtagagattgagacctactctttgtctttgaaggagccccagtcccctggagaagatgagtccatgtatttacaaataaaagggtgctgaggctgcgtgagtggagtgtgggtcaatcacatttccaggaaacaaattagaggttgccaggtgggtgtggagaagaagaagacataggaggagaaacagggaggtaatgatttcatggaactctaggtggttgttttgcgtgagcataaaattaagagaaagatgaagccaaacaggccttgtgtggcaagatgatgagcctagactttagcatgcattcaaaactcttccccggcccctaattctaggaactctcagcccagggaggggtttctagggcatttcttatgtttcctacagcagcaatgcaagctgaggtatgaacctagaagggaaaggcagcccaatttataaaacatttactttgacacagcttatctgattctcacaaaactctgccccaagtggctgcctggcaaactcttactaaccattcaaggtgtggctcagatgtcccctactttgaggccttcccagatccacttaagctaagttgatcgctccctgatctatgttttccactgctctccataagtctctctgattttatatccatctcctctgctagactgggaggtccttgggggcaggcactgtctcattcatctttgtttcttggtctcccaggcccagcaaagataaggcaagagtaaatctgttcaatcaataaatgtggtattactgtgtctattttgcaaatagggaaactgaggctcaaagactgtgaatgatacattcaaggccacctagtaaggagcagaaccagcacctaggccttgtctgaagaatccatctggtgagcaggaaaggcacaaggtttcacatggttaaggtcaaagtttggcaaactttcaaaggaattgtgctttggttctgatccccgctgccccaaaaacagcacagctgagggaagaacttcacattctgcactacctctgtgatgacctgaggtcaggccacttacttcacactaatgcaaacttcccaggtgaccactgtctactttactcaccagcgtcatagctccaggcacaagcttctcagccagacaagctgggtccaagtctcaacctcaacacttactgtgtgacccctgggtttcagtttctcaactgtaaaatggggataatgatgataccaaacktgcaggtcattgtaagggttaactgagataatgcatacagagaattttttttttttttttgagatggagttttgctttatcacccaggctgcagtgcagaggcacaatctcggctcaccgcaacctctgcctcccgggttcaggcaatgcccccacctcagtctcctgagtagctgggactaaaggagtgcaccaccatgcctgactaatttttgtatttttgtagagacggggtttctccatgttggccaatcttgtctcgaactcctgacctcaggtgatccacctgtctcagcctcccaaagtgttgggattacaggcgtgagccaccacgcccggcatacagagggtttagtatgatgtctggcacagcacatgggcaatgttccttcctttccacctccctaccccattgcccaaatcttttatctcttcagggtttggctccagtctctcatyctcctccatgaagcctccctgctctgactgatgcaaccttcactcattgccctctaactcctgcagcccttgtttatgccacacaattcagggtattcaattgagctggattcctattggttacatcctcaggatccggactgctttccccttccccaaagtctcagttcccatcaggaatccatgtagtttcagggaagctgattctactctctccctcccctatctccccagttctaagggtgaggtacatgatctaggctaagccagtaaacaacccttgccactaattgctgattcagaggtgggcatgtaatcttattcagttcacagtgactctcaggacttttgctgggaattctgtgatacagggtctctgtattttctcttgttctggatgttgcggagtacagatgtcacgtctggaactgctgcagtcattttgctaccatgagagagacaagcctgatgataccaagggggcagtcagagactggcacataagtgaagtcctgaccacaccatgcctgactgctgggctccactagacttttcagttgcatgagtcaacaaatgtcctttattgagccagttttctgttatttacaactcaaagcattctgatttaaacatctagttaaatgattttgtttaggtcaccaagaaatgtatttattcacttgtatgttgactaggtccctgctacatacaagcactgtgctggatgctaggatttaatgatgaatagcattaatgtggtactattctcatcagggagcccaagcatgacatatagtatggcaaaaggaattagagattaaaatgcctgtgtttaggggatggctctgatgttgtatttaacttcctcagtatccatcttacctcctttggatagcagaaccctgacttttctttgggaagccatctaaaggcctggtcagtggacccaagcctggccaagaggcatattccatgctcctggccacagcaactaattcagcgatgggcataaaagtcagccctgagactgcaaactttaaaaacaggtcctgtcctgctggggtcactaaactggggaaacataagcctgggtttccttaakctgaaaaagagtgctaagactagtttatctccgagagttggtagcaataaacttctctgacttcacccattattcaactagatattatcagtgcctcctctgtgccgggccctgggctgcatgatagggaaagagggatgaggcagacttattcatttgccgtctttagctgagtgttgaaaagactcagctaaacatacacagtatagccatacaaggggtaatcagagggcaccaactcagcctgaattgttagttttgtgttttaaaattatgtgacatgttaaacatagaaaaattagaagacatactaagaactttaaaacaaaaatctcccttaattcaaccactcagctatgatcattgttaacattttcatctatatgcacccggatgcttttctatgtacatacacttttaaataaaaaaaaaaaaaatgcaatgtggtataaagggttggagcctggatagaaaagacattagtagaaaaactactgaaaaccaaatatagtcagtctagtaatataccaatgttaatctcttagttttgacaaatgtaccatacttaagtaaaatgttaacattagaggaaactaggtgaagtatatacagaaactctctatactatttttagaacctttctgtaaacttaaaattactccaaaataaaaagtttccttttaaaaatagatccattctttacccagacatggtggcgcacaagaccagcctgggcaacatatggagatcctgtctctaggaggaaaaaaaaaaaaaaaaaaaagcatattccattctgtattgttttaaaacctttgtttattcacttaataaatttaccataaaatctttgtcttaaaatgacttatttcgtgatcacatactattccatcccatgaatcaatcagccaatctccccttttgttggaaatttaggttgtttccaattctaaccctgttataaagaatgctttctgcacatacttagtcatttccttgggggacatgtacaaactggaattgctgagccagagctgctagcttggaaacacttactgagcactatgggagtcactgttctaaaacacctgacagacatgaactcatcctgtcaacagcacaaagagagaggtactgttctcattcccttaccacaggacaattttcaaaggtttccaaaacatgagccaacatattctcactaaagactctcacggcccactccagcacctcactggtgtcacgtgcacacagatctaccccaccatgttcttttgtgctccctcctattttggcctcaagataggagcaggtacagccaggccaaggtgtggtttcagcagttgaagatgctcccctcatcttcaactatagaatgtcctactctcagtaagctttgggggtgccaagaccattgctatctggttggctgccatgtcaggaccacaatgtctcctgccagcctggagtagaatcagcatccctggggaagataacactgattcccatctccactcargggcacatctggcagctcaggaaacactccagtgaaaagcaacctgttcgggtttggtactgaattccaagggggatgaggtggcactgaggaataggaatgggtaaagatacctatcctgaaatagctggtagccatggtaaggtccttttttcctcagcaaatggccctgggaaaggacatagaaaggatcatttattgggcagctgctatttctcaattcatatgaacttcaccactcttctagatgagtgctatgaccctcattttacagatgagttcattgaggcttacaggttaagtgtctccctcaaggcacacagtaagctactgtcagggccaagatctaagcacagaccatctttgtcatcctcagaactcatgcccataccactagacacatgactggaaaagagagctgacaataaaactgaaggacttcccccacttcagccccacagcaaagtatcgcctgattcatggtcaaagcacagactgtggtgtgtttaggggagagaggaagagtggcacatgggctgagcttaaagcggtccatcaaatctctatgtacgtatccttgtcttttgctcttctgcattcttgacattattcatgagctgaaaaacttcccttctacggtcactgtgctttgtttgaaaaacttatctctaatcagatacagatttcccaagaactctggtaggggttctctaggtcagcagtctccaagatttttggcaccagggactagtttcgtggaagacaatttttccacagaccaggatgaaactgttccacctcagataatcaggcattaattagattctcacaaggagcgggcaacctacattactcgcatgcatagttcacaatagggtttgtgctcctatgagaatctaatgctactgctgatctgacaggaggtggagcttaggcggtaatgctcacttgcctgtcgctcacctcctgctggtggtagtcatggcctgggggttggggacccctgcttgaggttaaagcagcccagagcaccagtggccgctgtaccctcccttgtgctgtgccctcagctggaatgctgccaccctctgcatggagtcacccagatcccacttccttcacaaagctaccttcttctctgcagtctgacctcctgtactgcataattagcccttcctttacactctgcttctcttccaaaatagactcaaggcagtttacaacacacatgagcacaaaaatgctaaacacagaactaaaattgggctggcgttgaaattttattaagaaaccatggctgaggaatgattaacaactgaacacaagacgtagttttgagtttcctcacagccagggcaagaaggaagacagtagaaagtgaagcatttctttctttcttttttttttcttgagacggagccttaccctgttgcccaggctggagtgcaatggcgcgatctcggctcactgcaacctccgcctcccgggttcaagcaattctcctgcctcgaactcccaaatagttgcgattacaggtgggcgccaccatgcccagctgatttttttgtatctttagtagagacggggtttcaccacgttggccaggctggtctcaaactcctgaccttgtgatccgcatgccccggcctcccaaagtgctgagattacaggcatgagccaccgtgctcggccaaaaatgaagcatttcttatttagtagaagaaagaagaccagctaaacaggaagcataatgaactcctagctaagctcagaggaatttgtctgcaaaacccttacagaacaccacacaatcaaattatttgctccatagcaactttacccccaaagtgcagatctgtttggcttattggcttgagggctacctgcacaggatctaggcccatgttgtcttgccctctgatgctctgtctttccatttccacctgttttctgctgggggcacctcaatctggactgggcacctggaaggggccctctgtgagagcagctcatcatcacactgccayggatgactctaaacccaragctgctgcattcccaaaacatcagaagcacactgctccccctggagttatgaataatgcaacaccatcagctacacagagctgcaatctgagacggctgcctgtgactcaacagcctacatacacaccctctcctggccaccttatccagaaccaggagataatcgtggaggacaagagatgggaaccggctccttcccccaacataactcacccctccagcctttctggaatacgggtgattccaggagctatgcaaatccagcacattggaactttagtaccaacaataaggaaacaacggaggatggcaaaatagaaaaaggtcttacctgtggcaggtccttcactgtaacagagcaaacctacttgagtttctccttttgtttggatccatggctcatagccttttctgtatcatgagtgcctttgagatcatttcatctctccccagcaaagtgtcaaagcaattggcacagtgttaagaggctggggtgtggagccagacttggactcaggctctggttctgccattatcagatgtctgaatctcaaagtctacagacataccatagagataatagcaatacttacctccacagggttatcgaggagaataaatgagataatgcatgcagaacctctcacacagctaagaatttaatatgttagactattattaattatgaaaacacataaagaattctgcatataatttcagaggtctatgatttctaggggatccttagcctggttccggatggtcagtaagacaactttcttcaatgcctacattttccctctgaattccatctgtgtttactaagcatctgctgtgtcctgggcagtccaacccacatgagtatcttggtcactagtgtcatcagcacctttgaggggtagggatcattcctattctactgatgaggtgagataacttgtccaaggtcgcatggtgaagtcgctgttgaaatctgtcttctgactcgttgctctgtcttcatctgaggaaagacttgtgaggcttctgaggaggctgctctccatcctgctgtgttctgtcagtgacactttgtgcacacaggagatcctaagacacataccctaggccctcagagccggcagtgacttcttcaaaatcagttccggcagcgctgagtgtccatggaaaagagctcttattcagagcagcccttcctgtgtgcagagctacgcaagtaattaaatcacttcagcaacaagatcaaggggacggataagtgttagagactgtgtttcagtcctgactgcctcttatgcatgacctcaggaatgccacttcacctctctgagtctggtttcctcacctataaaagtgaaggacagttctgactccacagggtgctgtgtgagggttacgtgaagtcgagggttacatgaagcctttgcataatacctggcacaacgtcagtcttccgggagtggtaggactagtctgcattcttggtttgcagattagatgaggaaacccaggcccaaagaagcaaacaaacaatagctcacccagtcttctctgtttattcttctcaactacaccatgctgctttgcaggttggtttgacaaacatttccccacaattagatgcatgatgaccaagggaggaaagaaaattttcacagggtatttaaaaagctcagggaacaaamagatcagtgcaaatcagtaaggctaacacctgaaaatgactctgcacaggtgaggaagtggagcagaaragggaggggctggttcagggaacaggatttaatatgtcagtgaagaccctgcctctctctgtaacaagatgcctaaagaagaatagtggtgcttccagcccagctccctcttgttttgggaacaacagtcatttctcagaaacctcacttgcaaaggcagcccttccaaaaacatgagagctttagtttggagaaattatttaagctcacttttgctggagaggaaatgaatttaaactaggacacacagagaagcaacaaagagtgttaaagaagcaactgaaaaggtagtcaaagatctggcttaaggattagaagcactggctttctagactatggacaagtgtccattcaacagttatccagcctggcaggaagcagatatctttctgtgtatatctggatccaactaacatttatccaatgtctgttgcatgccaggtactgagcaaaaaccttcttcctataaatttcatttaatgccattaaggccaagaaggtggcataaccaacttcctttttcagctgaggaaacaggagcacagtgaataactaactggctgggatttgtcctaggtcccctgaactccaagcacagtgctatctccactagaccaagctgccttgtctctgggctcaagagaagcctgcataggagctgaaggtcaagaggttgcaggcttatctcatatgcacatacttggacctccctaccacacagctgccagyracaagaaagggcttcttttccttccagccaggtccagaattcaatgtcatttttctagcttagattatctaaaaaaaatgccacaacaggggatacaaattttaacatattttattgatttaggggccaaacaaggcagcatttggtcagttaagaaaggcacctcattgaaaataatacatcacagtgctgttgagtgatcccagtcacaggatttgagaatggaaaggacaatctttggatgacatagcttaggacacttgctcatwtatttaaaagagtcccttcacacagtgcagataaaagaaggcaagagcataggattgtggcatgtgctgggtagctgtgagaggttactcatgaragtaggtagcctagtaaattagtggtaagtcaggggaagggaatcagcctccctttccatttcattcccttccccctccccttgattccagtttgcttgatttgttgagccaccatccctatgaatacaccttacatctctttcaaatgtggagatggttttttgatcttacagtgtgtggaaccggagtcagtaatcaaagctccctgttccaagctatagacagacaggacaacaatttgatttcctgtactcttggtctggaacccatggggttctgagataaaagctgaggtcttagagcactggctttaaaaaatattttcaccagtccagagtaaatgaaaacccgattccttagaaataatattgtgtctatttctacccccaccctccaagcatggtgttttttaaaaaattaatttttcccttacactttaaaaactctcacctatgtataaaagaaactgccacactacaataacactgctgttgttccaagtattcctctgagcccctcaccagccctccctcaccatcctmaccctgaccacccttcccctctgcccagcacctaagagcagggatcacgccgcggggtgatgagcagtgttgcagtctcgcctggccttctgatactaggctgaaatagagaggaaacaagagagaacaaaatgggtttttaaaaaccaagtacatatcagaggaggctggcatgtaagccccagcaaccaaatgcattaaacactggacatttctgtgacaggtaaaagcagaacctgctgaggctgaggaactctggaattaaatgaagcaaaaacagaatcctaaccatactgagaagggtatatgcattccctatgaatcttccagttcttatgggcagcccaaatattacttgtacatgttgtatgcacacgtgaatctatgtggacggatgacaaatatttgggcaaggatcatgcacataaaattagcaaacattcaagaacctcaactttgaggccaagtgcttacaattgtccctagttaaaggggagctgattctaagattcatgatgccactgtcacccagagaaggatcccagaccaggcacacatagctgacagtttttgtttcactcctcttccttgcccattcccagaagtcatgtgcttcccagaaacacacaaagccagactgagtttccattaagagtgggtggagttggtttagagccaggaaaacaaggcaggacagaggcagcagacactcacttggaccaggcaaagagggaagcaaggtggccaggtactcatgcccagttgccatgtggacagcagataagacctctggtagtctcacagatggcaggagagctcaggtcaggaggctgggcactttagagtccactgaatcgagtcagcagcagattatgctgaggctggcgatattatttactggatctgccactgactttctaatggtttttccagaggctgccgtttttgtggtccttcatagcagtctgttacttcatctgtttgccacaaatcaaaccagagaccaaaagacagcagggaccttagaaaatgctcaatagttgggaagctaaggttatgaataaaagctggtaactgtcacaggtggtcttatttctgggtgatcttttcttggggaagtccatggctatagccatcataaaattaggggtgaagggttggatctagaaaggagagggtttgggcttaaaaagaacatatctgatttcagttttatgtcctggagagagactgggtttgaataaatactgatcaaaatgaatccaagaatagatcacacactgttttgttcacacttggaaacacaggcaaacattaaaaataaaagcaaataaacctaccctggtctctttttggggaagtagatttgactgctctcagatgatcagcctggatgttcagaagacaatctgaattcaaaaggacctttcacctggtttaattctctggcaacaattcagttttcaaacccaattcccaaataattgctattttcagcatcatgatgcagatcacaaaaatattccaatttggcctggctctttttatgacgatatcctctcccagtaatttctgtaacctgcaaagtaagtgcctttttccttccacctagggggaaaaaattaatgatccctgttcacacactgactcacgtgggttttcatcatgggttagaaaacaaaatggaattctctgtccataatgtgccatcaggaactgtgaccctgcctgacttcacatgatcctggacttctaatcagctgctggaaatggaagaaatactatgaggttctggaattgcggtccctggaagattacctgggttagttcattttggtcaaaaaataaaatcaaaagtatggttaaagaagtaaacagctgggctgggtgtagtggctcacgtctgtgatcctggcacttcaggaggccaaggtgggtggattgcttaagcctaggagttcaagaccagcctgggcaacttggcaaaatcctgtctctacaaaaaatacaaatatcagccaggtgttgtggcatgcacctgtagtcccagctgctcaggaggctgaggtgggataattgcttgagccccaggaggcagaggttgccgtgagccaagatcacgccactgcactccagccagggtggcagagcgaaaccttgtctcaaaacaacaacaaaaaagaagtaaacagctggtaaagcaacctagcctaaaacttacaaagtagcagagtgaacacatatgtgcatgcacacacacacacacacaacacacatacacacagatgagagtagcacacacgccaaagatacatcaagcaagtgcttttttaatcaatacatcaaatgatatttttgctagcctgaggaagcttctctttgcctgtcctatcattcccacccattgcctcacagggatggaaagaaattccttcttggacccaacattagataaacataaccaagtctttacatgtggctttggagaaggctrctaggatgcttgcgaacacgacatcgggggtctgggatgcatcgatggcggagtggatcccccgtttcctgtagtactctatgagtggggtggtttgagtgtggtaggcttgcaggcggattttcaaggccttttcattatcatctgatcgacggatcaagggttccccggtgatctgagaacaggaagacagcaatgaaaggctgggactgttagcaaggttttcttattccatgccagatgcagatttgagatgggaccattctgcccaggatgctgtctgttcccaaagcccatcagagacaaagacaggcaatccagaccctctccagtgaagaactttgctactcccaggagcagagcagctggtgaacagaagtcagagagtttgtcagaaacaccaactgtgaggaaaggggctcatgaggggaagataggcaatgactttctcatctttgtgctcaggcgattcagcttccaagataaacacttctagggtcaaaagtaaggaagtcaaaaaggcccctaagaccagaatacatcaaaatcaaagatacattagcaattgtaatcttagttgcttaaatatttagtgtatttactagagtgtcacccatcaacattctaaaagtggcaagtaaaataagaactttcaatggtagaattagcaactttgcaaaatgtgactaagttgccataacggctctggaacctgtatttatagaacctgaatgacctgatgaacttgtttcataggacaaaggtaaacccaggaaattcttactgttgcctgcatgctttaaaacaaaccatatagactctttatggcaaatggtgcagtgaccatgtatgaaaccccaggacacagtacagcagcaataactataaaaagaatatttttctggaggactggtcatcaaacttctcttcagtgccacactcttcccactctccaattgtaggcttttaagaaagcttctcctgattagctgatcacttaggtggccatgatgccagaaaaggggctgctctygacagaagacaggtacaatctgggcactgcaaaaagctagcaccactggaagcaaccttgaggccaagcaataaaccacctgaggagacactgaatagatctgacacaggccatgtgatttacttgatagtgttatttttcatgactaagttagtaatattggtagaaataaaaggaagatggaaagaataaaggaaaaagaaaaacagtgaagaaaggggaaggaaagaaaaggaaattttttgtcctgagtttacatacgtcatctttcatgggctcttttggagggttgaactcctcgtggtaggaacggccactcttggggtgaatcagcctgaaagacagcaaatgaatatgagttaggttaactgacagtacgcgcctgcactccactctagggggctccagaatgacaagcagagatagggacgctggatgcaaggacccagcacccagcagaaaatccagctaaataactgggcttccaggagagcttatgccagcggcagagtatattttctattttgaccaaacattattatgagtatctggctgaagagcaaactgctggcataactacctaattcaggacttgagagaaggaactctggtgctggtctcacacagccatccattctgttcacccatttacttaacaaacattaataagtattccattcaagccttaagctgaattcagaagctacaaagcaatgagtaatgatccctgctcacaagtagtgcttagtgggagagacaaatgtggaaataaataacaaacgtgataatcctttaacagagatttgtacaaagtgctatgggggacagaggacaaagaaatgaactctattttctaacctagtttggttacaaaaccaggaaggtactaacaggaaaaataattcccatggatgcaaacactgccagataatggaacacatcttttcaatcacacagataaaagatagcctaacccttatggagcaatattcaagtaatcgggaaaaatgacttattaaacaagtcatggaatatagagctcaagaacaggcatttatttggcactgaatgtatagtgggcagctgcatctgtgctgagtccctacagacaacaagcccatgttcctgactgggaatggccacaccacaggagcctagaaacctaaggaaaggaggcaggccaagctctgctcagcagccaggccttgcttcacttctgtggtttctcaattctctgccaaccaagtgtttgtttgcttatttaactaatggttgcttttctcatgaaggtctattagactagagctccctaatatttttcaccatttggcaggcatagcaatatttgggccgggcccagcagcttatgcctgtgatcccaacactttgggaggctgaggggggcagatcacctgaggtcaggagttcgagaccagcctgaccaacgtggcgaaaccccgtttctactaaaaatatgaaaaatttagctgggtggcaggcacctgtaatcccagctacttgggaggctgaggcaggaggatcgcttgaacctgggggtggaggttgcagtgaaccgagatcataccactgcactccagcctgagtgacagagcaagactgtctcaaaaaaataaaataaataaaaattctattcaattctatttagactattgaagtagcacctctgtaaaatgtgctactttcttttttgttaatcacagcatattttggggggacaagatggtccatttggcataaagtggcactgggttatgggcaggagggaggtgacagtagagaaaataagctatagagtcatcccttggtatccatggggggattggttccaggagccccctctgtggataccaaaatccatagatgctcaagtccctgatataaaatggtacagcatttccatataacctatgcatatcctcctgtgtacttttatttttattttatttttgagacagagtctccctctgtcacccaggttggaatacagtggcgcggtctctgctcactgcaagctccgcctcctgggttcacgccattctcctgcctcagcctcccaagtagctgggactacaggcgcccaccaccaagcctggctaattttttgtatatttagtagaaacggggtttcaccgtgttagccaggatggtctcgatctcctgacctcgtgatccacctgcctcagccttccgaagtgctgggattacaggtgtgagccactgcgcctggtctatttattttattttttgagacatggtcttgctctgttgtccaggctggagtgcaatggcaatgaccatagttcactgtaaccacaaactactgggctcaagtgaccctcccgcctcagtctctggagtagctgactacaagcatgcgccaccatgcctggctaattcttttattttatttaattaatttattttattttattattattttttgagacagagtctcattctgttgccyaggctggagtgcagtgtcatggtctcggctcactgcaacctctgcctcccaggttcaagcaattctcctgcctcagcctcctgagtagctgggattacagaygcctgccaccacgcccggctaattttttgtatttttagtagagacggggtttcaccatgttggccaggctggtctcgaactcctgacctcgtgatccacccacctcggcctcccaaagtgttaggattacaggtgtgagccaccgcgcccggtctagttttttaattttttgtagagatgaggtctcactatgttgcccaggctggttgtcttgcatactttaaatcacctctagattatgtatacctaatacaatgtaaatgccatgtaaagaattgatatactgaattttaaaatttgtattattttttmttttcttcagctttcctgggttatatttattggtggttttgttctgaatatttttaatccacaaatgcttgaatccgtagatgagggaaccatggatatggaaggccaactggacagaggagtaaaggttcctgtgactgcagtcatgtactgtgaggttgcaccttccattatttgagtgcctggaaggattcctctgatgcattcattcagaaatggcatccactgggagacccagggaaaggagagagcaggctgctgggctcagctgcagcaactttgggaggggctaggggcatgagatacggaccaggatatttttttaccttctagagagcacagggcacatagcagccaggctgcaacaaatatgactcccacacactgctcttttgccattcacaaataccactttttaaaacaatacaaggctcattccacagaaggtaaatgaaagaaaccccactctccaagttctcaaaatgggattgctctcaagtaccaaccaaaatagctccatgagccactgagcgtggcttggaggtatcatcaggactgggaatctacaatcactgctacygtgagtgtgatactttatttttatttttttgagatagggttttgctttgtcacccaggctggagtccagtggcctaatcatggctcagtgcagcctcgacctccctagctcaagcaggcctcccacctcagactcccaagtagctgggaccaccaccgcaggtgcacactgccacacctggctaactttttttttgctttatagtagagacgaggtcttgctatgttgctcaagctggtctgaaactcctggcctcaagtaatcctcctgtttaggtccctaccaaatgctgggatcacaggcatgaaccactgcgcccaacattcagtgcgacactttaaacacttgttttctcatccacaaaattgggatggtaccaggtattaagataataccggagagccaactggtaggataattaggatttgagagagccaatattgaataagttaaaaacaaaaaccacaaccaccaactattcatattcaagaaacagaacaatgactcaaaattactagaagtgaggtcagagctaattcagaagattgttacaatgggtccatatcatctcagacttgaaaaagatcctgtgtgaggtccggggtgcattccccagcatcttcaaacagccgacatctgtgaccaacctgggcaacagagtgagactctgtctcaaaaacaacaacaatgacaacaacaaaaaaaaacagaaaagaaaaagatccatattaaactgactggttcctgcctcattttcttctaaccatcaacattttggactacgaggcagaaagcaggcttccagggctaaccctgccactcatctgttgggtaaacttggaaaaacaccttcagcagtgacatgctctgtgaggamgggggtccttctctctgtgaggaagtcacactaaccacctacttccaaatggagggaatgaatcttctctctttcaccctttacagcaatcctgctgtttgttcttcagaatctctctgttctctcccacccaacctcagttagaaatctccaccacatcatgtggatcataaacaggctcctagatggtatccttatctgtttctccttgccgtaatttaccttgtacaccaggaccaagctaatgttcttagaatactgtttttgccacaatacccagtggctcaagactatctcatgagtcctgaactccgtcaagtctaccctctttggtttggcagatctccccagtaaagctcttctcaacagcattccttctaccttcctgccccccagaccactgggcagacacgtctgctactagcctcagcgaaagtccaacccataatcattccggcttctcctcccttctgggaaaggctctctgaaatactcttcatcgaggaagagtttaatgttatctctatcctaggcagcctttcttccctgtccccaggctttcttcttggacttcctactacactgaacagcccaagtttcatatatgactctctgaggtcagagatgggcatcactatatggttatcctagagcctctcgtggtcctctgctcccagggtctagtactgtgctatgcaggaagcaggtactcaggaagctgggcccatagaatcaaaggtctccagtatcacctgattctgctaatacgtgcttagtgcctaagagaccccaggcctagtgatgtctttactgttaaccctactgcttctcgacctacatcaactttgtctactctgtgcccagtggggatacaaagaaacagaagttcctgcattaaaggagcctatggaatagcyggagacatgtaacctggacatttgaaaagaaaatgaatataaggtagagtccactgtatttcatatcgctttccaggataatagtgctaaccctgtgctgtctattcacatgtttgtctcttcttgaaggtatggactacaaacacatggaaaagatgttcaacctcattaggaaatcaaagtaataatgtctgaaataagaaaacattttttccctaatccaaaaatttacatgcattatgatggccatagtatcattttaacagtggctaactggaagaaacataaatgtacaacaataaggaaataagtaaacaatggttaacctactgtgaaatattacacagcaattaaaagtaatggtcatggatgtctggttcaagatggttggctgaccactttcctgagacaccattaaaatgacaaagacataaaaaagctacagcccacaataaagaagggaatggagggtccatttgcagttgaaagcttctgtcatacttctggaaggcacaaagcagatggcagtgattagtgaaacagggtagagacaactgtaggctaaagcagtgttggtctgtcagaacaaacgtgtccagaagcagaggcatttctgtgttcaatgctattacagagaaacaaacatgttaaaacacacacacacacacacacacacacacacacacacacacaaagtggctgtactatgagcaaattcttcctccattttctaaactttgtacagatggttatattatttttacaataaaaagtctacagcaaagtatggcaactccagctgaaatcagatttaaggagcactaaaatggaggagatacacatgtaaagacattaacatttcttaagcacctaatataggcaaggctttgaactatgcattttatgttacctaacacgtgaaatagcttctcaaagcaggtgttatcaacccccttctacatataaggaaacagcctcagagaggttaagaaatgtgcctagggtcacagttaaaaagtgacaagaggccaggcacagtggctcaagcctgtaatcccagcactttgggaggccaaggcaggtggattgcttgaggtcagaagtttgagaccagcatggccaacatggtgaagacctgtctctactaaaactacaaaaattagctgggcgtggtggtacatgcctgtagtccgagttactcgggaggctgagacaggagaattacttgaaccggggaggcagaggttgcagtgagccaagatcgcgccactgcactccagcctgggtgacagagtaagactctgtctcaaaaaaaaaaaagcaataagagccaggcacagtrgctcaagcgtgtaatcctagcactttgggaggccgaggcaggcggatcacttgaggtcagttcaaaaccagccgggccaacatggtgaaactccatctctactaaaaatacaaaaaaattagccagccctggtggcagacacctataatcccagctacttgggaggttgaggtaggagaactgcttgaacccaggaagtggaggttgcagtgagccgagactgcgccactgcactccagcctgggcgacagagttagactcccatctaaaaaaaaaaagtgacaagaatgagatgctgtctgacttcaaatcccttgctcttctttccatatcccgatcccatctcaccacttcagcggatgtcaccaaataaaatcaatccatgttgaaatggcactaagcttcatggccgggattaggcaagagcaattctcagagtttgagaaagctctgagwagcatgaaaagggaccttcaagggacaaataccttcctgtgattcttcggatcagcagagagtctgggatgctgaattcaatcacagaatcaagcttctctttcctcttctccatgaggtcatcgagctgtaaaagaatgtgtggcccacctaagctaccagagcttggttagacccatctccttcaaaggaattaagaaagacaaaggacaagaatttggtttcatgcagtagtaatataaaaactaagctacccaccatttctgcctgcctcacagtccgagggaagccatccagaagaaaaccatttttgcacaagggggtctccaaattcttctcaatgagctccactaccatttcatcactcacctggaagttaggaacaaaatagccttgggtttaaatccattacctaggtgactgacattagcccaactccacagccaaaagtttgtgtatataaccttattactaaacagcaagttttcttggacccaaagaagcaaaaataaaagcaaacgtgaaatggctccatttggaagatccagtttcataattttatctctgtggttgccaaatacacactctcgtctcttgaaattctcctgtatcccaaaaatctgggtgagggaagacagattccattacttgttacttcaccaggagagctttgtatcttaggtcctgaaggtccctcctgccactagagtccagagtccaaactgtcagataacagcttatcagcaatcagtgatcctcaaggcacaggaaatgtgaggacaaatggctgacagaccacctgagagagtgccaggagagaatggggttgaccaaaacacaggcatcagctttccctgttccacagctgtcattaggctaacagtaacgtgactgatgtgtgtacttggttacacatctgggccatcctggacatgaggaaacagagaagttcactgaattggcaagattgggtcagaaccaaggaactgaagagccaagccaacactcttccctcacttttttttttttttttttttttttgagacagtctcattctgttgcccaggctggagtacagtggcacaatctcccctcactgcaacctccaccttccaggttcaggtgattcaagtgcctcagcctcccaaacagctgggactacaggcgcacacgaccatgcccagctaattttttgtatttttaatagagacggggtttcaccatgttggccaggctggtctcgaactggtgacctcaagtgatctgcctgtctcagcctcccaaagtgttagtattacaggagtgagccaccatgtccagccctaagccaatatacttctgagtctctctaaaaccccaataaggacttctcccagttttcagaaactggtttttctcttgggctgttatagaaagaaaagtctccagcctgtagtgaagcctgcccatcttggcagctaatgcttttatttcttggtgctaactgtgaacttggggacaaagtacacactctgcaactaagtgaaggttggagataagcaatctcattgccacatctcaattttttcttagtacagagtcttctgtcaaaactcaaagtccaaaatatctagctttctggtttgactcagagattcaattacatgaagggaaaactagatagaaatgggcaggcagaggtatcatttgatacagctacagaatctcaaagcctaacagaaggtaacttgaggattaaagcaaagtccagctccttccccaaccaacattctaagataaaaaaagaccagaagaccaagcacaaaatgacttctgaaggtgattctcagaggccaagttccagaataactcagttataattaatctagcaatctttgattagtgccagaaaataatagattgtatttgtccaatcaggtcaactggcctaaagaaggagaaaatgtggctgggcatggcagctcacacctgtaatcccagcacttagagaggctggggcaggaggactgctcctgggtttagctcagttcaaaaccagtgtgggcaacacagtgagactccatctctacaacaacaacaacaacaacaacaacaacaacaaaagtagcagggcatggaggtgtgtgcctgtaaccctagctactcatcaggccgaagtgggaggatcacttgagcccaggaggtcgaggctgtagtaagccatgattgcaccactgcacaccagcctgggtctcagaacaaaaaaaaagagagaaaatgcaattatcgtccccagataagaaggattacctttgtcacaactgcgaagtaattgctttgttacagaaacagcacacagagccataaagcaggttaaaaaacacttctgtgacttcctaaatcctctcttgaatacatctctgagttctggcctagggacagcagtttcatttctggctctaaaatttaggtatataacaaaacacaccagcacagaaaaacttcaagaatactatgaatgagtgccataaattcagaacaaacaaaataacttgcactctaaaaagtcttayaaggccaagtgcggtggctcacrcctgtaatcccagcactttgggaggccaaggagggtggatcacctgaggtcaggagtttgagaccagcctggccaacatggtgaaaccccatctctactaaaaayataaaaattagccaggcatggtggcaggtrcctgtaatcctagctactcgggaggctgaggtacaagaatcgcttgaacccaggaggtggaggttgcagtgagccaagactgcgccactgcactccagcctgggcgacagagcgagactttgtcaaaaaaaaaagaaaaaaaatttcctataatctgccagtttgttaaaacaccctctagcacatggttgttcaacagaattttgtttgatgatggaaagttctgtatcagcgttggctggtaaatacttgaaatatggctagtgcaactgaggaactgatttttacattaattaaattaatctaaatagccacctgtggctggtggctaccatattggacagtgcagatctagattctgaggaatatcaacactcattggtaccaccaaacctaccagtttcccagcatccatagttgccttcagcttttttcctagctctgagccagaagccaccatggccctcagcatgtccccagtagctaaatggcagacacagaagttttcagccaatctgggtgcctacagagaggaagacaaaaaccaagattcaattacattacaggctgtggagtcagactgcctaggtgtgaacctggccctgccacttactggctatgtaaacatgggcaaatgcctacttccttacctgtaatggggataaaagtaccttatattacattctaacatatactgattatagggttatggtaagaattacatgaaataatatatgtaaagcacttaaaacagtacaactagcacacaggaaggartcataaatattaattatcactatttccactcaacacactagtgacacataagtttcagtttccccattataaatgggaagacttgctgggcatggtggctcacgcctataaccccagcactttgggaggctgaggtgggcggatcacgaggtcagaagttcgagaccagcctgaccaacatggggaaaccccgtctctactaaaaatacaaaaattagctgggtgtggtggcgcttgcctggaattgcagctactcaggaggctgaggtaggagaattatttgaatctggtaggcagaggctgcagtgagctgagattgcaccacagcactccagctccagcctgggtgacagtgagacttcgtctcaaaaaaaaaaaaaaaaaaaaaagagaataaaaatagtaccaacacttcacatggttgctgtgaggtttaaatgagatcatgtatataatgcacttggtacaacacctggcacataacatgtgctgaataaacatttgccaaagggatgaatgtacaattgtcatgtactacagctactgggtcagggaggcaactaggagcagtttgcccccaggcagaactgggttttcctccttccctgtcactaagtagctgtactatggtggccacctcacttttcagtttccttatctgtttaaaatgaaggcaaaaaaggctccatctcagaaggtagctgtgaggattagctgagatatatacaaagagcacttggcaaataataagcacttacatactagttttaggaggcattatagtgttttggtcaagagcacaggcttgagagttaaactgctggtttgcagactccaggtccactaaccattatgtaaaattgacttaagatgtcacttcacctttctaggtttcaaatttcctctaagtaaaatggagatggtaatagtatctgtatcactgggttgatgagaagattatacagaattcagtatatgcaggccctggcatatagtaagcgctcagtgggcactggctgttaccataacccctgtcctaatcctatattcattcatacaaaaagaaaacatttactaatgcctttcccaagaaccctgtcgggagcctgggaaacagatgaataaaaggcatagactatgtacttaaagagcttatatttggtgaattatacatgagaatgcagaattagaacaggaagagaccctagacagctcaacactggctttgcagtgggaaaaaaagaatgcagaatttacaaggaatataatcagttcaaggagctcaattttagctttttccgttcaattgttttataaactaagcaggtttagatcccgattccaacaaatcagttcactgggagttttcttttctttctttctttctttttttttgagacagagtctcactctatcacccaggctggagtgcagtggcacgatcacggctcactgcagccacgaactccctgggctcaggtgattctcctgcctcagcctcccagtagctgggattgcaggcacaagccacgtgcctggctaatttttatgtaattgggagttttcttaggtgcatgcttaggtgcacacaataaaaggtacatagatagggctggtttgtgattcatggaccaattcagttaaagcaaagaaatgacttcatagcaaaatggaatctagtgagaaggcattaaaaactgtacttggccgggtgcagtggctcacgcctgtaatcccagcactttgggaggccaaggcgggtggatcacaaggtcaggagattgagaccatcctggccaacatggtgaaaccccgtctctactaaaatataaaaaaattagccgggcatggtggcgcatgcctgtagtcccagctactcaggaggctgaggcaggggaatcgcttgaacccaggagttggaggttgcagtgagctgagactgcgccattgcactccagcctggagacagagcaagactccatctcacaaaaaaacagcaacaaaaaaaaactctgtactctgggttgggcgcagtggctcacacctgtaatcccagcactttgggaggccgaggcgggtggatcaccggaagtcaggagttcgagactagcctggccaacatggtgaaaccccatctctactaagaatacaaaaattagctgggcgtgctggcacgtgcctgtaatcccagctacttgggaggctgaggcaggagaattgcttgaacccagaaggtggaagttgcggcgagccgagatccagcccgggcgaagaagcaagactacgtctcaaacaaacaaacaaacccaaaaaaccaaaattctgtactttgcaaaaycagtgaatgtcaggagccctgacaatgaaaaaccaggctggcactgtggccgtacatctagagagtgctttctgccaatctttctcattgctgttgaaattaacctgggtaaacaatttggaggtcaggcttgctcaagtggaaaggctgaccaaaacaccacagagaagagctgttagcacagaacctgttctatttttatcactcccaaactgcaggactcttatgcactgttccaggtgattggattctacagctagatgaaagaacacacaccaatagggaagaaaactaattcctggctgggtatggtggctcacgcctgtaatcccagaactttgggaggctaaggcgggtggatcacgaggtcaggagttcaagacttcaagaccagcctggccaagatggtgaaaccccgtctctactaaaaatacaaaaattagccaggcgtggtggtgggtgcttgtaatcccagctactcaggaggctgtggcagagaactgcttgaacccgtgaggtggaggttgcagtgagckgagatcgcgccactgtactccagcctgggtgacagagcaagactcttgtctcaaaaaaaaaaaaaaaaagaaaaagaaaaaaagaaaacgaattccttcatttcctgctggctgcctgggagtcaatgtggtaggctgtaaagagcacgcatgggttttgaagtcagacagatttacacttgattcctagctaaggcactcagtagccgtgtgatcttgggctaagtacttaacttctcagagtgtcagtttcctcatcagtttaatggggataatgactacttcacagggttcttatgaggataaatgaaataaagtaccaaaaacatcagacacgcagcaggcattcaataaataaaaggcttccttccatggtctttcttctttgcattagtctttatttacaggctgcagaaacctaatgaaataactttattatagtcccctcacacttcaaacttatgctttagagcagccattcacagactctaaatcactggaggaatgctgttaaaatgcagattccggctgggcgcggtggctcacgcctgtaatcccagcactctaggaggccgaagcaggcggatcatctgaggtcgggagttcaagaccagcatgaccaacatggagaaaccccgtctctactgaaaatacaaaattagctgggcgtggtggcataatcccagttactagggaggcagaggcagaagaatcgcttaaamctgggaggcagaggttgtggtgagctgggattgagatcgtgccgctacactccagcctgggcaacaagagtgaaactccgtctcaagaaaaaaaaaaaaaaatgcagattctagttcaatagggtagggcctaagtacctgcattttaagcaagcttcccggcctggatgagtggctgggctctaaactacactttgaagagcaggggtctgaagcccacactcagtcatagtctgttgctgtcagccaaaaactgttgctgagcccaagaaacaggctcatcacctctatgaaaactctgtggggtggaggactctggggtaattatgggaatgctaaaaccactagagagacagcatggtgggctgagtggttctcaaatttcagtgtattatcaatcatctagggcatttcctaggcccacctttaaagtttatgaytgagtggctctcaagcagcacctcaggttctgatgggtacagtatgtgaagccctgatgtagtggcagagactgggttttgtagtggtatagatctgggttaggaaacgggctctaccgtttattcactgtgtcatcctgaacaaattacattaccttttctaaggtctcgttttctttatccatagaacagaaaacagtgtctatctgctgaactgttgtggggatttaataagattacgtatgcaaagacatccagcatagggcctgacaactaggaaataaagggaaactatcagtcctagagatttggtttaatcccaaattcaccagtcttctcaccttgtaaccatcatcttcttcttatgtttttttagaaatgaggtcttgctatgttgcccagggtggagcacagtggcttcacaagtgttagcccactacacatcggcatgggaattttggcctgctctttttctgacctgggccgatttacctctccttaggcaacctagtggtctcctgctcctgggaggtcaccatattgatgttgaacttttttttttttttttttttttgagatagggtctcactctattgcccaggctggagtgcagtgacatgttcatagttcactgtggcctcaaactcccgggctcaagcaatcttcctgccttagtctcccaggtagctgggactcaggcatgcagtaccatgcccggctaattattgtattttttgtagagatggggtttcgtcatgttgcccaggctggtctccaactcctgagctcaagcgagctgcctacctcagcctctcaaagtgctggaattataggcacaagccacagtgcctggcctgatgctgaatttagtgcagacacctgatcagcatagcacactatagccccaaactcctgtgcccaagcaatcctcccaccacagcttccggagtagttgggactatgggcgcatatcactgtgcctggcacaattacctttgtgcctccagtctttgtcactcctgctgtcaatgttcctacacatgcagctagaatcatatcttaaaacactgttggatatgctacctaccctccaaaacatacacattccgaagccttcaacatctctgtggtacaatagaggaagagtccaaatatcttagcctggcactcagctgccctccacaatcaacttctaaaacctgccaagccctcccaacttacttccacaagtgccctgtgtttacgtcctgcaccactgcagacaaactgctcttacgcatggttcccaaatacgcggcataaatgcctctccaaggacctcaacacaagctcctcactccacaggaatgccctctctgctccaatattggtctaagccttttctgtagtatacttctgagtacatttctcccatcaaaagcctaactgggctggaagcagtggctcacatctgtaatcccagcactttgggaggatcacttgaggccaaaagtttgagaccagtccgggcaacacagcaagaccccatttctacatttttttttttaattagctgggcatggtggcaggtacttatagtccagctacttaggaggctgaggtgggaggaccatttgagcccaggagttcgaggcttcaatgaactatgaccgtgccattgcactccagcctgagtgacagagtgagaccctgtctcctaaaacaaaaacacctccccaactaccccttcttccgctgaggattcatattaacattagctaactttgagcatgtgcatcatgccaagcagttttccatgcattgttttacggtacttagtatgtataatacataataaayccatgaggtaggaactatttttaactgcattttacagatgaaactcaggggctaagttgcccaagatcacagagctagtaaaagaactggcaacaggccagattaccaagccctagctcttagccatgacactataaggctttaagacaaacaacccaaagagccttagtggctatcctcctggaagggagcacaaggaggatttcaaagtgctggcaatattctgtttcttgataatgggtgtaagctacacaaatctgttcacattgtaaaataaatcaagctgttcactttttctaggtatcttatagcttaagttgttttttttttaatcrcagaaayctgtgtttgcatttcagatgtctcttaacttactgaggaaatcattaccaacctcactgggtggacaggaggatgaacaggagaacttcagcaaattgtagttcttgttctatccctgaactaacccaacattcaaagtcactcatctgatgcttcccacctggcaccctgcacttgtatgtatttttccattcatattcatttctgcctcttcatctagattacacagcaacaatgtaaattaatgactactcaagagtcagacagacatgagttcaaatcctacctttgctacttactacatgtgtgtcctgaggcaagataaagcctctgagctcagtttctctgtcagtaaaaaggacctatctcctagtgttataggattaaatcagatgatacatgtaaaatctttagcttgggggtctgtcacataactgagcaatgggtgactatgttgtaattattacaccctcctgacatgcacacggtaggagaaaaatctaacctggggcagtagatagcagcagaaagagcaggagctttggagtcattcagatgcaagctctgtaaattacttgctatgtagcctagagaacaagccattcaaacttcagtttctccaactgtaaaaggggaaataagagtgtgggtctcagagatgttgcaagtatcactgcaatgacataactgatgcatctgacccataagactgcctaagcgtgcctggcctcgaagaattgggcataagtttgacacatggaagaaatgaggaggggttggcaaaaaaaccaagaaacatacctttggttttgaccacaccgaaggagcatccaaccccaaaagggaggcaaggaaataaagttatttaaataaaataacaaacccaggtattatagatgttttaaaacattacattgatgcaaaagcgagtagttttgaaatatttaactactttagttaaaagtgaggagttttaaaaggaaacattatttcagtcatgcaacataaagcacataaaatactgagttacgcaggtataacaaagtatagcaggaagaaaacaaacattactgagcaggcactaggcactaaccccaggttagggattttacatgtaagattgcaaacatctgccagtgggagccaagcaggcaatgcaactgtatgaaatgagtcaaatgtaagcaatgggcagtgaagaggaccgtgcaggggacaggaagacacacagaccatccaaagcagcaatgccacacaactgcaagtgactgctgccacactggaatggaggcatcactgccaggtcttctggtttctcaagagaaactggagctctggatttttaagagaaattgcataaccgaaaacgctctgtggtcaacctactattttgaaagctgacaaagagaataaatcaagcatttatcctgacttttctataccaaccatatcacggggtaacgaaacagtagatgaggggaagtttctctttatagaaatatttcagctaataaatgaccagggaacaatataattagaataccaccatttcaccatccataacgaattactgaacctagacactgaacagcatgactataaacaccagagacaaggaaataccatgtgcctcctcagggagagcacagcacccaccacctgtgaagtagttgggccaaaaaattgaacctaaattgaattaagtatatactaattaagtataaaccaccaatttacaggaaatagagagggcagaggaagatgttaagtacaccaggggaatacaactgaaaattcccagagagtggtataatactcccaggaaaaataatccaatttctggggctggacatgatggctcacggctataatcccaacactttgggaggccaaggtgggcggatcatgaggtcaggagatcgagaccatcctggctaacacagtgaaaccccgtctctactaaagatacaaaaaattagccgggtgtggtggcaggcacctgtagtcccagctactcgggagactgaggcagaatggcgtgaatccgggaagcagagcttgcagtgagccaagatcacaccactgcactccagcctgggcaacagagcgagactctgtctcaaaaaaaaaaaaaagaagaaaaataatccaatttcttcggcaaaaccccaggaaaaaaagagaaggggaacttataaattaaaagaaaggatgggcacagtggcacatgcctgtagtcccagctacttgggtggctgagggaggagcccggtagttcaagaccagcctgagcaacatggcaggacccccatctttaaaacactagaaaagttagccaggcatggtggcatgcacctgtaatcccagctattcaggaagctgaggtgggaggactgaggctgccgtgagctatgattgggctactacactccagcttgggcaactgagcaagactttgtctgtaaaaaaataaataaataaaagaaacttaaaattatcacattggtaacacaaaagaaaatttgaataaaaattgttgattttttaaaggatattatgcttatgtttttaaaaattatcttttagcaatacatactaatattatttacaaatgaaatgttatgatgcctgggaggtgctttataataatttgtgaagggagaatggctagaggagcgaaggccaccagttaatggttggggctgggtaagggctcattatgccatcctgtcttcttttgtgtattcaaaattcttcataataaaaagttaaggtgtatgagatgtctctgcaggctaaatgttattgtaggctaccatttgtaaagtctgatttaagatcttttttttttgagacaaagtctcactctgttgcccaggctggggcgcaatggtgagatcccagctcactacaaactctgcctccaaggctcaagtgatcctcccacctcagcctcctgaatagctgggactacaggcacacaccaccatgcctggctaatttttgcatttttttgtagagatggggtttcgccatgttgcccaggcttgaacttttttttaaactccacaaaaatacatacaatcaccagtattcctattgttacaactctggaaagtgtacagaggttaaatgacttgtgtaaatcttatcctttcaactcccagctctaatcacatctcctctatttctacaaagccttctctgaccaactctcatcttcatgcacccttatcaatcaactcattagtataatgttcttctaaacttcctgaataaatcatgtcttacactgaaacatccaagttgaaggaggggaagggagatgtgttactaagataaaagggagtcaaaatttattgagtacctactatatagcaggctgtcatctaggttgtgggtgcttgatacacacacacacacacacacacacacacacacacacacatatatcataattttccagtatcattgtgaatgtttagttgatgagggcaagaactttatcagtcttgcccaatgctttatatccccaatgttaggtgctcatgaaatgctgaatgagcaaggtaggtattatccccatttttcaggtaagaacactgaggctcggaagttacatagctagctaaattataaaacccttgtcccagtactatactagtataggttgtccattccataattactgaaattattaacttcaatatgagttaagaaaaaaatctcagggcatagtggcttgtgcctataatccctgcactttgggaggtcaaggcaggatgatcgcctgtgtccaggagttcaataccagcctgggcaacatagcaagaccctgtctctacaaaaaattgtttaaaaattagctgggcatggtagcatgtgcctgtactcccagctacctgggagggtgaggtgggaggattgcttgagctcacaccactgcgctccaacctgggcaacagagtgagaccctgtctcaaaaaaaagaaaaagaaaaagaaaaacaatgaagcatttgagctactgtttatacttgatcactcacagcaaaagtctgcagagtctaagattaaacttccctaagctgcagattacccaataaatgagtgtggcagcaacaggaaagagatgtcaacaacgctgaggataaaggataaagggatcaggtacaggtaagctccaaagaagaatcatctcagtctgtggagagaaaagaaagctgtattttctgacttagtgcccaggtcacaggaatgaatggagtgttccagaacttctttctttatcacccacattaatctgtgacattcatccacttccactaaccccatcaagggccaagtaatgtgctaggtgccacaaggggtaccaagaatgagtaagatggtctgtttgccaagatttttaaaacttggcaagtgctaggaagagaaaagcgggcacagggcagtcctcagattccctttcatttgggagctcagacttccctctttgaagcctaacaacaggcaagagccagaggcttagggccccaggtgcaatgccagaccccaagcaagaaggggacatcaataatccaacctgcgggcttccaaatccgaaatgagatcatcgatcccaaccctaatctatggccccattatgtcccagatctagaaggggcccagatcccaagtgaggcccctgttgcctgctagggcagatggtaacttcagactctaactccatggttcctgaggtctcaggctcatgaaactcatttcactaatttgggaaagccacctgacctttctgggcctgttttttaacctgttgattgataaagttaaaatttcaagttccctataaacaacaacaaaataaaaaaaggaaaaaataaataaaaaccaaagggaaggaagatacaaacaaacaaaaataataaaaacaaaataaaaaaaaattcaagttccttttcatctaaaatcatttgcgtcatcccaagctgcttagccttcagtagcctcaggtcctaactccaagccaggtcccatgagcactcccaacccttattgtggacactactcaaaggttgcgactcatgggtctccaggctataaaccagttctacacattcacccccaactttcaaacagggagagccttaggtttcctcccatctcaattcaactggctcacacagcacatgtcacctctcactctgccccacgtgttggagatgcttctcctcccctccccctaagtcataaatcattatcaaaatctcccgacctccagtgcctggaatgtaaccctgattctggacaattcacctccaactcgcaggtaacctgggccataaagctaattgcctccattcagcctgtaatctagatgcctcggcccagggctcactctacccctcaaacctttccagtctctagacccttagtggaattaatcagccctcacattccctaacccaacacttcaacactgaatccctcgggcactccaatcctaactcagactgccccgacctccaatttggaccctctccgaaatgccccaccagaaccgagaccccggccagcgttccccgcaggccttagtccccggcccgctccgggcaggtccagggcttctagatctccggccgccttgaccttggagttcagcaggctccgccgccaagcccagtcctgccgctcacctgggtccctttaccggccccgggaggccccagcagcacggcccggatgcctttaggatactcgggttctgccgctggcacgctgggagccatgtccgccgaagtctctcactgccaccagttcgcacgcctcacaggtccagtgcttcccaggtcaacgcacgcacgccacgcacgtcccactcgccgctcacactggcccatagccgcgtccgtcagcccgttccgcccgcccctgagcacgacggactcttcaccttaccaactgcacggcgatactgaggaactttgcttttgattggacagaattggtgcgggataaggaaggggcgggccagcatgtactaagggtggcgggtgtgcggagtgggcgggaaaacgcgaaggaggacaggaggtcaggccggaaggtatacttcggcatttgacagttgacgacaccagcaacaacattgaaatcctattaaattgcgcgtgggagtttaaatgggtaaaatcactcttagaagacaaattagtaatatgtttcaaataccctttggtccagcaattccacttccacgaattcaatggataaaatcaaggatatgagtaaagattcgtgtaacaaagttgttaattgcaacacttagcccaaaagcccgagaaaaaccataaaataaaggcaatactccaaatgtccaacaataagagattggttaaataaattg

SEQ ID NO: 97582 - DNA, 13761 bp, Homo sapiens
  misc_feature (1)...(13761): n = A,T,C or G
aaaaaaaaaaaacctgattccagggcccagccaaaactactaaatcagaacctctgggtgtaagcctaggaatctgcatttcacctccctctcagcagtaccggctgtgtactttgtttagaaatcactaagcatttcaagacagtgatgagaacagagggtgaaaacaagctcagggccctctgagctctgggccccatgactgagtaggtcacaggctcgtgaagctggccctgcagcccagaatgaagcctgcatgctctacccaaaggacgacggagcatttggttagcgggtttgcctcttcatccaaggacctggaaggagaggagaaattagcaactttaaaggtttcctctccctgtaagagcagtgcggtggttttagtgagaagagtgcagcggagtcccccggcccgtggctgagtcatctccagaactgtgggctttcagtgacagaaggagaaaggctgagcctgcgctagatctgcgggagctccttggtcaatccatcaatccaatagcattaaatgactcttctggcagattggatcagaatgggaattcattaaaggagaccaggtggttcgcagaatcgctgtgagcctgttgctcatgggaacccgtctggggtggggggcaccaggcggccactgagagctcagcccctgttcctccagagaggggatcttgttgcaattgccacctctccgtgcaacgaagcacctgccaccatctccgctgctttgtgtcaccagcgtctgatttgaagtctgattgcattgccgcggtctcaggcccacaacctagctaagagggaggctgggaagacaagtgttgcatttcagtttctgcagcagacagcaggtccctctgcccaccaaacaacccttacccagagtgggcacatgtcaagcttttattcaactcggtgttgagggaatcagcgtaacacagctgattcaaaggaggagatgagagactagtattggtttctcatctgtctgtctgtctgttgtcagtgaagataaagaatgccagaatcaaacagctctgttagatgcgaaagtggttcatgccctacagtaaatacaaccataacctttggagtcatcttctctactgggtagagatcatttgcatcttatctgttttctctaagttcaaagaccctggggcctaatgaataatatataatacgtcaaacaaagttccattctctgagaacaatgccaaagttccattctccgagaacaatgccatctaatagaacttcctgcggtaatggagatattctgtctgtgctatccaatgaggtcgccactagccactgcagctgtcgagcacgcaagatgtgagtgacactgagaaactgagtttttttaaaaagtttttttttttttttgaaatggagtctcactctgttgcccaggctggagtgcagtggtgcaatctccactcactgcaacctctgcctcccgggttcaagcaattctcctgcctcagcctccctagtagctgaaactacaggtgtgcaccaccacacctggctaatttttgtattttttagtagagatgaggttttaccnnnnnnnnnnnnnnnnnnnnnnnnnnnnnnnnnnnnnnnnnnnnnnnnnnnnnnnnnnnnnnnnnnnnnnnnnnnnnnnnnnnnnnnnnnnnnnnnnnnnnnnnnnnnnnnnnnnnnnnnnnnnttttaagtaattaaaaaaaaaatagaagtgggaaggccgggctgtggtggctcacgcctgtaatcccagcactttgggaggccaaggtgggcggatcactcaaggtcaggagtttgagaccagcctggccaacctggtgaaaccccatctctactaaaactataaaaattagctgggcgtggtggtgcatgcctgtaatcccagctacttgggaggctgaggcaggagaattgctagaacctgggacgtggagattgtaatgagccgagattgcatcattgcactctaacctgggcaacaaagacaaaactctgtctcaaaaaaaaaaaaaaagaggtgggttctcaccatgttgggatctcgccatgttgcccaggctggtctcgagctgatcactcaagtgatccacccacctcagcctcctaaagggctgggattacaggggtgagccacagcacctgacctattttaagtaattttagatttatagaaaatttatagacagtacagagagttcctatatacccttcacccagcttcccctaagtgggaatttgttaagtaactgtgcacgtttataaaaactaagcgattaacactcatacaatattaatcactaaactaccaactgtctgaattttctccatttttttcactaatgtctgttttctggtccaagagtcagtccaagttcccacattgtgcttagtgcttgtatctccttagtcttcaatctgtgaccatttcttagcctttccttgtttttcatgaccctgacacttttgaagagtgccagtcaaggattttgtgaattgaccctaggttgggcttggcaggtgttttctcctgatgggactgggatggtggttttggaagatcacagagaagtgagggaggtaccttctcattgtgtcatgtgaggggtgcgtgatacccaagcgtgggctcactggccagaggtggtgtctgagatgcatctcccctgccaccttaccgtattccctcttgtgctctgttctttagaagggagtcaccaagtcccacccgccttcaagatgagggaagttaagccccacctcctggagggaggaatatcgaagatttgtggacatatgttaaagccaccaccatggtttgaagggagattctttgaggctatgcagatttcctgtttctccttaaagtttcacctgctaacttcagcattcttctgtggatcctgcctgaggcagttattactgtggtgttctaatgatgattttctatttccctcattccttctatatttatgatttattaattagaattctagttgggcgcagtggctcattcctgtaattccagcactttgggaggccgagacaggtggatcacgaggtcaggagatcgagaccatcctggctaacacggtgaaaccccgtctctactaaaaatacaaaaaaattagccgggcgtggtggcgggcgcctgtagtcccagctattctggaggctgaggcagtggaatggcgtgaacccgggaggcagaggttgcagtgagccgagatcgtgccactgcactccagcctgggcgacagagcgagactccgtctcaaaaaaaaaaaaaaaaaaaaaaaagaattctataaggaacatttgaaccttttccctaatttatttatcttgtcaaccatttattttgttgttgtttgttgttgttgttttgaaacaaggtctcactctgttgcccaggctggagtatagtgacgccatcttggctcactgcaacctccacctcctaggttcaagcaagtggtacctcagcctcccaagtagctgggattacaggcatgcaccactacacttggccagtttttgtattttttgtggagatgggatttcgccatgttgcccagcctggtctcgagctcctgacctcaagtgatgttcctgcctcagcctcccaaagtgctgggattacaggtgtgagacaccacggctggcccaactatttgtttatatcaaaatgaacttgtgggtatttactttattctttgaaaggacataggtcatctttttgccttatttcccagttttagataatttttctaatatgtgtaaaggtgttctgatgtaggacagtcaaaaagagagatagaagtccaccacactggatattttctggaaagatcaccaaaaccttgtcattggaaactaggatatctgggggcttaaatgcctgctacggggccgggcacggtggctcacacctgtaatcccagcactttgggaggccaaggcaggcggatcacaaggtcaggagatcgagcccatcctggctaacacggtgaaaccccgtctctactaaaaatacaaaaaattagccgggcgtggtggcgggcgcctgtagtcccagctacttgggaggctgaggcaggagaatcgcttgaacctgggaggcggagcttgcagtgagccgagattgcaccactgcactccagcctgggtgacagagtgagactctccgaaggaaaaaaaacaaaaaagcctgctaggggctgcagtagaaatacctgtgagaataaaaatgagaagtccaagactgaagtgcgtgtctcagagtcctaaccacatccctccttacatatggacttgtgcaaaccacacctcttcggtcctcagtttcccccgagataagatgaagatataggtgctggtagactcaagattagtggttctcaaacttgagggtgtattagaatcccctggagggccccataaagcccagatttctgtctccacccacagaccttccgattcagtaggtctggggtgagacccaatgattgacatttctaaaatgttgccacgggctgctgctgctgctgctgggccagggaccacgttttgagtccgggtgatctctaagaagccttaacagttgtggacttaacattgattcaaatgacaaaatctttggacctggctaggaagaagtcccctaggccctgaaaacccagtggggagttgtgcagaggacactgtaagattgctgcatgccgcgcctggcattgacagcctgtgaggcccaaccactgcccggggagggtcaaagcctgagtaaggcagagaagctcaggctggaaactgggctccaccccttaacagctgtgtggccttgagcaagtgactgactgacttcctgcctcagtttccctacctatgaaaagaggatggtgcttaacatgacctggcataaagaaaatgctcaatgagtgtttattgctgctgaggtcttgctttgtctctggagtgagtggtgctgtcctagctcactgcagcctcgaactcctgggctcaagcaatcctcccacctcagcctcccaagtagcacaccaccatgtctggctaatttttttgttttgttttgggttggtttttttagagatgggatcttgctatgttgcccaggctggtccgaaactctggccccaagcagtcctccagccttagcttcccaaagtgctgggatatctgatctgtgttacaaccctatgaggctgtggccatcaccatcgccatttccagacgaaactagccaccgtgtcccaccagggtcattatttcttttctctttcttttttttaaatagagatggggtctcactatgttgcccaggctggtctggaactcctgggctcaagtgatcctcctgcctttatctcccaaagtgctgggattgcaggtgtgagccacagtgcctggctcagggtcattattttttattgagcccgtccagtgggaagaaatgacagtggtagaagcgatacctctttctagagcatgtccatctgccctctgccacaactctacccagcttggagtcccatttgccaatgtcaagcccctcacaaaatgtgtcacagattatgagaaaaattcaatataatttattaaatagattccgagggctcccccagggagcattgacaactcttagtacaataaatatcaataaattaacatagctgccacctcccaccctcacgagggtataataagtaagacttaagcctgcagaagaaaagcattccataaataccaagactaataacaataacctaatgtttttcaaggtaattcacaaattcacatctcagccctcccgggactagcccatatgaggggtccctgagattattcattggaaaaatgtacttaaggaatcacggcagagttcccacacttagctgtcggtcatctttttaaggctccttaagttcctgccaatccgaaaggaagagatggccttaagtggtggcctgttgggctccagaggtcaatgattttagtgcgaggtccatgcactctgaaaactgttgagaaatagtcaggatgaagcgtttacattcatgggtgtctgttggcacagaaatgtttgtttctggtgcatcttgaaatatgagtttgtcgaggtgctctatgatctcatcaataacagatttgttgtctagctgtctgattgtcttgagatatgcccggatggctgggctgtggatgttgtttggcggctgggcgtcagggctgagmcacggcagcgtgtaattctgggacacgakcacscccttctcttcctccacctgtggaatgaggagaaatggtcagtgttgggtttgcaatgacagctgcaagtcttaacagtgaatgtttgcatgcttcctccgtaacccgcctcgttgatatatttatctgatcaatgtcacaaccctatgaggctgtgccatcaccaaccccatttccagatgaaactagagcttaggtggctgcagtcctgaagcctgtgctcagaaccactgatccatccagctgaggcctcccagccttccagaacccactctcacgtgctcagggtggtgggaattgcagcacatctggccttccatggcagctccccgccctttgggactctgtgttaaagccacgcacgctccacttataaaggagagtgttaggcttgtccggaaaggcctccgagatgcaggcgagagttttccccaacaaaccaaggagtccggaccactccctcccttcctctttctaagtactaactagagtcagaccaaattgccagcagcacctcatcaacctgaactgcccagtcatcttgggttggtaacaacctctgccttttataaaagccaaggctaaggtctaaataccaaggcagatgagaagagtaatgccaattttatgaattgtttccaagtttgggcatttgtttgtttgatcaaagctatcttggctgggcacagtggctcacgcctgtaatcccagcactttgggaggccaaggcaggcggatcacttgaggtcaggagttcaagaccagcctggccaacgtggagaaactctgtctctactaaaaatatgaaaattagctgggcgtggtggcgcatgcctgtagtcccagctactcgggaggctgaggcaggagaatcgcttgaacccaggaagcagaggttgcagtgagccaagattgcaccactgcactccagcctgggtgacagagtaagactctgtctcaaaaaaaaaaaaaaagccatctttgcctgtctagtttcccccatcccttcctggcatagctacagccctggtttcaggtccggagagaggagcctctttggagggcaatggaaggcatttttaagaaatcgtttagaaaagaaatctcyagggcactcacatctttcaaaagcatcttygagagggactgtaattcctcgactattttctgtacatcatcacttggtcgtagtaaacggacgggcaacgtgtgggaggccarccagcctcccaggcagcagaacagaaagagcacagacgtcgaggggcctggagagagaacgatgccgtgagcgcatacatcacacacccctgcccaccctggctccatccctgcagccctgctgagccaaccctgggggtagtgcttccagaatcttcctggtgagataagatgatgcccaagactccggaagcaccaggaccagtgatacctgagtgagaggccatggcgagagagagcaaggccagcttcagtgggggcttctggagccagatgtgttcgccatggctgcctggaggtatataaagggccagggtgaggagaaagagcagtcagcgtcccgcccatggcaaaaccatttactcagcttttctccagaaaacactcaaaagttctactggccacggctgagtgaaagggctgaatggaaatgctgaggttaccctccaggtgggcagatgcctgactcagacacacacatacttcacaagaaggcacatgaatgcatctttgccattcttcttggaaggagcctgttgatttgactagacaaaattttgaagcccagggttgacagacacgaccataccaccaaggagcgggtgacttccaggagttcaaggccagcggccacagggaatttctggggaggaaatgcgaagccggcatgagatgtgcagaatgcggtatctctggaaatttctgcagcatatgcccacgccggtgtgcagggacggccccataactgctgtgaatgtggcgggtcgaaggcttcatctcaactccatgtggccttggacatcactggactctccatcgtgcctctgcaatctcagggcccagaaccagagactgtgatccagagttattgcttgaaatccttgttcatatcttttttcttttttttttttttgagatggagtcttgctctgtcacccaggctggagtgcggtggcgtgatcactgcaacctctgtctcctgggctcaagcaattctcatgcctcagtctcagcctcccaagtagctgggactacaggcacgtgccaccatgcccagctaatttttgtatttttagtagaaatggggtttcgccatgttggtcaagctggtctctaactcctgacctcaggtgatctgcctgcctcggcttcccaaagtgctggaattacaggcatgagccactgcgccagcctagaaactttattgcttttctttctttctttctttctttctttttttttgagacagagtcttgctctgtcgcctgggctggagtgcagtagcgcaatcttggctcactgcaacctccacttcccaggttcaagcaattctcttgcctcagcctcctgagtggctgggattacaggcgcccaccaccacgcacagctaatttttgtatttttagtagagacggggttcactatgttggccaggctggtctcaaacgcctgaccttgtgatccacctgcctccgcctctcaaagtgctgggattacaggtgcgagccaccactctggccttagaaactatttctaagttcattagctttctttttctttctttttttttttttttgagacagggtctcattctgtcacccaggccagagtgcagtggcatcatcacaactcacggcagccccgatcccctgggctcaagtgatcctcccacctcagcctcccaaatagctgggaccacaggcacaaatcactatgctaatttttttttttcttttttgagacagagtttcgctcttgttgcccaggctggagtgcaatagcacgatctcggctcactgcaacctccgcctcctgggttcaagcgattctcctgccttagcctcccgagaagctgggattacaggcacccaccaccacgccgggctaatttttgtatttttagtagagacggggtttcaccatgttggccaggctggcctctatctcctgacctcaggtgatctgcccgcctcagattcccaaactgctgggattataggcatgagcgactgcacccggcctccttattcatattttagtgccagctttgatcaggccattttatagggtatcgggaatagcggtgaagaagttagagttcctgcccttgtgggcccgtcattgctgtgggctgcggacaatagcaacaacattcataaataagctagaaagcactgtgacggttggagagtgacgggcaggatactttaagtcaggtgatcagcaaaagtctctctgagaggtgacattgaagaagagactgaaagacaagaaggagccagtcgtgggaagacctgggagaagagtgttccaaggcaacgggacaggagtgcaaaatcctcaggtgaaaatgagctcgatgctgttcctagaacgggaagagggtcatggcagccacagtgacgcgagaggacaggagggtagtggggaggtgggcagcggctccatcacagaggcctgaggctgggacaaagagcctgggttttattccacatgtgacgaggcagtgctgggcggctttcagtagggaaacataagatcagatgcactttatttttttcttttcttaattgttttgtcttttgttttgtttttttttttggagagaagatctcaagcgatcctcccaccttggcttcccaaagttctgggattacaggcatgagtcaccatgcctagccctgatgaactttatttattagtagtagtagcatttttttttttcttaagacagagtctcactttgtcgcacaggcaggagtgaagtggcgcaatctcagctcactgcaacctccacctcccctgttcaagcaattctcgtgcctcagcctcctgagtagctgggatcacaggcatgtaccaccatgcctggctaattcttgtatttttagtagagatggagtttcaccatgttgggatgaggtcagtctgggcagcccacagaactcaaggtgcacagaggggacacagccaggaagccctcccacccatcatcccaagtccccctgccgccagccaccactgactttttctttacttcccaaactgccacaatatggctttcaccaccccactaatgtaatcaatatcctctagcagagtccatggtaggcatgaccttcatccacaggtgtttactgccataattatgttgcattgcatggcaaaaggggttttgtggatgtagtcatgattactattcagtttacctaaaatagagagattttcctgcattccctgggcctccccaatgcaatcccatgagcccataaagcagaagaggaagtcagagagattatgagcaagagaagggctcacctgctgttgctggcttgaagatggtggggggcagcgtggaaagcacgagaaggaaataatttggtcaataaccactgagcttggaagaggatgctgagacctagatgagaaccctagccagccagcacctttatttcagctcagtgagttcctgagcaaagaatctatccatggcatgctagactttgacctacaaactctatgagagagaaagtgtgtgtgtgtgtgtgtgtgtgtgtgtgtgtttaatagaaaggatcttgctctctcacccaggctggagtgaagtggtgtgatcacggctcactgcagccttgacctcccagactcaagcagccctcttaccccagcctcccaagtagttgggactgtaggcctgcaccaccatgcctggctaatttttctattttttgtagcgatgggatctcaccatgttgcccaggttggtgttgaactcctgggctcaagcagtcctgcctcaccttcccaaagtgctgggatcacaggcgtgagccactgcgcctggccacnnnnnnnnnnnnnnnnnnnnnnnnnnnnnnnnnnnnnnnnnnnnnnnnnnnnnnnnnnnnnnnnnnnnnnnnnnnnnnnnnnnnnnnnnnnnnnnnnnnnnnnnnnnnnnnnnnnnnnnnnnnnnnnnnnnnnnnnnnnnnnnnnnnnnnnnnnnnnnnnnnnnnnnnnnnnnnnnnnnnnnnnnnnnnnnnnnnnnnnnnnnnnnnnnnnnnnnnnnnnnnnnnnnnnnnnnnnnnnnnnnnnnnnnnnnnnnnnnnnnnnnnnnnnnnnnnnnnnnnnnnnnnnnnnnnnnnnnnnnnnnnnnnnnnnnnnnnnnnnnnnnnnnnnnnnnnnnnnnnnnnnnnnnnnnnnnnnnnnnnnnnnnnnnnnnnnnnnnnnnnnnnnnnnnnnnnnnnnnnnnnnnnnnnnnnnnnnnnnnnnnnnnnnnnnnnnnnnnnnnnnnnnnnnnnnnnnnnnnnnnnnnnnnnnnnnnnnnnnnnnnnnnnnnnnnnnnnnnnnnnnnnnnnnnnnnnnnnnnnnnnnnnnnnnnnnnnnnnnnnnnnnnnnnnnnnnnnnnnnnnnnnnnnnnnnnnnnnnnnnnnnnnnnnnnnnnnnnnnnnnnnnnnnnnnnnnnnnnnnnnnnnnnnnnnnnnnnnnnnnnnnnnnnnnnnnnnnnnnnnnnnnnnnnnnnnnnnnnnnnnnnnnnnnnnnnnnnnnnnnnnnnnnnnnnnnnnnnnnnnnnnnnnnnnnnnnnnnnnnnnnnnnnnnnnnnnnnnnnnnnnnnnnnnnnnnnnnnnnnnnnnnnnnnnnnnnnnnnnnnnnnnnnnnnnnnnnnnnnnnnnnnnnnnnnnnnnnnnnnnnnnnnnnnnnnnnnnnnnnnnnnnnnnnnnnnnnnnnnnnnnnnnnnnnnnnnnnnnnnnnnnnnnnnnnnnnnnnnnnnnnnnnnnnnnnnnnnnnnnnnnnnnnnnnnnnnnnnnnnnnnnnnnnnnnnnnnnnnnnnnnnnnnnnnnnnnnnnnnnnnnnnnnnnnnnnnnnnnnnnnnnnnnnnnnnnnnnnnnnnnnnnnnnnnnnnnnnnnnnnnnnnnnnnnnnnnnnnnnnnnnnnnnnnnnnnnnnnnnnnnnnnnnnnnnnnnnnnnnnnnnnnnnnnnnnnnnnnnnnnnnnnnnnnnnnnnnnnnnnnnnnnnnnnnnnnnnnnnnnnnnnnnnnnnnnnnnnnnnnnnnnnnnnnnnnnnnnnnnnnnnnnnnnnnnnnnnnnnnnnnnnnnnnnnnnnnnnnnnnnnnnnnnnnnnnnnnnnnnnnnnnnnnnnnnnnnnnnnnnnnnnnnnnnnnnnnnnnnnnnnnnnnnnnnnnnnnnnnnnnnnnnnnnnnnnnnnnnnnnnnnnnnnnnnnnnnnnnnnnnnnnnnnnnnnnnnnnnnnnnnnnnnnnnnnnnnnnnnnnnnnnnnnnnnnnnnnnnnnnnnnnnnnnnnnnnnnnnnnnnnnnnnnnnnnnnnnnnnnnnnnnnnnnnnnnnnnnnnnnnnnnnnnnnnnnnnnnnnnnnnnnnnnnnnnnnnnnnnnnnnnnnnnnnnnnnnnnnnnnnnnnnnnnnnnnnnnnnnnnnnnnnnnnnnnnnnnnnnnnnnnnnnnnnnnnnnnnnnnnnnnnnnnnnnnnnnnnnnnnnnnnnnnnnnnnnnnnnnnnnnnnnnnnnnnnnnnnnnnnnnnnnnnnnnnnnnnnnnnnnnnnnnnnnnnnnnnnnnnnnnnnnnnnnnnnnnnnnnnnnnnnnnnnnnnnnnnnnnnnnnnnnnnnnnnnnnnnnnnnnnnnnnnnnnnnnnnnnnnnnnnnnnnnnnnnnnnnnnnnnnnnnnnnnnnnnnnnnnnnnnnnnnnnnnnnnnnnnnnnnnnnnnnnnnnnnnnnnnnnnnnnnnnnnnnnnnnnnnnnnnnnnnnnnnnnnnnnnnnnnnnnnnnnnnnnnnnnnnnnnnnnnnnnnnnnnnnnnnnnnnnnnnnnnnnnnnnnnnnnnnnnnnnnnnnnnnnnnnnnnnnnnnnnnnnnnnnnnnnnnnnnnnnnnnnnnnnnnnnnnnnnnnnnnnnnnnnnnnnnnnnnnnnnnnnnnnnnnnnnnnnnnnnnnnnnnnnnnnnnnnnnnnnnnnnnnnnnnnnnnnnnnnnnnnnnnnnnnnnnnnnnnnnnnnnnnnnnnnnnnnnnnnnnnnnnnnnnnnnnnnnnnnnnnnnnnnnnnnnnnnnnnnnnnnnnnnnnnnnnnnnnnnnnnnnnnnnnnnnnnnnnnnnnnnnnnnnnnnnnnnnnnnnnnnnnnnnnnnnnnnnnnnnnnnnnnnnnnnnnnnnnnnnnnnnnnnnnnnnnnnnnnnnnnnnnnnnnnnnnnnnnnnnnnnnnnnnnnnnnnnnnnnnnnnnnnnnnnnnnn

SEQ ID NO: 97583 - DNA, 19237 bp, Homo sapiens
tctctcaaggtacttacttagtaatgcttatgcactgtaaaagatgtatccagtattgactctatgtgggggaggaacatatgacttaatgtcagctacaaatggtccttattccagtatacaagctgaacaaggttagaactgttttgagggaaaatgccccatcaaaagaggctatcttcgtagaccatatgctctatgagggcacaaatatgcgtcttgcatgctgacattcaccttgttgtctgatactgtgtccagcacataataattaattaatatttgttgaataagtgatgtcatgaatgtagatgaatccaggtaaaatacttaccttcttgaacaacacgtcacatggttaataggaatattgtttttgtttatcttagtttaaatctccttggaaaatgatctcactagcttcaggtgggagctttctagtagaacatacttctccccctccctccagtctgagtcattgtcaatgctcacaattatcgcccatcttaaaatttcctcacagcttctcaaagtgctgaactcagagttctgtgatatgtgatattatagatgtccattagaatattaaagacatactgtgtccttattcagcagggggatcattttcctgatcataaacaggccctcaaacaattgcatttcagatacacacagccttacaaaggggcatggccaagaactgctgtgataaaaagatttcagcatctgccaacttttgttcttcagggtataatcattgtaggtattttaaaatttcaaaatagggcagaaactaatttgaatttgtgtttcataatattccaatgatcatatcattaaaaacctatggatagagcagaattaacaagaatttatctaacatagggtattgttgaaagtatgcaaatatatatttacatacatatacatacatatttacatatatttacatatatttacatatatatataaaacttttttttttgagatggagtctcactctattgcccaggttggagtgcagtggtgtgatcttggctcactgccacttccgcctcctgggttcaagcgattcttgttcctcagcctcccaagtagctgggattacaggcatgcaccacaatgacatgctaatttttgtatttttagtacagatggggtttcaccatgttgtccaagctggcctcaaactcctgacctcaggtgatctgcttacctcggcctcccaaagtgctaggattacaggcacgagccaccgcgcccggccaagactaagggtgcaaatatattgttaatgtaatacctgccttttaaatgagcagacaggatatatttatgaaaaggcaaataatttcaggaatattgatccaaaattctttaaactgtacagtcagtgagtatttatgtagatgagtgagaagtattctacatagaacatgcaaaactggagctctcagtgtttaaccataatcatttatgtaattaaatatagttgaaattgatcacctattaacaagcttggatacatgtggaaaaattaatatgacagttattaagatgagaattggcacaaataaaattggcctaagagaaatacatatggtctaaacccacatcaaagaccacacataaagaaaattaattagactctaggttcttttctaatgccttcttatctgatattaaagacgatctccagttatgagcaaaatatattattttagcagaagaagaagaagtgagaagaggtaagaaaaatgaatgataactgtgaatgtcagatttttaaaatttcatatttgaggtatagaaatttaatgatttttttaaaacctacccctaaagtagttcttaaagtcttaaaatacaaatgaaaagcaaaatcatgtttgaatgttattttcacttaggtcattagatggcagcaaaacatttaaaaatttcatgtgagtcactagatggcagcaaaataattacaaaaatgactgacattaaaagccatgctgttctttattcacactaattgcagagcaataaggtttaaaaattgtttttgacagcctatttctgtttttcaaatgtttactattagccattaatatctatgcaaaagaaaagagagtgaaggattcttacatatttttgagtctttatagctaaaaataaggcctgagggataaaagaatagtaggaattgaactgaaacttaaataatgggaaattaacattttaaagccctcttcagttttcaggaggactagattgaagtcacacaacacttgctgaatgtgtggcatcaggcaagttaatttctctatgcctcagtttcctcatctgtaaacaggaatgagagtaatacctgcctccagggagattttaagaattactggtaaaccacttagaatagtccttctgacataactcgcaataagagttaacgatgatcttttattaattaattttacatcaaccaagaaaaaatcggatgccttattcaatacctaaaatcatgtttctttctttaggtatccattagtaatatcgtgaatccacacctcatcaacaggtaatattaaaagagtttctataacaggctcacctctgcttgttattggggaaaatggtattttaaataacaataacttttgtcccatatatataggaggcaaaacaagatgtggtcacattggaaaccagcacatcactagaagcagcgattcagaggaggaccaaataacttttcctgaggaagcttctgctccaggagttctgcccctttcctgagaagcatatagagttagcaaaacatccagaaaataaaccaaagaggagagttggaagaaccatagcattcatttagttcaatattgattttcaaatgttggcaagatagaatcccttggagtgcagcgcgaagtggaaaaatctatcttaatagtaaatacagaaagtctcctgccatgaaattaattttggacttgtctgagcatgccataaagtcagaatcctaaatgagatgcacaagtcacacctgagggaagagcttgtactttggggtgattcgactacaaaaaaggagataaaacagtctaggcataaaatgcagcataaaggaattaagtagagagttaaagaactactttagatgtgaaggtgtttagtaggcgctgccacttgacaacttgaccgcgtaagtaatcacaggtaatcagcaggagttaagagcaaatctaatggtgtaatcacaggggaccatgtgcgctgcagcagcataaaacccagtgatttaaaagctaattttagccaggttagaattgactctgctcagtaaacaggaatcagatcctcccttgtatttaaatctttctcaggtagaggagactggaattccagggaaatattttggccattaagtgtacatattctctgttccaacatgtccatacatttctataatatgtactcagctcatttgaaatttggatggttccagacgcatttgttcagggtaattcttaccctaaaaggaacctggctcccatggaactataatacaaatggaagtgtttgaaaatactgcgctcacagaatttacacttctgctcttgtgagatcagtttacagcaagatctaaggcatcacaaggggcacttggatggatcaggaccccaaagaagggggcctattaagggtaggaaaattgtacaagccaagcacagcagatgtaagggcaaggccaagtgctgggaagaactaagaactgagaaggctgctcatcagtgaatatataggagctcagattctcacactgggaactttaggagtaacaacaacacttttaaattatgtttgtaatataaaagttggggtgtgtgtgtgtgtgataagtagtggtgacagggaggttttatgaaggtaaagactttattggtttcattatactattgaagccccagcacttaacacagtatctggaacctagaatggagctcaaagatatttgttgcatggttgaaggaatgaatagatggatggataaattgatagagggatggatggatgaacagacagatggtgcaatgaaattcctaaaatactgaatgccagtctaggtccatgagctactgggagctgtggcctcatcttaggaaggccagagactggcttctcaaagagttcttgcagaaatatacagatgtctgttgctgcaacgcaggcttctctataaaaagagtgtgcatggaagaagagaagcagctttacttatatccaaagcttatcatttgcaaattttaattttaataactaatttcacttagtataaaagagacatgttttaggagatataacagcagagtctctccccacatatttatctcttttagcactcatgcttctaaagtgcaagttgaagaggtagattagcaatgagtctgtggcattagactctgatgacactaattggcatgattcatgctggtacttgaacttacccactctctcttttctctaagtttgccttaattttctcattagcgactttagttctccatttcattcagttttgtgtagagatgcttatggcaagttcacgtacataataaagatacctcttcctaacacaaatctttgtttcacagtcatgattagcaaagtatgataacttttgaaaatccaaaaagcatttccaactgacatattccactccacaccagccaaatagatggtaaattcaggtaaatttcctccacaaacaatataggcatatacaccccatgtatgttcaggtactgataattactaccttgaactttataggatagctgagaatttttttaaaaaaagctttacctcagacagtaaattattagaagtcatggtcaattatgatggtggtgggttggggagtggcagggtggaacagtaagtactttgtggcttaacttgtaacttgttatgtaaatttcagagagcctattataaatatttcttaattaaaagagtattttaatgacgccttatctgagaaggtctaattcattccttttaatttgttttctataacaaagggcctgttgtcaagattgtgaagtgtactaagtctcttattcttgggagcttaattgatatgaaacattgattaggccccaagaggagtggagagttgcagaggaattatgaaataaccacaaggcataaaaaagaaagtttatagcttcagggtaatgctttcagctgggcaaaagtattcactatttggtatacaattttaaaagtatacacagatgactaaagaaaggctttttttttttttttttttttggagacacagtatcactctgctgtcacccaggctggagtgcaatcaatggcggggttttggctgggattacagacatgtgccaccacgcctggctaatttttgtatttttagtagagatggggtttcagcaggttggccaggctggtctcaaacttctgacctcaagtaatctgcgcaccttggcctcccagagtgctgggattacaggtgtgagccaccatgcccggccataagaaaggctctttttgaaaaggtttcatgcttttcaaaagagtttatgtgtcaaacgcggaagagataaaagcaggttaaggaactacctagaagcatcaaggagaagaaaaaaattgaaagataaagtcgacttccaaacattgctcaagagaaatgatactagacatggctgtgaatactgaaggaaagggcttatcgggcacaagcacagtgcccaacacactgggcatgaaatacatgtcgaacagtgatatcagtgccataggaaagaaggaacagatagcaggactgagggtacaggcgacctgcaaaacacggctctgggtcacctgggtctttgggtcagcaatggactccagacgctttttgaatgatgtaaggcccctgggacacagttcttccacatgttcctacaacactgcatttttaaaaaataaagtatatattcacagtattttattattttatattttataaaatataaacaaagtagaaaactttagaggctaaaaagttaactataagtagaatttctcatattttcttcctgtcatggagcagtcatcatgtgcacccctgaagtgtgtgcagggtcatgtggggggcagctggtgcagagttgaatgctaacaaaacaggctacagagtctcctgccaactggtccactttgttctgtcctgtggtttctcaccagccatgctggcttactatcttattcactgactcactgagtggggattaactgagagtggaagtagaaggagataattctataacaaatcttttaaaaaaagagccattaagactgctgtgaattgtttcatggttgaaggaatggagggatggatggatggacagatgatgcaatgaaactcctaaaatactgaatgccagtctaggttcatgagctacgggagctgtggcctcatcctaggaaggtcagagactggcatgtcaatgagttcttggaggaacagcacacatttttgactcatccagttttgatcttgggttgggtggctttttgaatttggttgtaactcttttggcttggtcaaagacagcaaaagatttaaaaaaaaagaaagaaaaaagcaatcacaatacattggtcaagggaaatatattgtactattccttctgtttattaaaatatttaaatgacatttattcattcaagtgtgtattattttctagccattgtactcagatggaagagagagagaaagagagatagagacactaatagaagcacagagctaacggcgtggaataatctttaaaagtttgtgtgaaatggtaaaaacacatacaatctaacgagaagcaaaaaagtgcaaagaaaatgccatgggggttcacagccagtggcaattttcttaagttatatactatttctatttccccaaatcttaactttgagtagttcaaaactttttaagacatcttttcatgcatatagattttctttcttctttagaatcaacctggataaacacaaatgagaaaactacagttataaaatgtaattatctttgtttcctatagcctatccacatatgttataggattataaagtgctgattttccacttgtatactcttaagactgttgtcagttagtgacaccggtgaatgaggactcctgcccttgaacaggaggaaaaaaygtatttgtaatgcctacaattcccctggcatggaaaatgttaaattgttcttataactaaagggaagtcagaaattcccctatacaaaatggtgatttataagcaaaagagaagtttaatcatgtggcgaagctaatattaacttgaccaaaccactgtgatttaggtgcaaagccatcattggaaatgtgttgaagcaaagtgaatagacaataatcttaaggtgtagaggctggattttgttcttttctactcaatccaataaacaaaagatgagtgagggagtattatgggcaaagccctgtcctagggctcacatgttgctggatacatatgcaactctaacacagaccttttagaaaagcattaccttatgtatactcttaaggtagggttccaaaatcttggtactgttaacgttttggacagaaaaattcattgtcgtcagtgggtgattctctgcattgtaggatgtttagcaacatccccggcctctatccactagaggccaatggcacacagtccctctctccccccgctgtgaaaaccaaaaatgtgtccagacattgtcaacatccccctggggagcaaaactgcctccagtggagaacctatgttctaagaagaggtggacttttatttctattagattgattatagtatcacatgtggcagctgttctggaacataaaatacttaaaatgtatactttgcatatttttagtgtaattgtcccacttaatatttcttccagttctggttgaaagtgaaactaggtaatgagcttgcaatctatccactactcttcaaaactaaatagattctattacttatagaagagttaagtgttactagttattatgaaaaaacaaagacacattcagaaactaaatttttaaaagtctgaaaagctatttactaagggaagttgaattcaactgtttattatatgtaaagttattgttatcccctgctaccccaaatagttaaaaggagtttggcaggaaaccctaaaaatggccagcattttgatagacattctattttatagaggagtactgctcacataatcttaatgcattgctattacatcaccacgaggcagttgccttcataagctmcttgaaggtatttcgctggccctcggggagaccacatagcagatggctaacagttcaaactgtttggtttcatacctggccccatcacttcctagctgagttacctggggtaatctgacctacctctatgcctcaatgacaccagctgtagagtaggactatgtgaagcattcagaactgtgttggtgcgtaatcagttttcaataagtgttagctatttttatagatcaggaactcaaataatgtcaattaaatacatgtgaattttcatccaagttagagaactaggaaagtcaacctgttatttgacaatggaaaatattatatgtaatgacaatcataccatttattcaacaaagaaaatatgccaggattgtatctagcatcttccagacattcattctcatcacgttgtggagctagaattcccttcgccccgttccgcccagtccccatttacaaataaagcatgtgaagttcagagggattgcttagtttgctgaaggtgatgcagcaagtaagtgttcgagtcagagtatgaactcaggtctgtcttattacaaagtcgattcccatttcacaattctatggttcttgactacaataacaataatcctaatggagcagctaacaacataccaggaatcatgttcattcacaggaccaattcacacaaactagtccatttaccacgatcagcagccctgggtactcttactacatttcacctttggaaactgagctttgaggaggtgaaataagtatataagatcatgtagtgaagaagccctcgaagctgaatccaaactataaaacctgggctcttggccacttgtgatgctgcctcacatcttaccaaagaaggatattgagagactcagagtccaagagggaagccagagacaggattaaatggttttatagtcagaagaagaagtttggatctttctgtaaaggaagttgtcagatgaataaaagcaaggagctaggcaacagcgtgttrtatctggggacttctacaagtctcctcatctataaaataaatagttggaccaggtaacctccaaacttcttttaattctacaatgatatattgttgtggtttgtattatatcctcccagcacataatatacctgtgcataagccactccctagtggcttccctgcgcaactagtataaaatcctttcttgctatcattgtctgcaaggctctgcaggctgtagcccctgactgtctctgactccactacttgtcttttcttcctcagtcaccatgcttcagtcacaagcttttctgttctagaaacttcctttctcagggcctttatacttgctgtttcctctgcctgaaatgccctcccccagatctttttttagtggttcctcaaatgtacttccttcaataggttttctataaccaccgcatctaaagtaggatttcctcactcattattctttacctcattcctgttttactttcctcatactaattttcagtattggaaatttacttttgttgtttattttgagtcatttattgtacagtacccccatccatccccatgtaaactctgtgagggcaggagtcatgttgatctggtttatggctatagcctctgtgctgatgcctgacacataatagcattcagaatgattcattgagtgaatggatgatgagacaagttatcttgtgtagctcacctagcacatagaaaatattaagcacaaaataggagctgagaaacatgtaacggtagtaatgataactgacattgatcaagctctaattattggcactaggttaaatccttcacacactgtatcatcttagtcctcaccacaactctgtgaggtaagtattattattatcctagttttatagatgaggaaactgaatcttagcacaatcaagaaatttgcccaaagtcacaaagctagtaaattaacccagattcaaaaccaacctaatttcagcacaatgttatttgctaactataatctgtaacaaaattatttactaacttctgcaaagtgcaactgccattatctccatttggatttttcaaagtttataatttcaaggagtactatgtgagtaactactatatgtatcttgggactcaggctaggtaaagggtactaggtgcctaagatacagagataaataatgtgacacagtactcaacttcagggggcacagtttaggaagaaaaacataagcgtggtagaatggacatctccatgacccaaacactcctctgtcctctcacaaaaaaaaacaaaacaaaacaaacaaaaaaacacctcctgctgtggagactcattcctcttaaatgtttcccatgaacctggcccaggtgtttaattttgcattccttaaattatattctaactgtttagcactgtctaggagggactgaatagccatcatttactgagtgcctacacgtgacaggtgatttatctatgctcactgactgaattcttacaacaatgaggtgagtgtcattattcctgctttacaaatgagcagtcaacagcttattggggcattggattataacccaatgattacaatagagtgtctgattacaatgcagaattgccaatattaggatagaaggatgtgtatgcaaagacctatgggagccccaagaaacaaatggctcttggccttcatagatatttatttatttttattttgtttgagacagtgtcttcctgtttcccagtctggagtgcagtcgcatgatcatggctcactgcagcctcaacctcctgggttccgatctgccgaccttagcctcctaagcagctgggactacaggggcacaccaccatgcctggctaacttcttattttttgtaaagatggggttttgccatgttgcccaggctggtcttgagctcctgacctcaagcgatccgcctgccttggcctcccaaagtgctgggattacaggcgggagccactgagtccagccccagatatctacttaaacactataatggtaacaaatatgagaatatctggctttttattagctttttaattaaatatttaataaataatgtgtatctcacyttgtaaaatattttaacaatatctttacattttttgagaaaaagcaaatactttcacatttttactaagaataatatgttagaagcttttttattataataattggaacacagactttaagtttttttacattacattttcctgatatactgcctgaatttttttttttctggggcaaagaaaagtacttttcttaagctactgtcagttcctttacttaagattattctgaaatgaacccatccttccctctaatggaaagataggtacataataagataagcactttttttatttgaacaaatccagtattagagtagtcttttgcagctagtgaatcatgacagcctgctaagaagaatgccttcagtaaaataaagttaggttgggactgaccaacatgaatgcataaagttaactccattaaaaaaaattgaccaggaaaataaaacaatgctaagccaaccactgtaataccaaaaacgctgctaaaaaatttagattgcttctgagtaaccaaaggtgaaccactctccaccctgtggtgaacatgtgacactctccctaacagcagctctgtggggagggcttgctcccactgagaattaattcactttccagaagtgagagataaggaaaaattcccatgacaataatccatttggtgaactgcagtttggtggtgtttgaagttttacgcatatttaagaatcaaacatgctcttacttcatccctgttaggaaagccacaatccagtttcacggaaaatgaaagacaaggattcctgctgatcaaatcgcctggctccctccacagaatcccgggaagccactctacattcacaaactttgcactcaattcttggcacctatcaacgccatatctccagggccaagtgaagagtctcatagcaactaagttaatatttgaaaattatgtaaagaaacaaaattacatcaatgggccccaacagatacaatgcacctacagaggcacaaataaaagcttcttctttgctacaaactccattttgtaatggtcctaaaaatttaaaaactttattgctgctttcttgcctaagaattccctgtgacatcaacccaaaacccacataagcagaagtacacaattttctagaatcttagaacaagtaagtctaaacatgaatcatatttgtttggrtgaaattgactgaaataaatagtaaagagtgattttgagatacatattgcaaaaatgtccactaataacttatccttgtatttatctgtatattttcaaatgtaagtaatgtgatgtcaaggccgacacaatcacattaaactgtgtcctgcttccccaactgtaactctaatactattgccctcagagattgcagagaccacagaaccgaactccttcccacaaacccccggatttttctgtggcaaaatcccttgtaggaaatgaattctctctatatctcaaaacagcctcacttacccagtaggccctgtaagcacagtgtctcaggtccacaatacttttagatgcccaggaaaatgtttccttttaaaataagaacaaaaaagaaaaaaattaggtgttggttaaagaaaatgtttaaatatataatattaagatatttatctttatgtcagtgttggtataaatgcgtgtttatgaaaaagggacccaccaaggtgaaatgccgtaggacccacaaatgtcataatgctggctggcctcaaaatgtccttcctattaaactattttgaatgattcctaggtatgccagatgccaatttttcttggccagccagggaacgtctcatgtctttggaagaaattatctttctcttactggattcttctgagaaaagtgatttgttaaaagttttggttatttcaaatcaatatgtactcaactaggacgtctcctcacccacgttaattttttaaagaggaggaaagtaggagaagatgagcgcttcatgtaaggctctgccagcctacgaggaaatgcaatcctccaggctcgaccgagcgtgggctgcgggcaggggactgtggcgccgttgtctcgttttattccacggccgtgcagcagagggcgcgtgcctctcagcactcatgctgcgcgctcccctgcgcctctaggatcgtatccctatttgccccaaggtcatagctcctaacccagcttgccagccccaggccggggacaccagagactgagcccttcgcgctggagaccccggcgcgggtggggcgggagggctccggggccaagagacaggtcacaatggggacaggggacgaaaggcgccgggggtccgggtcccgagcagtccccgccgccgccagactccgcagccgggagggggatggggtgcgcgtagaggctccgcggcccgggttggacggaggagcccaggagccaccgcagccgccgcacgcccagagctccgagcttcgctgccagcccaggacaccggggccctgccgtgggccgaggggagccgggcggcgggagaggagccccggagccccggagccccggagccccgccgggcgccagccgagagggcgttttccccgcccccggagactcgcccgcccggcccgccccgccccgagcgcggggagttcacctccgcccgtcaccacctccccttgtcgcctaggtccacccgagccccctcccccgggccgcccccgagcacgaagttggcgggagcctataaaagctggtgccggcgcgacccgcggacacacagtgcaggcgcccaagccgccgccgccagatcggtgccgattcctgccctgccccgaccgccagcgcgaccatgtcccatcactgggggtacggcaaacacaacggtgagtgccggcgacggccagcgcgggggcgccccgatccccgatccccgatccccgatccccgagcccggatgccggcccggggcccgcagcgcccgcacatgctgtttaccgcggccgcggggagtgctggaggctcaggtgcgccccgggcgctcgctccgctcgcggctccgcggcgccggggatgtcccccttgccccagctgcgaggccactgtggaggaatccccgcgtccgccggaggcgcgtagggcccgagggaggggaggcgcagccctggccgcgggacccgaggacagtccctcccgggtcccgacctggggatcattttaaccggacctaggaggaggcgggaaagggttgtaacggaaaattctagttgttgatcgcagagaaattaagagactcccctcccccctcccccaccttccacccccaccccacccctccagcttcagcaccacctgtggctaaggcgctcagcacgaactgtcccggggcattttccagtgctggtttgaatccatggctctgatttccgagttttcccttcatctctcgacttctaatgttagggggtcggacatcaggaatcgggttttatcttggcctcagatctggttcttcggagccagcggagcagaggagcatgcgtctggcgcacctagcgcatctttggagggtgtggggcttcccaggtagtggggaaccctgacggttaaaggtggggtgggcccgggcctgggcagtgaggaaaggatccagacctccttgaatgtcttaagtgagcttgcatatcccaaaatcgcaaccacaagccctgacattagtgtctgcccgatttcagttgctgaatttcagtaaaacgaccttaaaatagctaatatttatatagcactcagtgatctaagagctttacatatatcgattctaattcttacagcgacatctatgaggtagatttctaattatcccatattacaaatgtggaaactgaggcacagattacgtgttttcccaaaatttagcccattgttaagtgatgcttctaaaattggaactgagcagattggctccggaatgattgctcttctctaggggtctgggtgtacctttccccacaatgggggattcacatgtcttctttcccccaggacctgagcactggcataaggacttccccattgccaagggagagcgccagtcccctgttgacatcgacactcatacagccaagtatgacccttccctgaagcccctgtctgtttcctatgatcaagcaacttccctgaggatcctcaacaatggtcatgctttcaacgtggagtttgatgactctcaggacaaagcaggtcagtgtttagaaaataacttgtgtcttttagccagtagctgttttccgagcttaatggaaggagccaggaacagtggcaggaaccctcttaataatacagtttgtctcaggactcaaggatgccaccctgatcattttcattaggtctcagattctgagaagtaggctaattagtttgaagtgtcccggggccgtttcttccctgtaaaacccttggcttctatgaaggccattgaataactgcgatatgcctgtgaaaaatcacaaaaggtgcaaagtcccctcgcaataaagatcagtcacgatgagatttgcaccaattgaacttttaagattgtaaaatattttgtcttgcagagctgatgcatatccattaaaaagtatatcttagtgagccttatcttcaagttagcagcgagaagagtaacaaaaacgtgccaatttaaaatactgaaattctgggaaaatgttttacttatgagtatttcttagtattgggctagtgtgataaagatggcagcatgttttgatatctactcagaaattcatttcacaaacgaagatgttttagagttggtgaacatacctggcccattactgacaaaaccaattaccgtatttattggtaatagagctgtttacaggatgctcactgtaaaaaaaaaaaaaaagaaagagaaagaagaaaaaaaatcctgcttttttttttttatctctctctcttttgaaacaagagaacaatcccattcacacatagtagctgccttctttgctaagcagttaatttaattgccagtgccctattttcctgagtgctttcctctgaaggtcatagaatgaaatggtgctgcaaacacattttgtttggtggtggtgtgggagtgaggggagtggtggaacaaaatgagaaagttttggagtagtgacctacggtactaatatattatataatatgtaattataaccatttagtcaggtagactattctttgtcagcagctatcctatatagtcaacttggttttgaaaaaagaattcttccctcctttcaactttaaaaaaatttgcaaacacctggctttctgaaatggtgattctggaagacaatttgatgggggataatgtggagatcatctgagaaatgttttcaacctacctgtgcctgtctgtgtgcacccctccccagtacacacatacatacatacatacacacacacacacacacacacacttacaatcatactcacactttctggcatagtatgatgatttattagaatcaagtaaaggttgtacattgaaaacagttcggtgattctgctacattgctttcccaagcattcctctcactccaaaggaacagtgctcatataattaaattaaacaatttttttcttgtaaagaatactgtatatttataacaagacaaggccaaaggtctcaaggtattacacatacagaaagaatactataacatttcacgtctagtcatttacaaaccaaaagaagtgagctactttagtctgtagctgtacttttttaaagagccacaatgatgtcattgttttcaatggatgtaatgtctgccaaattatgtatctcattggatgctacatagaaattggatagtttaagtcttttttggagcactgaagaaacaaatctccaacaaatgaaagcagatgaggttcctaatagtccttaaaaaatggatagtgaaataaattattctagtaatatgtattactggaaagtggatttgaacacatggtctggtggctatcagcatagactggggtcagagagacctggatttgagttctagagctgccggcaactagctcagagactttgggagtaatactgtctaggttttaattgtttttaactgtaaagttggagtaacaatagtgtctgccacagtggaaggatgaaatgggacagtatatgtaaagcccctagcccagtgcctggcgcatagaagttgctcaataaatggcctctgttgttgtcacaacttgaacccttcgaccacctctgttagaccattgctgtagatgttgcacctgcgataagatttctgaataaactttttctttaacagctttaagattagttcccatcatttgatgtattttaaatttttatttttatattttctgaagcatactgtttatcatactgaatatgtacttattttatgtatgaagttattatatagttacatattttaccatgaatctgttaaactttgacagatttctctataagcagtaactaattagatctagctacatttttcacagctatttcttctggagagcaatgcatacatttttaaagaagttggccatgtttagattgtgaaacagatgaaaaccacagggtttcggtaggagctcccacccatgcctttagagacacatgtattatccacctagttctacaaaaaagtcattattaacaccacttaaatgcatgggaagctaagcatcatgaaagcagggtggaggcctggtccctctcctgttccccggagcccatgctggaaatatctaaagtagaaagacatagaaatagtagaccctgactgccactttgataagtgcagaaaggaagtactccaaggaactatggaaacgtgaaggaggcttggcagtttaactgataagacaggaaagactttccagggtaaataaggcttatgtggaggcttgaaggattttgatgtcttggacgagagtccaggcaaagggagataggaaataccaggagacttaagagagcacagcatgtgctccagaaaggcaagaaggtatactaaaagcaaggtcagaaaggacttgccctcctttgcatatgaaagattcctttgtaattttgcctctcttttccacattttcagttactttggttaaacaagaatgcagaatatattaaaatgtcaatattaagagaaaagacatctacagaataaatttttaaaaatcataccatgtgggggacaggcacggtggctcacgcctgtagtcccagcactttggaagactgaggtgggcggatcacttgaggtcagaagttcaagaccagcctggccaacagggtgaaacactgtctgtactaaaaatgcaaaaaatgagctaggtgttgtggcatgtgcctgtaatcccagctactcaggagactgaggcaggagaatcgctggatcccgggaggcggaggtcgcagtgagccgagaccgcaccactgcactccagcctggtgacagaacgagactccatctcaaaacaaacaaacaaacaaaaaaccacacacacacacacacaaaaccatgtggaaaaactccctttagactttctttcttttttttttttttaaataaaacaatcctaggctctcaaagccaaaacaaagaatagagatactctagttaaactcaccttaataaacatgaagaaacagaagctgaagagtttaaataacttgctaagtcgtctccttgctagtttgctggagggactaagtagcaatcacttaaaaatagaattttgaataaaaatatttgaaggataaccttatttgaca

SEQ ID NO: 97584 - DNA, 47642 bp, Homo sapiens
taatgtactttgtgatattccttgtcctgtgaatgtacattgtaacattcctccccacccttgtgaatgtaatttgcaacaccctccctgctcttctgaatgtactttgtaacattcctcccatcccttgtgacaatacaccctccgcgcccttgtgaatgtactttgtaacatcctccccgcccttgtgaatgcactttgtaacattcctccctgcctttgggacaagacatcctccccgcccttgtgaatgtactttgtaacatcctccccactcttgagaatgtacttcataacatccatcccctgcccacaaaaaaagtcgctcctaactccaccgcctatcccaaacctataagaccaatgataatcccaccatcttcactgactcctttctcaaactcagcccacttgtaccctagtgaataaacagccttgttgctcacactaagcctgctcaggtggtctcttatatggatgcatgtaacattactgtaaaatgagatcttgcggggtgcagtggctcatgcctgtaatcccagcacttcggaggccgaggtgggtggatcacctcccaaagtgctgggattacatgcatgagtcaccatgaccagccaggtatttctttataacaactcaagaacagactaatacacgtgactatttccagactattttgtaccaatagtctagttgtctgtgtacaatgcaacagcatcttaattactatagttttaatcttgatattcattagggcaagttcttccaccttttttatcagctgggtcttgattatccttgcctattgttcttccatataccttttagaaacagtatttcaagggcgggtgtggtggctcacgtccataatcccagcactttgggaggccaaggtgggtggatcacctgaagtcaggagtttgacaccagcctggacaacatgatgaaacttcgtctctacaaaaaaaaaaaatacacaaaattagctgagcttggtggtgcatgcctgtgatcccagctactcgggaggctgaagcaggagaatcacttgaacctgggaggtggaggttgcagtgagtggagattgttccactgcattccagcctggggaacaaagtgagacttcatcccaaaaaaaaaaaaaaaaaaaaattcttattgcttctttcagtgatttcccttttttttttttctattctctcattctagaatgccttgtagctggatattgaagctttttgcttatctcatacattatttaatttacatcctttccagcacttttctttttaggctgaattctgtgaaacattccttggcttagtctttgagatctttcttctttttgaatttgagtagttactgctatgagttgccttcttttcactactttcactgtatctgtccattcaggctgctataacaaaataccatagactggtggttaataaacaacataaatttatttctccgagttctggagattaggtcaaagctcaaggtacagtcagattcagtgtcagatgagggcccttttcctggttcacagagagccatcttcttgaagtaaccaaatacagtagaagtggcatgaaatatctttggggtgtcttccatgaggggggtaatcccattctgcagagccctcatgacttcatcatgtcccaaaattcccagctcctaatacaatcactttgggagttaagatgtcaacatacgcaagttgaggagacaaaatttatttatttatttatttatttatttatttatttatttatttatttatttttgacatggagtctcactctgtcacccaggctggaatgcagtggtgtgatcttggctcactgcaagctctgcctcccaggttcacaccattctcctgcctcagcctcctggataactgggactacaggcacccagcaccacactgggctgattttttttttttttttaagtagagacagggtttcaccaccttagccaggatggtctcaatctcctgaccttgtgatccacccaccttggcctcccaaagtgctgggattacaggtgtgagccaccgtgcccagcctaggagacaaaatttagactacagcaacatctcataaattttggtatgccatgtctttgttttcatttgtctcaagatgttttctaatttaccttgtgaattcttgcttcacccattgatagatcaggagtgtgttgcttacaataaaatgtatttgtgaattttccagttttccttgtttttcatttcttgtttcattctatgtgacttgaaatggtactttgtgtttcagtcttttacatttcattaagatttgttttgtggcctaacacatggtttctcctggaaactattccacatatgcttgagaaaaatgtgttctcttctgttgtggggtgggttgtgccaactgttatatagtacttgtcctgtttccttcttgatattatcgtggctgttctacctattaaattgaaagtggtataatgaggtctccaattgttatgcagaattgtctatttttccctttaattttgccaatatttacttcatgtattttaagctctgatgtttgatacatataatttttttatcttcttgatgaattttaccttctatcagtatatactctcattcactctctcttctatcagttttttacttcaagtttactttgtctgatattaatatatccaggcaaattctctttaggttactatttacatggaatgatctttttccattatttaactttcaaccttttttgtctttagatctaaagcgaaggatggccaggcgtgatggctcatgcctgtaatcctagcactttgggaggctgaggtgagcagatcacctgaagtcaggagtttgagacagcctggtcaacatggcaaaaccctgtctctactaatactacaaaaattagctgggcatggtggtgggtgcctgtaatcctatctactcaggaggctgaggcagagagaatttctggaagccaggaggtgaaggttgcagtgagccgggatcttgccattgcactccagcctgggcgacagagcgagactctgtcttaaaaaaaaaaaaaaaaaaaaaaagcaaagggcaacatacagttggattgtgtattttaatccattttgccaaattatgccattagattggagaagttatcccatttacccttcatataattaccaataaaaaagactcattttgccactttgttactctttttctgtatgtcttacagctttttggtccctcatttcctacattactgccttttttgttgatttgtttttttagtgacatctttttttcgtctcattttgtgtatattccattgatattttatatgtagttaccatggggatttttttttctttttttgagatggagtatcactcttgttgcccaggctggagtccaatggtgcgatttcgagtcactgcaacctccacctcccaggttcaagcaatcctcctgcctcagcctctcaagtagctgggactacaggcatgcaccaccacacccagctaatttttgtatttttagtagagacggggtttcaccatgttagccaggctggtttcaatctcttgaccttgtgatccacacacctcagcctcccaaagtgctggaattagaagcatggcctggtgaccacggggattaaatataacatcctaacatccactgtacagtccactgtccagtcctcactcctcccacatgctgttcttactaaaatatagaaaaaattctactagggggaattttaaaagcaattaaacttttcaaccacagaaaatttactgtccatgacaagtcgtcatggacagtaagacacatagaaaggcaatctcattttcatgtcatttatttcaatttctcctctagtatgatcttgtgtacagtaacagtagtatctgaaagcttcccataactcctcagattcatagtttattcttccagtgagtattttcagaggcacttaaggaatatgtactgctaaaagtattaccaggccgggcgcggtggctcacgcctgtaatcccagcactttgggaggccgaagcgggcggatcacaaggtcaggagatcgagaccatcccggctaaaacggtgaaaccccgtctctactaaaaatacaaaaaattagccgggcgtagtggcgggcgcctgtagtcccagctacttgggaggctgaggcaggagaatggcgtgaacccgggaggcggagcttgcagtgagccgagatcccgccactgcactccagcctgggcgacagagcgagactccgtctcaaaaaaaaaaaaaaaaaaaaaaaaaaaaaaaaaagtattaccagattttttttttttttgagatggagttttgctctgtcacccaggctggagtgtagtggcaaaatcttggctcactgcaacctctgtctcctgggttcacacaattctcctgcctcagcctcccaagcaattgggattaaaggcacccgccaccatacttggctaatttttgtatttttagtagagatgaggtttaaccatgttggcaggctggtctcaaactcctgacctcaaatgatctgcccacctcggcctcctaaagtgctgggattacaagcatgagtcaccacgcccagcatattctcatattttcacattcatatagcttgtttgcagtgtgggttttcacaagtatagtaagacttgtaaaatggatgcaacatttccctcattctgtattatcaagatttctctccagtatgaattatcatttatattaaaggatgaaataatacatacgtgtgtgtatgtgtgtgtgcatatatatgtgtgtgtgtgtgtgtatatatatatatatatatatatatatatatatatatatatatataaagacattcccatatttctaacattcataatgtttctggcctctttgagattaccaaatattaacacatgagacagaagtaaagatttcccacatcttaccttcatagagtttctctccaacgcatgttgactgacttagtaacactggaagaattcttaacacatcttaaattgatgaggtttcttatatctgaaactgtcagaaatttctgaaggctgtcccagatttcttacatatataggctatctgcccactgtgagttctttgatgttgagttattaaaaggcataagtgaagatcttgtagcctttacatttgtagggttttataccactgtgaattctcatgtagatattaagtcctgagcactaagtaaatgttttatcacattccttacatacagagggtttttctccagtgttgattatgaagtactatgaaggtttgtgaagtattttaaggctatctctcattcttaccttcaattggcttttacagtaatttttgttatgaaaaataaacaatatgctgggtgtggtggctcaagcctgtaatcccagtactttggaaggccaaggcgggcagatcatgagatcgggagatcgagaccatcctggctaacatggtgaaaccctgtctctactaaaaatacaaaaaattagctgggcatggtggcacatgcccgtagtcccagctactcgggaggctgaggtgggagaattccttgaacccaggaggcagaggttgcagtgggccaaggtcatgccactgtactccagcctgggtgagagagagagactctgtctcaaaaaaaaaaaagaaaaataaacaatagtggaagaaacaaaggctttaccacatgccttagaaccagatttttctcccaaaggtgagttcttacactttataagatgtgaagaattactactcttgcctattccttatatcactgggacttgtgtccatgttaaattcattcctattatataagatatggaaattcagtgaaggttgttcatattctttaccttcctatgatttttttccagatgagtttagatgtaaatactaagatctgaggaacacttcaggttttttcacatgccttagttcttagatgtttagcaagtgctgaagattgagtgaagtttttcccacatttcttacattcatatggttttgctccagtgtgagttcgtgtgtgaacgttaaggyatgtggaatacctgaaggctttcccacattctttacatgcataaggcttttctcctgtgtgcgttcgcatgtgcatattaagatttgtggaacgagcaaatgctttaccgcattccttacattcayaggccttttctccagtgtgagttcttaaatgggtactaaggcccgaggattgagtgaaagctttcccacattctttgcattcatatggcttctctccagtgtgaatccttacatgttgactaagcattgaggaattattaaaggctttcccacattctttacattcatagggcttttctccagtatgtgttctcatgtgtaaaacaagtcctgaggaacgagtaaaagctttcccacatgccttacataaatacagcttctctccactgtgaatccttacatgttttgtaaggtatgaggaatgaataaaagcttttccacactccttacattcatatggcttttctccagtgtgaattcgcatgtgtaaaataagtcctgtggatctagtgaaggcttttccacattccatacatacatagggcttctttccactgtggattcttgtatgatcagtaaggtatgaagaatgggtgaaggctttcccacactctttacatttatatggtttttctccactgtgagttctgatgtgtaatttaagtcctgtggattgagtgaaagctttaccacattctttacagacatagggcttctctccactgtgaattcttccatgtcctataaggtgtgaggaattactgaaggctttcccacattccttacatacatagtgtttgtctccattgtgagatcttatatgtaacttaagggatgactgattaagaaaagttctccaacagtctttgcattcacacaatttctcttgtgtgtgagttttattctgcctagtaagatttggaaactggttgaaggctttttcatgtttaacacacttaggcattttcccctcagcatgacttttcttgtaaaaactatgaggaaagttctttcttaaggcttttccactctgattatcctcagaagttttctctccaatgtgagttatcatgtgagtcataagaaatgggtgttcattgaagacttttccagaatggttagagtcatacagtttctctgcagtattgcttctctcctgttgagatataaaagatgaataaagaatttctcacattcagtatggtaacagaatttctccccaatcacaacatatatgcattggaaatatatttaaacattttaacatatccattatatgtacagagttccagccccatttttgagttaagttgagtaataggacaatgaggccaccagcctgcctatattctctgcattcacagagcttcttagacaatctgtctgatatttatttatttatttatttaagaaagattctcactctgtcacccaggctgaagtgcagtggcacgatcttgactcacagcaatctctgcctcccagttcaagggattctcaggcctcagcctcccaagtagctaggattacaggcatgtgccactatgcccagctaatttttgtatttttagtaaacacagatttttgccatgttgaccaggctagtctccaactcctggcctcaagtgatctgcccgctttggcctcccaaagtgctgggattacaggcattagccacaatacatctgagaattatttagactaaattatgggctgggcacagtggctcatgactgtaatcccagcactttgggaggccaaggcaggtggattgctttgagctcaggagtttgagaccagcctggacaaaatggtgaaaccccatctctacaaaaaaaaaaataatcagccaggcatggtggctcatgcctgtagtctcagctattcaggaggctgaggctggaggatcatttgagcccaggaaacagaggttgcagtgagccaagactgcaccattgcacaccagcctgagcaacagagtaagaccttgtctcaaaaataataataaagtaaaagaaattatgcacaaaaaactgaatagctgagttgtatgtttgtggatgtttatttgtgagatctctgagaagaaatatgtttgtagtaagtttagagtgcttcccatattcatgatattcagagaatctcttcagactttgttttctctgggtaaatgccattttcctcatataattttcatgaatattgtgcttcttgtcctagtgtggaagatttcatcccttggaaatcttaccaattgtactccatttggtgatctttctgcagaaatatcttgcagcagtggggagcctttggttttgagttgcaaatccaattctgaaataaagtgaaaaatgcagcttgggagaaaaattgtggaataaagtcgtttaaaagcctatggggctgggcgtggtggctcacacctgtaatcctagcacttttggaggcctagataggtggcttacctgaggttaggagttcaagaccagcctggccaacatggtgaaacactgtctctactaaaaatacaaaaaattagccaggtgcagtggtgcatgcctgtaatcccagctactcaggaggctgaggcaggagaatcacttgaacccagagggtggaggttgcggtgaggtgagatccaccactgcactccagcctgggctacagagcaagacttcgtctcaaaaaaaaaaaatgcctaaggaacagacatagcataatcaaatgtggcagagtgaagaactacagggctctttcctaccacaatatgactaataagttcagaaaacctatcagaatcaactgtgctgggctgggtgtggtggttcatgcctataatcccagcactttgggaggtcaaggtaggtggatcacttgagttcaggagttcgagaccagcccggccaacatggtgaagtgctgtctctactaaaaatacaaaaattggccagacatggtggtgtacacctgtaatcccagctactcaagtggctgagtcatgagaatcacttgaaaccaggaggcagaggttgcagtgagtcaagatcatgccattgcactccagcctgggtgacagagtgagactctgtgtcaaaaaagaaaaaaatatatatatacatatatatatagctaagtgaaagaagctagagagaaaaggttacattgtatgattccatttatataagatatacagaaagggtaaatccgtagagagagaaagcaaattagtctctgtagggtgagtggggactgactacttgatgggtatatggtttccttttggtgtgatggtaatgctttgaaactagaccaagcacactggctcatgcctgtaatcccaacactttgggagacggaggcaggtgggtcacttgaggtcaggagtttgagaccagcctggccaacatggtgaaactccatctctatcaaaaaacacaaaaattcaccaggcatggtggcgcacgcctgtagtcccaactactcagaaggctgaggcaggagaatcacttgaagccaggaagctgatggaggttgcagtgagccaagatggctccactggactctatcctgggcaacagagagagactctgtctcaaacaaacaaacaaacaaagaaatgccttgaaactaaaaagagctgatagctacacaacactaaaatggtaaatttttgtatattttacctaaaaaaagtatatggcacatttgtatatctttccaaacatgcataaaacatgattaaaaaaaaaaagagtgaagcaaatggaaagatggactataaagagtttggctatgtcagaagttttgcaatggtaaagatatggtgtcaaaactatcactacacctgtaatgccagcactttgggaggctgaggcaggtgaatcacaaggtcaggagttcgagaacagcctggccaacatagtgaaatcccatctctacaaaaatacaaaaaattagttgggcgtggtgtcaggtgcctgtaatcttagctacttgggaggctgaggcaggagaattgcttgaacccaggaggtggaggttgcagcaagccaagatcatgtcactgcacaccagccagggcgacagtgcaagactccatctcaaaaaaaaaaaaaacctgtattacttattatccaactaataatatgcagaaaactgaggctggtagtaagcaaaaagatgggagaatcaagaaagcaatataagaaggtgttggcaaaggacctacatgcataagatggaattttcaaataaggcagacaaacctttctgagaacagaaaagaggttgagaagatcaatggaaatttaaagatgaggggagttgaaagtatctaaggaaaccaaatggcctcagccttctcaggaagaagagtataccctgagaagttcgcaaagtaacatttccaatgtactgcatgtctcctagggtggcacagcagtgccataataccacatctgcttatgaactcaccctgcagaactcctgtcactcctgtcctcagctcttccatttgttccaatccagacatgagactacgtttgaataattcagaccctgctggagggaaaaatgcacaaaagaagaggcccatgcaagacataacaccatgtccttcaatggggaaccaatacttttgccttcggggattctaaagatggtcaagtgtaactttacaaatagcaaactaatcatataacatttccaatacatgcactaaamctatttttaaaataacaaaaatgttgcccaggtataatggctcatgcctcatacctcagcactttgggaagccaaggcagggagatcacttgaggttaggagttcaagaccagcctggccaacgtggtgaaacttcctctctactaaaaatacaaaaattagcagggcatgctggcacaggtctgtggtcccagctactcagaaggttgaggcagaagaattgcttgagcctggaaaaccaagtccaacttcatacacatttaaagtcttaaagtttttaatccatacattaaataaactcatttacttaaatctttattttcatggggaatcctctacaccaggggtgtccaatcttttggcttccgtgggccacactggaagaagaagaatggccttggaccacatataaaatacactaacactaacgatcgctgatgagctacaacaaataaacaaaaaaactggtctgtgcataaatctcataatgctttaaraaagtttacaagcttgttctataaagtaatgcccaggccatgcatggtggctcacgcctgtaatcctagcactttgggaggccaaagcaggtggatcacctgaggtcagagtttgagaccagcctggccaacatggtgaaaccctgtctccactaaaaatacaaaaattagatggccatggtggtgcacacctgtaatcccagctacctgggaggctgaggcaggagaatcacttgaatccaggagggggggctttgcagtaagcagagaccatgccactgcactccagcctgggcaatagagccagactgtgtctcaaaaaaaaaaaaaaaggaatgtccactggccaaggtccatgcctgtcttgcttattacagtaccctcatttgacagcaaacatttaagaaacattgatttcctaaaggggtcagtgaagaaatgatgccagttttacctagtataatgagattcttgtagttctccaacatcacatctctgtagagatctctstgggcttgatccaacaaagtccactcctcctgggtaaagtccacagccacatcctcaaaggtcactaagtgctaaaccattaaatacatgccagcttcagctaagtaccatctcctttgatgttctgagaaaaatgcatgaaggactaaggaagactagaagcctgcagtactcccaggcctcaggcctcttctcctctatatagatattgtcttgcaatggcatccaatcccatggacttatcagcatcactgaaacatgactaaactgatcttcctacagctttacaatgggctcttctggccttagtcctcctctatttataggtgcagtctgcactgaatatgttgcagcactatgtaaaatctaataacaaatgaattatctccacagtgacacacaaattccttcagattagacatctccatccctttcttacaatctgtcataacactcagcaaaacaatgagccaacaagcatgattgaggatcagaaagaattagtaaacattgagataaaataatcatttctgtagggagacccactgaaactattgctacagaataaaagatgaaatgctcctgattactgtaaatacaaaattgcaygcaggattgtgtaaagacaatgccaggttggactgccagaatgagccaacagcgtgtgatgtgcttccccctgcacagagcctatgaatggacgtgcagtcagggaggtttcacatcaccaagattcctatcccagaaaagcagatgttcatagctctgggaatggaatgcgacccttgtggagagcctataaacagatgcatggggggtgcctgtccatatggataaacgccctcatcttgtcacggctcttgtaggcctctttaaagttaaggcatactcccttctgagaacttctggtctaaccagttgtctagcttcacatcctgtttccatggattgtttctaaccagcatttgtggcaattgttactgctgattaatatcttgctaatcataggttatggaaagattgtgtttctgttttaaggctctgttagaaattactgacacacacactatattttaaattcttgtctctgtatactgtacttctacatacaaatgtactgtacttctacatacaaatgttatgttaaagaattacttcatccccatgtgaccatctcacctcataatcaaatgaccctaaatccctcactaacctacccccgccctcactaagcttaataataactgctggtatatccagtgcattgttggcactgtgggaccagaaggcggtgacccccctggacccagccttcactatcttgtgtgtgtctattatttctcaacctgccaatctgcctgggaacaaagagagagccccgttgcactgtgggctgctggccagatcccgcaatacacttccattgcaatctctgtacaacctgagatggcttggttcctagagaaattcacctggggagttatttcctgagcaggaccatcatttctttaagatgcttgaatacacgataacaaggtaaggctaccgatgatggctacaagcataacattttgaagttaggtctgctttccacttgcctgagaagaatccatcagtaatccatcagtaacccagccactagccttggcttctcgatgttcctgtcatgaagacagaaagtgtcctggaaaaaatgacctttggaaaagaataatggcatgtcagttggatacatcaaagaaaaagtatttcaggctaggcatggtggctcatgcctgtaatcccagcactttgggaggccaaggtaggcgaatcacttgaggtcaggagtttgagaccagcctggccaacagggtgaaaccctgtctctactaaaaatccaaaaaaaccagccaggtgtggtggtgcatgcctgtaatcctagctactcgggaggccgaggtgggggaatcacttgaacctgggaggtggagattgcggtgagccgacaccatgccactgcactccagcctggctgacagagtgcgactccatcttaaaaaacaaaaaagtaggccaggcacggtggctgacacctgtaatcccagcactttgggaggccgaggcgggtggatcacgaggttaggagatcgagaccatcctggctaacacagtgaaaccccgtctctactaaagctacaaaaaaattagctgggcatggcggcgtgtgcctgtagtcccagcagctggggaggctgaggaaacagaatagcatgaacccaggtggcagagtttgcagtgagccgagattgcaccactgcactccagcctgggtgacagagcaagactccatctcaaaacaaacaaacaaacaaacaaataaagcatttccataccctgcattgcagacatagtcttttccatggcatgcctcccaattgtaatactattctgacacttaatactctaattgtccagggggtggctcatgcctgtaatcctaaccctttgggaggttgaagtagaaggatgcttgaggccaggagttagagaccatcctgggcaatatagtgagaccaagtctctttattaaataaataaataaacaaataaatatacatatatatatatacacatatatgaaaacaaagaataaaagaaaaaatactctagttgactttgcctagcaactatcagacagtaagaatacttttgtgtctggcttctttcagtcagcattatgctggtgaggtgcacccaagttgttgtgttcatccacctgtgatttggttcatatctttgctgaagaatatgccacagaggctgggcatggtggctcacgcctgtaatcccggcactttgggaggccgaggtgggcagatcgcttgaggtcagcagttcaagatcagcctggtcaacatggtgaaaccccatctctactaaaaatacaaagaaaaatgggtggctcacacctgtaatcccagctactcgggaggctaaggcaagagaatcacttgaaccaggaagacagaaattacagtgagccaagattgcgccactgcactccagcctggtgacagagcaagactctgtcacaaaaaaaaaaaaaaaaagccacagaaatatgccacaattcacccattctgtggatccacatttgggttgttcctaatttaggctatttcaaataatgtgataaataacttttacatttagcctggcacacgtatgcatgttgcatcaccaagtccatatttagttgtcactgttttaaaatgtagctgggcatggtggctcacgcctgtaatcccagcactttgggaggccgaggtgagtggatcacaaggtcaagagatggagaccatcctggccaacatggtgaaacccatcctggccaacatggtgaaaccccatctctactaaaaatacaaaaattagctgggcatggtggcatgcacctgtagttccagctactcgggaggccaaggcaggagaagcacttgaacccgggaggtggaggttgcagtgagccgagatcatgccactgcactccagcctggcaacagagcaagactctgtctcaaaaaaaaaaaaaaaaaagtgttctcttcagcaatgcatgcacatcttaaagaagacttgatattgtcactgactttagttatgcttttatttatttatttttttttttgtagagatggggtctcactatgttgtcccagcttgtctcaaactcatagcttcagtggctcctcctgcttctgcttcccaaagtgctgggattacaggggtgagccactgtgcccggcctagttttatttatttatttatttatttagacggtgttttgctcttgttgcccaggctgtagtgcattgccacgatctcagctcaccacaacctctgcctcccgggttcaagcgattctcctgcctcagcctcccgagtagctaagattacaggcatgccccaccacacctggctaattttgtatttttagtagagacagggtttctccatgttggtcgggctggtctggaactcccaacctcaggtgaaccgcccacctcggcctcccaaagtgccaggattacaggtgtttaagttaccgcacccggccaatacacattgatctacacaagagatgcaaagaaacagaaaacatgcaaaatattaacaaatgatcagtctacaacaaggatatataataggtgttcaatattctggcctttcacattttctttggtttagaatattcaatctacagatagcctgggcaacaaaccaagaccctgtctttaaaacgtaaataaataaataaaaatatatgagggggaaggccaggcgcggtggcttatacctgtaattccagcactttgggagtccgaggagggtggatcacgaggtcaggagttcgagaccagcccaaccaacatggtgaaaccccgtctctactaaaaatgcaaaattagccgggcgtggtggcacatgcctgtaatcccagttactcagcatgctgaggcaggagaatcgcttggaccgggagacagagtttacagtgagcctatatcacgccattgcactccagcctgggcaataagagcgaaactcygtctcaaaatatgtatatatacgagaggaaaaacgctgaatcaaaacatgtctctttcacagttaatacaactgtaatttctgatactggtataatgaaggcggcatcctacttcctggaagcccctccgttttgaagctctktgggaggtactgacctaggaagttcagctgcttttgatctcaaaaacacagcggagtattgctactttgctttataactgtggcaatatttgcttttatttctataaacctacaactcctgcacacttgacaaagcatttaactgctgagcaatttcgcaaacttcaataagcgatgcccycccacagccagatcatctcctccgtccagggctcaccggaacgcactgcaatcgccctgtcggtgacaagaggacgctggggcccttttccacaacagctgagatgcttttccttctggagaaaggacacaaaggttgactggctgcttttaaacagaggggcacggtggttggagaaaaaaacacgtctccaccggggaccctgggccaggcccagactgatgcgggcgcagcgggaagaggcgctcagaagagaaggcgggaaccccccgcctcggggtcctggcggggaggaggcgccgcttctccggagcagcagcgggaggccggcgcgtctcagaccyagcagaagtccggagcgtcaccctccgaccctcgctccgcctcccgctaggccctcctgccccgccctgcctaggttgagcatgagcgctggctgaggtgaaaacccagctaggaagctgctggagagcggggaatacgtatagctgcgcgccggctggcacttccgcttccggttgcgcacggcattaagtgtaggggccgagccccaagagctttggaatgaggatgatgtgaagctgagagaagagctggggccacctcttcgacacgcgtacagaaaagtcccgttttctcgcatcccaggtggaccrggatccagatcaatctgtcgatattgggaacgacgccggaccaggaaacccagcgccaagggccgggttggaggcggggactggcgcagcgggcggggcacgcgtggaggcgtcacctaaggcttcgattgcagacagcgggatgctcatcgagtgcttttcttttcttttttaatttctctttttagttttttgagataaggctccggtctgtcgcctaggctggagtgcagtggctcggtcatagatcattgcagcctggaattcctgcgctgaagctatcctcccgcctcggcctccggagtagcttggaccacagttgggcccatcacgcccagctaagttatctttttctagacacttgggtctcactgtgttccctaggctggtctcgaactcctgagcctaaaggatcctcccccctcggcctcccaagcagcttggaccacaggtgtgtgccaccacgcctggctaatttatttttattttatttttatttttttgtagagacagggtctctctttgttacccaggctgatctggaactcctgggctccagtgatccttccaccttggcctcccaaagtgctgggattataggcgtgagccaccaccctagggaaattcttttctgcaggattttctccttgtttcttcaaccctctgcagggatataaacatatttacaaagataatcccgctgtagtcctagctactgcgggagaatcgcttgagcccaggagttcgagaccagcgacaccctgtttgaaagattaacctgatggggctgggggcagtggctcacgcctgtaatcccagcactttgggaagccgaggcgggtggaacacgtgagttcaggagttcgagaccagcctggccaacatgccgaaaccccatctctactaaaaatattttttaaaaaatagccgggtgtggtggtgggcgcctgtaatcccagctactcgagaggctgaggcaggagaattgcttgaacctaggagactgaggttgcagtgagctgatacgatgccacagtactccagcctgggcgacagagtgagactccgtctcaaaaaaaaaaaaaaaaagattaacctgttaatccataaaatgctctgtgcctctgatacattcagttccttctttaggcctttagttttgttgtgatacaattatcatagcatacaattaacctgtttaaagtgtacagtttcgtggctttttgtatattcatatatttgtgcatcgatcatcacaatcaattttagaacattttcatgaccacaaaaataaacccagtaccctagccatgatcacccaatctgctcatccagccccacccccacccccagagtccaaagcaacagctaatctttctgtctgtatagattgcctactgtagatattgcctgtagaattagaatataaaacacgtggtgtttggcttgtttcattcaatgttttcaaggttcatccaattagcatgtatcagtacttaatttttttttactaaataagattccattgtatggctgtatcataacatcagttgttggatattgggttttctcttttttttttttttttggcttttttggataatacaagacgcattttaagcagtggtcaaaggaacattcatattcctaaacacttttgtcaataaaaataagaatagctgggtgcagtggctcacacctgtaatcccagcattttgggaggccgaggcaggcggatcacctgaggacaggagtttaagaccagcctggccaacatggtgaaacacggtctctactaaaaaatacaaaaaccagcagggcgtggtggtgcgcacctgtaatcccagcttctcgggaggctgaggcaggagaatcacttgaacctgggaggcggaggttgcagtgagctgagatggcgccacggcacttcagcctgggcaactgagcacaactgtctcaaaaaaataaaaaataaaaaataaatccccagctcaaaaaataaaacctagaaaaagaatataaatgtaaaccaaaatggaaaaaggtttatttatttatttattttttatttcaatagcctttgggaaacaggtggttttgggttacatggataagttctttagtggtgatttctgggattttggtgcacccatcatccgagmagtgtacaatgtacccaatgtgtagttttttatccacttttatccctcacccttctcccacccttcccccagagtccccaaagtgcattctttctttctatccttttttgttttgttttgttttttctttttgagatggagtctcattctgttgcccaggctggagtgtagtgacatgatcttggcaacctccgcctcccaggttcaagcagttctcttgcctcagcctcctgagtaagtgagattacagacatgcgccaccatgcttggctaatttttgtatttttagtagagatggggttttcccacgttggccaggctggtcttgaactgctggcctcaagtgatccacccacttcggcctcccaaagtgctgggataacaggcgtgagccactgcgcccacccaaagttcattatatcattcttatgcctttgcatcctcatagcttagttcccacttataagtgagaacatatatatggttttccattcctgagttacttcacttagaataatagtctctatccaggttgctcagaatgctatgactttcttgctttttatagctgagtggtattctgtggtgtatatataccacatttttgttatccccttattagttgatgggcattgagactggttccatatttttacagttgcaaattgtgggctgtaaacatgtgtgtgcaagtgtcctttttttttttcttttttgagatggagtctccactctgctgccaggctggagtgcagtggcctatcttggctcactgcaacctccgcctcctgggttcaaatgattctcctgcctcagcctcccaagtagctgagactacaggtgcacaccaccatgcccagctaatttttgtatttttagtagagacgaggtttcaccgtgttggtcaggatggtctcggtctcttgacctcgtgatccacccacctcagcctcccaaactgctgggaatacaggtgtgagccaccatgcccagcctgtttcagacatttttaagactatgtcccattcatttaaaatactatttttccccattgaattgttttgacacctttgtcaaccatcattagmctgtaaatgtgagcttagatgttttaaatggagaattataccaaaccttccaagttcaaatattcccagtgctccataacttaagaacaatgaaaatgaagaaatacttcctaattccttttatgaagaaagtataacattgatataaaatgtggtagaggctgggcatggaggctcacacctgtaatcccagcactttgggaggccgaggtgagtgggtcacctgaggtcaggagtttgatactggcctggcaaacatgatgaaaccctgtctctactaaaaatacaaaaatcagccaggtgtggtggcacgcacctgtaatcacagctacttaggaggctgaggcaggagaatcgcttgaacccaggaggcagaggttgcagtgagctgagatcataccgttgcactccagtggtgacagagcaagactccgtctcagaaaaaaaaaaaaagtggtagagtacaaaaaatgaaaaattgcagaaccatatcaattatgaatatggattcaaatatgctgttagctattagcaaataaaatacaagaccacattaagaaaataactatccccacatgaaatttagcataaaacagcagtattagtgcagttattagaaaatccattaaatagtccaggtgcagtgccttatgcctgtaatatcagcactttgggaggctgaggtggaggttgcattgcccaagctcatgagttccagaccagcctgggcaacatgttgaaaccccatctctacaaaaaagacaaaaattagtcgtgtgtgatctcagctactcaggatgaagtgggaggattgcttgaacccaggaagtggaggctgcagtgaactaaaaccgaccatgcccctgcactctagcctgggtgatagagccagaccttgtctaaagaaaagaaaagaaaaaaaatccattaaataatgcaccataaaaatacatctacaagaacaagtcatgtgactttctccatagatgctgatgaagcctttggaaaaaattcaacactcatttattattattgttattattattgttgtttgagatagggtcttcctatgttgtgcaggctggatcaaactcctgggctcaagggatcctccttcctcagcctcctgagtagctggggctataggcgtgcaacaccacacccagtgcaatgtcccttattgatatcagcactccagaaaaatagaaattagtgaatactttcttaagatgattgcctgtacctatagctgagtgtgtgtgtgtgtctgtgtgtgtgtgtactggaagcattagctaatacaattcagtaagaaaaattaattttgaaacatagaattgcagctgggcacggtggctcacacctgtaatcccagcaatttgggaggccaaggtgggaggatcacctgaggtcaggagcttgagaccagcctggccaacatggtgaaatcccgtctctattaaaaatacaaaaattagccagacatggtggcatgctcctgtaatcccaactactcaggaggctgaggcaggagaatcacttgaacccggtaggtggaggttgcagtgagccgagattgcaccactgcacttcagcctgggcgacagagcgaaactccatctcaaaaaaagaaaaagaaaaagaaaaagtaaataagcatagaattgcaaaagaaggaaactatctctttttgcagatgatgtgatattatatatggaaagccctagagaataaaataataagttaacagaatgtgaaattgctatctaaaaaccaatggcattcatctaccagtcaaaagccagtaaggtgatgtaataaaacttatgtagaataacataaagatacttaggtttagacttatcaaaaaatgtgtaaaacatacatgaagaagctttaaaacaaacattcttgaaagacacaaaatagacttgaacaaatggaaaattccttgttcttctataagatgacttaacatcatatagatagcaattcttaacaggttaactcaaaaatataacaatcccaggccgggcgcagtgtcttatgcctgtaatcccagcactttgggaggctgaggcaggaggatcaggaggtcaggagatagagaccaccctggctaacacgatgaaacccagtctctactaaaaatacaaaaaattagccaggcgtggtggcaggtgcctgtagtcccagctactcgggaggctgaggcaggagaatggcgtgaacccgggaggtggagcttgcagtgaactgagattgcgccactgcactccagcctgggcaacagagcaagactccgtctcaaaaaaaaaaaaaaaataccaaatccaagatggcggccagcaggaggctgattaagagcttgaggaaatctgcaaatgtgggatgaaaaacttcccgtaacatccaggttgatgaagctaatttattgacttagcaagggcttattgttcctgacaactctccatatgattaggtgaccttcagaatcgaaatcaactttccagcagagtatccattcaaactaccaaakatcacatttaaaacaaagatctatcacccaaatatcgacgaaaaggggcaggtctgtctgtcagtaattagtgctgaaaactggaagccagcaaccaaaaccgaccaagtaatccagtccctcatagcactggtgaatgacccccagcccgagcacccgcttcgggctgacctagctgaagaatactctaaggaccgtaaaaaattctgtaagaatgctgaagagtttacaaagaaatatggggaaagtgacctgtggactaaaatctgccacgattggttccagcaagtgtaagcagaggccccatgcagtgcattcagacacccggcaaagcaggactctgtggaaattgacacgtgccaccgcctgacattcacttgtggcagttactaactttctacagttttcttagtgaaaaatggtgtaggtaatctgtaaagaaaggattaaaatctaagatgttttaaatatatatacatatatatgtgtatatatatgtgtgtgtgtgtgtgtgtgtatatatatataacaatcccaataaaaaaccaaactttttaatggagttttgtaaattaattttaaagttcacatgggagcacaaacgtctgataatacccaagaaaactctgaaaaacaaaagtgacaatgccctacagatattaagacatactataaagcctctacaattaaaactgtggataggaacaggaacaggaaacagacaaatgggataaaatggaatatctagaaatagatccaggaacatatgggaattcagttcagaaaggtggtatttcagatcaattggggcaaaaatgcagtttgcaatgaaaggtgctaagattaagtggttagccatctggaaaaagacaaaattacatggataactcacaccattcacaaaataaactccaaatgaatcagggaactaaatgtgaaaaacaaaaatatatgcatatgtagggtatttgaatgatttttgggtgattaacgtaaaatatgtgaccacaaggcagcagtagctcacttgggcagtgctttgatgggtttgtgtgtggggtcccttgtgggcagcaagccacccaggtgctgaagcaagagaccgaggacacgagctgttccagtataataaaacataaaacaagaatagttgtaccagatatagatcatagacatgattatatatgaatatcattaatcattagtttgtggcaattactctttattccaatattataataatccttgctctataatcataacctaggaaaaatcaggctatacagagataggagctgaggggacatagtgaggagtgaccagaagacaagagtgcaagccttctgttatgcccagacagggccaccagaagggctccttggtctagcggtaatgccagcgtctgggaagacgtccattgccaggtggaccatggtctagcggtagcgaaaactgtcaaggaacaacacccgctacttagcagactgagaaagggagtctccttttccccgggggggtttatagaagactctgctcctccacctcttgtggagggcctgacatcagccaggcttgcccactgttatctggaggcccaaccgtctccctgtgatgctgtgcttcagtggtcacactcctagtccgccttcatgttccatcctgtacacctggctctgccttctagatagcagtagtaaattagtgaaagtactaaaagtctctgatatgcagaaataatggcataagctgtctttctctctgtctcctctccctctctgcctcaactgccaggcagggaagggccccctgtccagtggacacgtgacccacgtgaccttacctatcattggagatgactcacactctttaccctgccccttttgctttgtatccagtaaataacagcgcagccagacatttggggccactaccggtctccgtgcattgggggtagcggtcccccaggcccagctgtcttttcttctatctcttagtcttgtgtctttatttctacactctcttgtcgccacacacagggagaagcccaccgaccctgtggggctggtccctgcagtccctcatagcatgagaatatccaaaggctacagacttggaggtcactactcagaatgggaggagagcaagagaactccagggaaagaatgggagttgagagggagcttatgtgctaggtgaagttgcttagcagcctagtgggaagtttctaaatcagaaagctctgaagagcagcaagggattggggtcctttttatagctggagggtttatcttctctgtggtcatcaaatggttggcacaatttcaccggggtatgcagagcaggcaggccctaaaggactaaaaaatctgcttgtttggactatgtttaaaacaattgattcaggatcattaaaaaaaagaagaagaagaacgaaagaaaacacacacacacgcacacacacacacacacacacacacacaattggatggccaagcatggtggcttgcacctgtaatcccagctacttgggaggtcaaggcaggaggattgcttgaacccaggagtttcaggctgcaataagctgtgatcctgccactgcactccagcctgggcaacaaatcaagaccctatctttaaacaaacaaaccaaaagaaaattaaaaacaattgggtgtggaaaaacttgagtttggagccgggtgcggtggctcatgcctgtaatcccagcacttttggaggtcgaggtgggcagatcacgaggtcaggagatcgagaccatcctggccaacctggtgaaatcccgtctctactaaaaatacaaaaattagctgggcgtggtggcatgtgcctgtaatcccagctacttgggaggctgaggcaggagaatcccttgaaccagggagtcggaggttgcagtgagcccagatcgtgccactgcattccagcctggcaacaaagtgagactctgtccaaaaaaaaaaatttaaacaattggatgtggaaaaacttgagtttggggccaggtgcgatggttcatacctgtcattttagcactttgggaggccaaggtgggtggatcacctgaggtcaggagtctgagaccaagctagctaacatggcaaaaccccatctctactaaaaaatacaaaaaaaaagccagactaaaacttgagtttgacactggcagctattgtgagtaacggtgctatgaacactggtgtacaaaccaaaacaatacagaaaaaacccagcaaacactggacaaaggagagaatcagctttccagagttacagtattatcagattcaaatgtccagtttttaacaaaaatctcaaggcacacaaacaggaaagtatggcccattcaaagaaaaaataaataaatataaattttccctggaagagacctaatggtatatctactagacaaggactttaaaacaactgccttaaagatgttcaaagaactaaaggaagacatggaaaaactcaagaaaatgatgtatgaacagaatataaataacaatcaagagatagaaaacctaaaaagaaaccaagaagaaattctggagctaaaaaatacaataattaaaatgaaaaattcactacagggattcaaaggagatttcagctgttgcatcccagacctctccatggatgatgtcaaaggcatccccagtagtgacaaccaaaaatgtctccagacattgctaactgtcccccaggagtaaaatcatccccattggaaatcactgctctagacctacctcccaatttacagaaaatgcaggtgacagaaaaacaagctaaaagaaaccatgagggggccgggcactgtggctcaggcctataatcccagcactttgggaggccaaggcggatggatcacctgaggtcaggagtttgagaccagcctggctaacatggtgaaaccctgtttctactaaaaatacaaaacagccaggtgaggtggcatgtgcctgtaatcccagctactgaggaggctgagacgggagaattgcttgaacccaggaggcagaggttgcagtgagctgagatcatgccattgcagtgcagcttgggcaacaagagcgaaaactcgtctcaaaaaaaaaaaaaaaaaaaaaaaagacgcaaggtctcgctatgttgcccaggctggattccaactcctgggctcaatccatcctcccaactcagcctccccagtagctgggactacaggtgttagccaccatgccctatcttcaaagtttaatactatgctagtatataagaaaactgatactttataacccaatgttgaaacaatattcctctggaatcagactgcctgagattgaatctaggcttaaactctctgtgcataatatttttcatttgtaaaatgagggttagattaatatccactttctagctctgagggtaaatagttgaatagaatgctcatgtgagacgatttaactctgacatttcagccaactgtagcttcggggtgtcaccttgaaaagaggttggttcctttggaagaaatgttacttccagaagttagaataaaaggaatttatttatttatttatttatttttgagactgagtttcactcttgttgcccaggctggagtgtaataacacgatcatggcttaccgcaacctccgcctcccgggttcaagcgattctcctgcctcagcctcccaagtagctgggattacaggcatgcgccaccacgccyggctaattttatatttttagtagagacagggtttctccatgttggtcaggctggtctcaaactcccgacctcaggtgatctgtctgcctcagcttcccaaagtgctgggattacaggcatgagccactgcaccccaccagaattttttttttttttttgaggccaagtttcactcttgttgcccaggctagagtgtaatggcgtgatctcagctcactgcagcttctgcctcccaggttcaaggaattctcctgcctcagcctcccaagcagctgggattacaggtgcccaccaccacacccagctaattttttgtattgttagtagagacgaggtttcaccatgttggccaggctggtctcgaactcctgaccttcaggtgatccacccacctccaactcccaaagtgctaggattacaagcatgagtcaccacgcccggccatcacgacttttttttttttttagataggctgtcactcctgtcactcaggctggagtgtagtacagtgatcttcactcactgcagccttgacctcctggtctcaagagatcctcccacctcagcctctcaagtagctaggactacaaatgcatgccaccatgcccagctaattttgtttttttttttktttttttttttgtagagatgaggtctcactatattgcccagcctggtctcaaactcctgggctcaagcaatccccctacctcagcctcttaagtgctggaattataggcatgagccactgcacctggccactctttttttctttctgtttaaagacagggtcttgctatatagcccaggctggagtggagtggtcattcacaggcatgatcatgtacactgcagcttacaactcccaggctcaagtgatcctcccgccccagcctccccaataactaggactacaggcatgtgccaccacacccagcaagtttcccttagttctctgaaatgttttaagactccactcaaatcttcttaaacagtcttaaattttcatcatgatattacctagtgatttttttttttaagatggagccttgctctatcacccaggatggagtgcagtggtgtgatctcagctcactgcaacctctgcctcccaggttcaagcgattctcctgcctcagtctcccgagtagctgggactacaggtgtgcaccatcatgcccggctaatttttgtattttagtagaggtagggtttcaccatgttggctaggctggtcttgaactcctgacctcaagtgatccacctgcctcagcctcccaaaatgctgggattacaggtgtgagccactgcactcagcctgacctagtgatgttttactcccagttctaatgttccacagttagagactccagacataccaaaatcagttaactttcatgaattcaccatggcccttatgcagtagttttcaacagtggctgcacattagattcactggaggacttttaaaaacactgatacccatgacacatccccataaatgctgttttaattggtctgaggtaggactcagcccttagtacatttctcaagtttccaggacattctataaggattaggttgagaattactgacttggcttctgcattcatatgctcttcttgtccacttgatatagtcctacacatctttcagaacttaagtcaaccttgcctcctctggagaaaatatcctgttaggtgtttttttgtttgtttgtttgttttgagatggaatctccctctgtagcccagtggcggatcttggctcactgcaacctctgcctcccaggtccaagcgaattctcctgccccagcctcctgagtagctggaattacaggcatgcaccaccacgccctgtaatttttgtatttttaggagagatggggtttcaccatgttggccaggctggtcttgaactcctgacctcaagtgatctgcccacattggcctcccaaagtgctggatttacaggtatgggccaccatgtcccacccactgttaggtgcactcttatccctcccctcccagcaccccatagcccctttgaaattcctttattataagtcttgtcataacgctttatcacttgcgctgtttatctttcatgctgtctgatgaactccaggaaagtagaaactaattttagtctagacacctgcttgtggaagttaggcaaacagtcttctgaaagactgtcttgatataaaatcccagatcccacaaaaaaaaacttttttctttacagcaaagcaagtggaaaaaacaaaaacaaaaacaaaaccctttattttttaattgctctatcaatgaaaaagaaaatagagaaatttcccaagggcaaacaattttttttttttttttttgagatggagtgtcgctcttgttgcccaggctggagtgcaatggtgcgatcttgactcactacaacctccgcctccgggttcaagggattctcctgtctcagcctcccaagtagctgggattacaggtgcacatcaccatgccctgctaattttgtatttttagtagagatggggtttcaccatgttggccaagctggtctcgaactcctgactccagatgatccacccacctcagcctcccaaagtgctgggattacatgtgtgagccaccgcacccggcctaataatttttttaagttagcagaatccagagatagaagaactttccctcaatatttttcttcccttccagaatacagagtgattgctgaaaaatagctgccccaccaggaatggcactagcccttgtgactagtttttaccacaaaatgttaaaggaaaaaaatgtgtcgtgttagccaaagagcaatgtgctttctcttttttattagacagggtctcaatctctcacccaggctagagtgcagtggtgctgcacagctcactgcagcctcaaacttctgggctcaagcaatcctccagcytcagcctcccacgtagctggaacttcaggtgtgcaccaccacacctaatttttaattttttgttccagagatggggtcttgctaggttgcccaggcttgtctccaactcctggtctcaggcagtcctcccgactcagcctcccaaagcamtgggattgcaggcatgagtcaccatgcccagccagctttctctatttttactttccctttccacctagatgtacatggtgtctcaacattgaaagatactgggtttctgcaccaccaggggaagaaagccaactaaatttagattgttacatgagtaggaaattaactgaaactttgatatgtgtctgttacattaggttacccataaatacacagctagatggaaaagaaatgttactgggatataattttggttaaataggacaccatatgcatttgaaaggaacaaatggctttcctcaacttcctttaactctctcaaaatgcacacctgtggctctttctagatcttctacctcttcaagcactccatacataacactatctccctgtaacttttttttttttaagagacagggtcttgctctgtcacccaggatggagtgcagtagcatgatcatggctcactgcagccttgacctcccaggctcaagcaatcctcccacctcaacctccccagtagcagggaccatagatgtatgccaccatgcctggctgatttttaaatttttttgtaaagatgggtttttactatcttgcccaggctgctcttgatcacttgagccaccccttggcctcccaaagtgctgaaatacagacctgagtacctggacttctccctataattcttttttttttttttttttttttttttttgagatggagtctagctttctgtcacctgggctggagtgcagtagcacgatctcagctcactgcaacctccaactcccaagttcaagcgattctcctgcctcagcctccctagtagctgggattacagacccgcatcaccatgcctagctaattttgtatttttagtagagacagggtttcgccatgttggccaggagttcaaggctgcagtgtgctatgattgccactatgaatagccactgccctccagcctgggcaacatagtgagagtctcatcmctaaaaaaaaaaaaaaaaaaatatatatatatatatatatattctttaaaagtttattttgtataaataataatgagacataatttcaccaggctggtctccaactcctgagctcaagtgctgggattacaggtgtgagtcaccgtgtccggccagttttgtttttgtttttttttttaatttcagacagggtcttactctgtcgcctggatggagtacagtggcacaatcactgttcaccaccacctcaacctcccaagctcaggtgatcctcccacctcagccccccaagtagttggaactacaggcacagtgccactatgcttggctaatttttatttttatttatttttatttttgtagataccgggttttgccatattgtccagactggtcttgaacttctgagctcaagcgatctgcccgcttcggcctcccaaagtgttgggactgcaggcactagccatcgcgcctggccagataatggtgattttttttcctaaagaaaaaaagtccaggcccatgtagatttttttcgtattgaagggggcctgcccctccacacctgttggtatttctcgcaaggtggagacaagagactgagaaaaggaaataagacacaaagtatagaggaagaaaagtgggcccaggagacgggtgctcagcaagtgaggatctgcaccggcactggtctctgagttccctcagtatttattgatcactttctctactatctgggcaagggggatgtggcaggactatagggtaatggtagggagagggtcagcaggaaaatgtgagcaaaggacgctatgtcacaaataagtttaaggaacggtgctgtgcctggatgtgcatgtaggccagatttatgtttcactttacacaaacatctcagtgcagtattgccgccagcatgtctcacctccagccataaggcggttttctcctatctcagtaaatagaatgtgcaatcgggttttacaccaagacattccattcccagggatgagcaggagacagatgctttcctcttatctcaactgcaaagaggccttcctctttcactaatcctcctcagcacagaccctttacgggtgtcaggctgggggacagtaaggtctttcccttcccacaaggccatatctcaggctgtctcagtggggggaaaccttggacaatacccgggctttcttgggcagaggtgcctgcggccttccacagtgcactgtgtccctgggtaaccgagaatggagcatggcgatgccttttaccaagcatactgcctgcaaacacatttttaacaaagcacatcctgcacagccctaaatccattaaaccttgagtcaacacagcacatgtttttgcaagcacagggttggggctaaggttacagattaacagcatctcaaagcagaagaatttttctaagtacagatcaaaatggagtttcttgtgtcttcctttttctacatagacacagtaacagtctgatctctcttttccccacaagtaacagtctgatctctctttcttttcccccgcacatatactgacctaaccataagaagtcagtgagactgggaaatatgcatcattgatgcagcctcacaataccccggccccatctgttctctcactactgagaccccaccctgtctcccccttcaccgagatttttttttttttttttttttgagacggagtctcgctctatcaccaggctggagtggcccgatctcggctcactgcaacttccgcctcccaggttcaagcgattctcctgcctcagcctccccagtagctgggactacaggcgcctgccagcatgcccagctaatttttgtatttttagtagagatggggtttcaccatgttggccagtatggtcttaatcgattgccctcgtgatccgcctgcgtcagcctcccagtctgtcccctcaccactactctctttcacggagaccccacccccatctctcccttcaccgactccccgcccccgtctctcgctcacggagtccccgcccctgtctcaaccaagaccgagtccccgcccccatctctccctcgccgagtcgccgcccgcgtctctccctcacccagaccccgccccatctctccctcaccgagaccccgccccatctccccctcaccgagactccgcccccgtctctccctcacccagaccccgcccccatctccctctcaccgagtccccgcccccatctctccctcaccaagaccttgcccccatctccccctcaccgaggctccgcccccgtctcaccctcaccgagaccccacccccatctcgcccttcacccagtccccgctcccatctctccctcaccgagaccccgcccccgtctgcctccctccgggtggctaagccgcacctgaagccgcacctggtcgcagaggctactgctggggaaaccgttgggccagcggcggctaaagggcaggaggcgccgctgtggccacgcgcacttctgattccgctccagggtttcagaaggaactgagggctctggacccggcctcggaggcctgaggagttgggaggggcggcggccgcgtcctccgcaactctggggagaagtcttagtttccgcgcagccaaacgcgattggaccccgccctccggcttcactggggaccgtgggggcggaacccggcgggaggacgtatggggggctggaccatgatggagggagtcggttgggctggacctcgaaatgcctctgctcgctttcctctgcgcttatgccgccatgtacgagtatgcgctgtttccaggtggtttgttatacagcagtagataactgatacatcccttttcactaatatttttatttcctaatacaatttttaaataattttttattttataccaaaaataatagtgaagagggtttttttaaggtcaggatctccctctgttgcccaggctggagtgagtggcgcaatcatggctcccgcccccgtctgtccctcaccgggtgcccgcccccatgtccccctcaccgagaccctcaccactgcagcctccaacccctgggctaaagtgaccctccggcctcaattcctctagtaggtgggactacaggctcgtgacaccacagcaggctaattttttgtggagatagcggttgcactatattgcccaggttggtcttgaactcctgggctcaagggattctcctacctcaacctcccagtttgtaatcagtcttcaaagtgttgggattacagacgtgagccaccgctccaggcctggtttttccacatggattatgtacatgtggcttctcaccacgttgagtcgatgcctgtcaattaagggataactaatcaactgaagactttgtcactcttattgcactcatagggattctcccccatggaaagtctgtcttgacaagcaagcaagtgcattgctacattagaagctgctgccatttaggttgggtgtggtggctcatgcctataatcccagcacatttggaggccgaagtgggcggatcagttgtggtcaggagtttgagaccagcatggccaacatggtgaaaactcatctctactaaaaatgcaaagattagccgggcgtggtggtatatgcctgtaatcccagctacttgggaggctgatgtgggagaatcgcctgaacccgggaggagaagattgcaggagccgagatcatgccactgcaacccagcctgggtgacagagcaagacgcgagactctgtcgcaaaaaaaaaaaaaaaattgctgccattttcagagcacctagactgcttctgccttgtctgaattccttcaaattgagtacgatgaatgctttgccataggttccattatagtcatgacattcataaggcttttcatacacagatattttattctgatagtcatctaaacaaaaactgaattctgtgtaaatattcaacatgcgagtctcatttatggacgacgtgcctacttgtgagacctctctgtgagtaagcatattttgaataggtttagaatgttccccaagttcatgaaactcagaaactctctcctgaagggtggcttctcttgggcatagacaaggagaaccttgtctccaggttcttcccattgtggggtggctcttccatctcatggcctccctgactcgtgctgcggagaaccggcaatcatcctcctgcatcttactctcttccggccagcagattgttttccccaactttattccgctttgcagctatctttttggtgctacatggtcttctggtctgaaatgaattgggaaaagaagtaaatcaggtttttgtttttgtttttgttttttgttttttgtttttgagacagagtcttgctctgtcgccaggctggagtgcagtggcgcgatctcggctcactgcaaccgactcccaggttcaagcaattctcctgcctcagcctcccaaatagctgggactacaggcgcgtgccaccacgaccagataattttttgtatttttagtagagaccaggttttaccatgttggccagcatgttctccatctcctgacctcatgatccgtcggcctcagcctcccagagcgctgggattacaggtgtgagccacctcgcctgaccatcagtttgttttytgtttgtttttttgagacagtgtctcactctgtcacccaggctggagtgcagtggtgcgatcacaactcactacagcctcaaactcctgggctcaagttatcgtcctgctgcagcctcccagtgctgggagtacaggtatgagtcactgtgccaggccttcaaaatttatgtttttggataaaaaatgatgacataatggtgctttgttttgttttgtttttgacacaagatctagctttgtcacccaagctggagtgcagtgacgtgatcatggctcaatgcagcttcgacttcctgggctcagaggatcctcccacctcagccccccaagtagctggaactacagttgcacaccaccatgcccggctaatttttgtatttttggtagagacggggtttcaccatgttgcccaggctagtctggaacttctgagctcaagcgatccgcccgcctcggcctcacaaagtgctgggattacaggagtgagccactgcatccagctcgataatggtgatttttttttaagatttttttttttttttgagacagagtttcactcttcttgcccaggctggagagcaatggtgtgatcttggctcactgcaacctccgcctcccatgttcaagcgattttccttcctcagccgcccgagaagctgggattactgacatgtgtcaccacacttggctaattttgtattttcagtagagacggggtttctccatgttggccaggctagtcttgaactcccaccctcaggtgatccgcccacctcggcctcccaaagtgctggtattacaggcatgagccaccgcacccagctaagaatttttgtttttttaagaataagaaaaaagactccgtctgaaaaaaaaaaaaggaaagaaaaaaataaagtccaggcccatgtagattttttcatatactgacctaaacataagaagtcagtgagactgggaaatatgcatcattgcaatatgcagcctcacaatatctggccctcatctctccctcactgagaccccgcccccgtctctcacctcatcgagaacccgcgctcatccttctctgagaacccgcccccatctctccatcaccaagaccctgcctccgtctgtcccctcgatgactctgctctgcccacccctcaccgagatctaacctctgtctgtcccctcaccgagtgaagggggcctccccctccacacctctgggtatttctcgtcaggtgggatgagaggctgagaaaagaaataagacacagagacaaagtatggagaaagaacagtgggcccaggggacctgcaccgctggctgtctctgagtttcctcggtatttactgatcattatttttactatcttagtgaggggagtgtagcagggcaacaggtggggagaaggtcagcagggaaacatgtgagcaaaggaatctgtatcacgaataagttcaaggaaaggtactgtgcctggatgtgcacgtaggcctgatttaagtttcactttacacaaacatctcagtgtagcaaagagtaacagagcagtattgctgccagcatatcccgcctctagtcacagggcagttttctcctatctcagaattgaacgaatgggaatggtcagtttacacggagacattccattcccaggaaggagcaggagagagaagccttcctcttatctcaactgcaaagaggcctccctctttcactactcctcctcagcacagaccctttaggggtgtcaggctgggggatggtaaggtctttcctttcccatgaggccatatctcaggccatctcagagctttcttgggcagaggtccctgcggctttccgcagtgcattgtgtccctggttaatcgagaatggagaatggcgatgacttttaccaagcatactgcctgcaaacatactgttaacaaggcatcctgcacagccctaagtccattaaactttgattcaatacagcacatgtttctgtgagcacagggttggggctaaagttaagactcacagcatctcaaagcaaaacaatgtttcttaatacagatcaaagtggaatttatgtcttccttttctacatagacatagtaacaatctgatctctctttcttttccccacaactgagtcccrggctccatctcctggtagagtccagccctacagggctttgcgggtgttctccccatgtgtggagatgagagatcataagaaataaagacacaagacaaagagataaagagaagacagctgggccctgaggaccactgccaccaagacgcagagaccagtagtggccccaaatggcggatgcactgatatttattgtatataagacaagggggcagggtaaggagggtgagtcatccaagtgattgataaggtcaagcaagtcacgtgatcataggacagggggcccttcccttataggtagctgaagaagagagggaagacagcatacatcagcattttctttttttttttttttttttcccccgagacagagtctcactctgtcaccaggctgtagtgcaatggcccgatctcagctcactgcaacctccgccctccgagttcaagcgattctcctgcctcagcctcccaagtagctgggattacaggcgcctgccactgcacccagctaattttttgtatttttagtggagatggggtttcaccttcttggccaggctggtcttgaagtcctgacctcgtgatccacccgcctcggcctcccaaagtgctgggattacaggcatgagccactgcgcccggcccagtgttttcttttacgcacttatcagaaagataaaagactttaagactttcactatttcttctaccactatcttctaagaaattcaaagaggaaccaggagtaccggaggaatatgaaagtggacaagaaaagtgaccactgaagcacagcaccacagggaggggtttatgcctccggatggctgcgggcaggcctggataatatccaacctcccacaagaagctggtggagcagagtgttccctgactcctccaaggaaagggagactccctttcatggtctgctaagtaacgggtgccttcccaggcactggcattaccgcttgaccaaggagccctcaagcggcccttatgcgggcctgacagagggctcacctcttgctttcttggtcacttctcacaatgtcccttcagcacctgatcctacacccgcccgttattccttggttatgttagtaatacaacaaagagtaatattaaaagctaatgattaataatgttcatactaatgattgataatgtccatgatcatctctatatctaatttataactattcttattctaactgttttctttattatactgaaacagtttgtgccttcagtctcttgcctgggcacctgggtaatcctccgcccacagactcccgcatcactgagtcccggtcctcctatcctacacggagtctctaccttcatctccacactcagggagactccacctcggtctccgccttcactgaatccccgcccccattgcgccttcactgagacaccagccccatctacgctcacagagaccttaccccgtctccccgtcaccgagaccgctcccccatctcgccctcaccaagtccccgcccccgcctcgccctcaccgagtccccatccctgtctctcccccactgagaccccgcccccgtctcgccctcatcgagtctccgcccccgtcctccgtcatcgagtctccgccccgcctcgccctcaccgagtccccgcccccgcctccccctcactgagtccccatccctgcctctcccttactgagaccccgccctcgtctctcccctcacggagaccccgcccccgactccccctcatcgagtacccgccccgtctatccttcatcaagtctccacccccgcctctccctcaccgagtccccgcccccgcctccccctcaccgagttcccatccctgtctctcccctcaccgagaccccgcccccgcctctccctcatcgagtccccgccaccgtctctccttcatcgagtcccctacccttcccgtcatcgagtccccggccccgtctccccctcatcgagtccccgccctcttctctcccttcactgagatcccgccctcttctctcccctcactgaggtcccgcctctgacagcccctcaccgagtccccgccccccgtctctccctcaccgagttctcgtcccagtctccccatcacctaatccccacccctgtctctcccttacgaagtccccggcccccggttcccctcaccgagaccctgccctgtctgtcatcgagtccctgtctccccctcacctagtccctcttctctcccctcaccgagtccccgcccccgtcgtccgctcaccaagtccccgcccccgtctccccctcaccgagtcccgccctcttctcttccctcaccgagtccccgcccccgtcgtcccctcaccgattcccgcccccgtctccccgtcaccgagtccccgcccccgtctctcccctcaccgattccccgcctccgtctcccctcaccgattcccgcccctgtctctccctcaccgagtccccgcccccgtcaatcctctcaccgagtccccgcctccgtctcccctcaccaagtctccgcccccgtctctcggtcaccaagaccccacccccgtctccccctcaccgagtccctgcccgggtcttcctgcctccacgtggcgaagccgcacctgaagccccacctggtcgcaaaggctggtgcaggggaaaccgttggttcagctgcggttcctgggaagggggtgccgctctgatcacgcgcacttctgattcccctctcggggctcggaagcggctgagggctctggacccggtctccgaggcgtgaggcggtgggagggtcggcggccgcgtcctccacgaccctggggagaagtcccagtttccgcgcagccgacaacggttggaccccgtccctccggcttcactgggcaccgtgggggcagaacccggcggcggcttggggtgggggcgggaccacgatggagggagtctgttgggcgggacctcgaaatgcctctgctcgctttcctctgcattcatgcggcttgtacgaggatgcgctgtttcctggtggtttgttatacggcagtagataactgatacatctctcttcactactttgtttgcgtttttataggtcagggtcttcctctgtcgcacaggctggagtgcagtggctcgatcacggctcacggaaacctccaatccctgggctcaagcgatcttccctcaaattcaacagtagctggaactacaggctcgtgacaccacagcaggctaatttttaaatttttcgtggagatgggaggtcacactatattgcccaggctggtcgcgaactcctgagctcaagcgatcttccctccttggcgtcccaaagagctgagattgcaggtatgaaccaccgcaccgggcccattctcaacatctctcaacaaactgataaagagcatgtaaaaaaatctacagctaacattgtagtgaaatactgaaaactgttctaagctcaggagtacagcaacgatgcccactctcacgaattctatcaagcattgtagttacggccacgcgcggctcacgcctgagatcctaacactttggaaggaagatcgctttgagttcaggagtttgagaccagcctgggcaagatggcaaaaccctgtctcaattttaaaaaatacaaaaattagccaggcatggtgatgcatgtctatagtcccagctacttcggagactgacacaggaggatcacttgagcccggaggcagaggttgtagtgagctgagatggcaacattgcactccagctggggcgacagaggaaggccctgtctgaaaaagaaattggaagaaacattatctacatttcttttctgccattatttacagacaacataattgtctaagtgggagatccaaaagaatctaaattgttacacataatgtgcgggttagcaagaatagtggctaaaaactcaatatgcaaagataattgtcttgtctctctctttttttttttttttttttttttttgacggagtcttgctctgtcgcccaggctggaatgcagtggcttgatcttggcttgctgcaacctccacctccctggttcaagcgattctcctgcctcaggcccctgagtagctgggattacaggcgcatgccaccacgcccagctaatttttgtatgtttttagtagagacggggcttcgccacgttggcaaggccggtctggaactcctgacctcaggtattccgctggcctcggcatcccaaagtgctgggattacaggcgtgaggcaccgcacccggccgacttgtctcttttaacagcaatattacaacagcaataaaataagtagaaataaatacaacaaaaaagtatgcaatatctcttccgagaaatttgtaaactactattgaaagaaatcaaagatgacctagatcaatggatagaccttccttgttgatggattagaagtttcaatataaagacttgaattcttcttacttaatatagaaagttaacaagttttcagtcaaaataacatgtttgatgaggaacctgatctacttataataaaatgtatgtatgtggaggtacaaaatactcctgaagaactgttggcacttaccctacagacattaagaaatagaaagacagggtcgggcacggtggcttacgcctgtaatcccaacactttgggaggccgaggcgggcggttcaccaggtcaggagatcgagaccatcctggctgacacggtgaaaccccgtctctactaaaaatacaaaaaatagccgggcgtggtggcaggcacctgtggtcccagctactcaggaggctgaggcaggagaatggcatgaacccgggaggtggagcttgcagtgagcagagatcgtgccactgcactccagcctgggcgacagagcgagactccgtcgcaaaaaaaaagacagtaatattggtgtagtggtaaataaattaaaccaataaatagaatagaaagccccaaaatacacccttatgaatgaggtgtgttcttggccattatgaataatgctgctataaacgtgggtggtcaaatatctttttgagagcctgttttccattcttttagatatatacccagaagtgggattgctagaccatgtgataataccaattttaattttttgaaccactgccatactggttttcatagctgctgcaccgttttatagtctcactaacagtgcacaggtgggccaggtgtgctggttttcatgcctgtaatcccagcactttgggaggctgaggtggatggatcacctgaattcaggaggtcaggaccagcctggctacatggtgaaaccctgtgtctattaaaaatacaaaagaattagctgggtgtgttgagtcccagctacttgggagactaaggcaggagaatcgcttgaacccaggaggtggaggttgcagtgagccgagatctcgccagtgcactccagcctgggcaacagagcaagactctgtctcaaaaaaaaaaaaaaaaaaaaaaaaaaaaagaattcacaacacaatgactgtgttaacaatgttgttgaagttcatcctaagtttggtaattggggtggccatttgtgttaactaattgcctttatccaaatgaaaaataaaaattcttatatccttttggcaagcaggcagttttagcttataagcaggtgcctaaggaaatagaagtgtgctactgatgcaggtaagtgccatcattggggattcacccaggaaagaattcaactggtggtgctacacaaggatctttcattcactcagagttgctttttccagagtacagctaaaacctatgcagtgtgcccagaatcagcattttgtgctgttggctagctatagttatactcacttttaattacatgcaaattaaggggtgtgccatgcagaactttctagaaaggaggctataacttccaggtgattgttgtggaagtgaatggtaactttcatgttgttgccatggtacttatcaactgtcatggctctggtaggagtgtcttaccctaacaagcaaggagagcaactagagatggcttttggtgccatctgctggttcccggtggcttcttcactttatcctgttgggaccaggaaacaaagtaagtcctacccagtctcctacctcactatggtctgaaggttgtatgttgtgtgtgtcctgcctccacaccaccactccgcaaagccaaatgcttaaatcctaaccgcagaagtgatgaaattaggatatgaggccttagggaggtgattagatcatgagggcggggccttcgttaatggatttactagcaagtttgtccaagtcgccttattttgttgttgttgtcttgttttgttttgttttagacttgtagcagcctgaagccatggtttttagtttctgtttctagtgataagtggaaaagagggatgaggaagaggctttgcaggcccaaccagaaacaaaaactaacaacccataactgtattcttgaacacccctgtatgggattggccgtggagactttctcaccccttctatcatgtgattatgaggtatgaggtaggaaatgtctttgtgtttaaggagggactgttctgaacgtccatgctgattcccactgaagacgttaaactctagagtctgtgggaaaaggaagaagcttaattgaatgtctttcttttttctttcttttttttttttttttttttgaagctgagtctcactctgttgcccaggctggagtgcagtggcgcgatctcggctcactgcaacctccacctccgggttcaagtgattctccttcctcagcctcccgagtagctgggattacaggtgcatgccaccacacctggctaattttttatttttagtagagatggagtttcaccatgttggccaggctggtctcaaactcctgacctcatgtgatctgcccgtctcagcctcccaaagtgctgggattacaggggtgagccaccgcgcacgacctgaatgtctttttttttttttttttgagacggagtctcactctgtcacccaggctggagtgcagtggcgcgatatcggctcactgcaacctccgcctcccaggttcaagcgattctcctgcctgagcctcccgagtagctgggactacatgcacctgccaccacgcccagctaatcttttgtgttttgtttttagtagagacggggtttcactgtgttagccaggatggtctcgatctgctcacctcgtgatccacccgcctcggtctcccaaagtgctgggattacaggcgtgagccaccgcgcctagctgaatgtctttcttacgagccctgggtactgggcttgaaaccacctttgcaaaaattataactgagaaactgattacagggaaagagatctgaccaaactaactgcatcttgcttctaacctccacactgtccttgttcattcctggacataggccaaactaagtttgggatgaacttagtttatagtttaactttgaaacaaaaacaacaataatgctttcccaaaacaaacctccttttccctggagactagactgcctttgcaggactaacacattagccacagataaggaattatggtttaggagtcatgcagctggtgggtgcaatattctggacctccccaaattgctcctggggataaaatcactatcgtaaaacctagaatcagtgcttgagatattttgcagaccctgtgtttcagtgcacaagttgaggccacctagatggataaaccggctcatctggtcttgtggttcccacccaggaactgactcagagcaacaggacaggttccactccctgtgatttcatctcagactcaaccaatcagcacttcccactttcagaccccctattatccttaaaattatctcaaattatccttaaaaaccacgatctcaggccaggtgcggtggatcacgcctgtaatcccagcacattgggaggccaaggcaggtggatcacctgaggtcaggagttcaagaccagcctggccaacatggtgaaaccccgtctctactaaaaaaaacaaatagaaaaattagccaggcgtggtggcggccacctgtaatcccagctactcgggaggctgaggcaggagaatctcttaaacccaggaggaagaggttacagtgagctgaggtggcgccattacactctagcttgggtgacaagagcgaaactctgtctcaaaacaaacaaacaaaccccctgatcccagagttttcagggagactgatctgaataatagtaaaattttggtctcctgtacggctagctggctctgcatgaatgaaactctttctttattgcaatttcctgtattggtaaatcagctctaggcagttaggcggttacaagcttggtaactcatgcctataatcccacactttgggagcccacggcaggaggatcgattgaggccaggagttagagccaagcttgggcaacatagtgacatcccatctctacaaaaagaaaaaaaaatagctgactgtggtggtgggcgcctgtagtcccagctactgaggaggctgaggtggaagaatcacctgagtccaggagttccatgctgcggtgagctatgattgtgccattgcacaccagtctgggtgacagagtgagactgtctctaaaaaaaaggaaaaaaaaagaaagaaaatccatcagcagatagctcttggatctaccttcactttagcctcagaccatgccacaacccctctgttctcccctgctaccaactttccaaaccactttcttctcatcgggattattgccttaactttccaattacgctccc

SEQ ID NO: 97585 - DNA, 102253 bp, Homo sapiens
tgaccgtgacaggctacttcagctgtggggggggggggggggtacggtgattaccagtaacacctgagacagagccctggacccaggcgtgttcaataaatagctgatgaaaatgagattcactgccaagtcaccacgaggtcatcctgtctcctcctgctgtgctccccctgtagcccatgtggactgggtcccctctcaggctgcctgggtcccagcagagggcagaggacagtggagggtccctgtcctggggacggtcaaggcagagcagtcaccacctgtgctgggtgagtggtcactggccttcctctggcccaactgggggctccaaaatgaccataattacaaacctgatactggccctacgtcctaccaaaaacccagagggagatggaaacagtggcactgatggattctagagttgaacaggaggtaggtgggacctttacctcttttttcttaaaaacagcttaaaaatacatttatgccaagagctatcagggctcaatcctctctcaaaagtctcctgaattttggccgggcatggtggctcaggcctgtaattccagcactttgggaggcagaggcaggcagaacacttgaggtcaggagttcaagaccagcctggccaacatggtgaaacctcatctctactaaaaataaaaataaaaattcgccagcgtggtggcacacacctgtagtctcagctacatcggaggctgaggcaggagaaatctcttgaactggaaggtagaggttgtagtgagccaagatcatgccattgcactccagcctgggtgatagagtgagactctgtctcaaaaaaaaaaagtctcctgaattttatcattagtgaacatgcttcagtgagtgaaaaaacactctaaaattcaaactaaattttccttgcaatctatcctaacaatcgtctgggtcttatttttaataatctgtcatagagaaacaccggccccttctttaacattgaaaaaggaaagtgacattttgatcactgtcaacaatttaacaaccaataactatatactgagcaactcttcagtccattcctccggacaccatggatgaagaatcccattaccaatggagagagcggaagctgctctcttaaacgcccaagcagtgtctcatgtcagtttgggaatcagagccacccaggaaaattgttagtggctctgtctaattagcactcctgccacctgcaaacaagtggtactaaaaaaaggtgctgaattcttgccattgagaatgccaaaaaaagacaccactggtttcattctgactcttagaatctaatatttcactgatttggcgggctgggggtggtgggaggaggggggaaggaaatacactttcactttcacccaaaggaaatgacttaacaacaagtcgtgttttagaaacgatcatatggtaatgagtcctccaatccagcaatcctccctcccctgacctcctggcccctgccttcccctctgcctggtctaggctccctctgcctcccacagaaactgccttgtcaggtccagtcttagaccttcctcctccaggaaggcatcctgaccagcctagctcttagggaatcgtccccttaaccccacaacacttgagagtctcttccccacaggtgagcacgaagttatatttcttgataacaactgctgttatcttaacccttgtcaagaacaagagccaagtattgtattaggaaacctcgatcactttttggaaaataggcagggtaaaaatgattggcgtataagccgccttataccttccctgtcttcctgagagtcgccagcacagagttgagcaacaaagcaggttctcagtaaatggttgattgcatgattggcaaatgcctttgtgacacatcacagagcacggtggccatggtgaaaatttggcagctgtgactccttacttcctgctttaatcaacgtcatgggattgaaatgctggacacacagtaggtgctaaatagatttttatggattgattaaccactggagggactgtgccttatgtgggatttattaatgcttttgatgccaaataggggtggttttaatagagtataatgtgtttaaaaaaaaaaaaaaagaaaaaccagcaaacacaaaaccccaaccaggacagaggctggcagctgctctgtttacacccaccgtgctcctggaaacagatgtcctgtcaaacccgaaggtttctgatgaggcttccactcttccgagtgacctgagtgttcagtaatcaaagggacctgtgcccttctacattagtgctctctgttccatgactgatctccagttatgtgtctggggtaaagacttttgctgatgaaggcaaaaatcagcatctactgtatctactccaagggaaaagcactgggctaatgacaaaagaaactgcatttgtgtgtttggtggggtaaaaagaacagaggctttgggacaatcaggctgaaattccagcactgtcacttactgtgtgattgcaggttctcatctaccctctctggaactcagttttgggggctgataacaccaattccacaggttgctgtgaggattaacaagatatcatgggtagagttcttggtacagtgcctgacatatagtagccactgggtaaaggtccttttgttgtggctattatcataaacacagacaaggacagaagtccaccttggccactgtgggtttatgtggcaccccaggtgttcctgatgtgacttcctctggttcctccttgggtgatggtggcctttccagtacaagtccttgtctgattgactgcacagataatggtctatgatctgagcggggaatggatgtcctggagtgttccagtccacttccctatgcactatgagtccgctccttcactacccatctgcttggagtgtacacattagtcctgatcccagtgcccagattggggctcaggacagggagggttggcttttggagaacacaccaccaagtcaatcctgtgtttcatggagaaatctttgaccatggtgtaagaggtttctgggcacaacacacgagtcccatgaaccacacagagagatccatgccagtcatggggcccatcccatgggccacagagtagagcaaagaatgacccaaaaaagatcccagacaccagcaagatctacgtagagagagagagagaggagacccctgacacaatgcaaatccagtttatgttgccaagacactagatgcgctgggacagatcatgtgaacaacagcactctgaaatggaactcatatgcagaccagcgcagacccttcataaatggctgtgtccacactaaacagctcccagcagggcagagcatcaatgacgaggaagccttggataaaacgaggatgggtgaggacagggtagacaagcccactgggagtctaattcacacagcttttctcattctccctgacaagctggctcccctggtgagctgttaccaaacttcagccctgaagagtttgcggtgccccagaaccagcgcccttcgcaccaccatggcccgagtaggtcctcctctggataagacctcagcacagctctcttttctgatgctgccagcagggaaattgggagcatcctttctccttcatctggagaggtagctgaataaggattcttggagttcctattttcttctttcaactgaggatcattcaaaatcatctgtaagacactgtgagtgcctcacattgccagatcttaacctatcccagaccctgcaaaccttggccacatttctgtagtgcctacagctgtcacatagggcgctactccagaatacggctgggtggacttctgcatgttcacagtcagtgcatccgtggagattatctcagaggacagcttcctacagcgtggatgaacagacacacgcctgtggctttgttctccttctttttgcattgggttgacctgtgtatcaatttgaaatcccaagaaatccctcttttttccattttgctatctagtactcttctatcacttttcatataccatttgaaggacatagtactcaaaccaaagctatcgatcaccttcaggtgttgtctgaggacccttggggagcttttctccccctcccccccactcctgctccccttttcggcacctctgtcaccctctcttaaggtcacgccagttttcctggctgtcgtcctcatgaagggtggcttcctccctgaagtgctccgctctgtcccctcccttgagtcccgggcttcacacacacaaactctgttggatgttttttccaggaaatgcagttattctgacactagtgggccatttccccggcgtcctcattccatttctgacagtgctcctgctaccctcagtagattattattatttattatttatcagccacgacactgtactctgcttcctacaaaatattaaagaagacacaatccgtgcgctgagtttacagccaaggagagcagaggcctggatcagacatcacagggggggagctgagaagaaaatatttaccggctcagtcctccttggccctggtagatggaggcaaggactggcaaagccctccccaggccagctcctcccagctgggcccccacagccagctccccacactacctacagcaccccaactccaatttctagcaaggcctcaggcctcaggcctttacccgggggagcggagggagggtggaggatgaggattgggccctcaggcctttacattcagacaggggtggaggaggagggcaggtacagatatttcctctgaaactcaaaaccaggtaaaggggatgtaggggaggagggagaggtcggggaataaaaaccagattaggagagcggtcggggtggagaagactgtgcccagagtgaaatattctagcataatggaaaagccctcattgggggtcccacacgcctctggccaaatctcttctattagggttagaagttagggtctgtgtagacagcatgtgtagaccgagaggtggtgggactgagaagtcagtgtagacagtgtgagagagagcgagctgtggtgggggtgagtagtcggtatagacatcaaaggctggtcaggctgttaaacagagaaggcttcctggattcctaagggtcagtatgaacagaaaagtcgcgcgccccaggagaggcagggctgactcagaaggctggtggacactttgcagggctctccctggtccttcagaggtgtggacaattcctgctcctttccaaggctggagtgtcataaagagggcggaagctgaaagacgattggactttttccttctcaaacttttccgccagtttcctcaggtgttgagagcagacggggagctcgcctcagtcccgggcccccaaccctgggccagcaaggccaggaggccacggcggagcagcccgtgccacgcgccgtgcgtctgccgggcgcggccgcggagccaggcgagccgggggccaccgcggggggcgggggcggcggacggacggaccgacggacacacccgcgagcactccaacctcggacccggcgcgcggcagccgggaatccctcgggccggggaaactgcgcacggggcccggcctggccgggccgggccagagggccccgcctcccccacccgccacccccgcccactcgggcgcccgtgattggctccgcccgcccctggctgcgcgccgaagcccgcctccctcgcagctaaagcagacggtacccggagcggagcgagccagaagggagcatggtccccgcgccgcggccgcgccagcccccgcgccgccgccgccgtccccgccaccgcggatctcgccgcagctccagccccggccccggctccgcagcgcccgtccgcagccccggcggtcgccgcgcttgagcgcagcccccgcccggagcccgagccgcgagcccggagccagccccagccccgcggccgccgcggctgcggggagagggcgggggcgatgctgccggagccgccgccgccgccgccgccgcctcgatgagagccgcgccgcaccgctcatagccgcacaggctgacaggcaggaggaccgacttccctctcccgggcatcctccctgggctgccgggaggcggcggcggcggaggaggaggaggaacgaggggagaaggcggagagcaggaacgcgaggaggaggacctggatccgtttcctccggccaggacccgagcggccccagccaccgctacccgccggcgctgtccgctctccatcagccctcctgcgcccacccgcgaccccgggctctctgcgcgtcgggccggggccggagccgcgcggccggaggtaagagccgggccgggctggagcgcctcggatgcggcgccggagggagacccaggtcctggccgccgcgtggggccgggccgggccgggcgtgggagcggggccggaacccggaaccctgggctcggcttcggcggcggcggcggcgacaggagcctcccgcgtctggactcgcaggctgcaggagcccttgcgcctgcgctgctccagggggaaaaaaagggggggaaaaaacttcctgcccccgggtgtgtatgcaccggggctgcctggggccactgtcacggtgttcggaggtgctggaggckwgtgtgacccctggccggagcagcccccctgctgggcccggcggcgcgcgcccctctccaggccacgttcccctgagcggcccagggccccggccgggcaggagacctggaggcgacggagggctggcccccaggggcggccgcgcgcactgtcctttggggaggtgcgcgcctctgtgcagcgagaagccaggttggggttttctgcccctcgcgtcctctgatctcgcatttggggactgggtctctttactcaatcccaagtaactttcgaggtagatgagctcgaaaaccgtcgggagggaacccgcacagaccttattgtgacccaccccaccccgacacacacacgcacacttcccttgacaccttgtgggtgccagcgtgttgtggggggacgcggaaaggagagctcacggggacggcgaagcggccaggaggtggtgtcgttggggaggggttgttgatgtgtgggacagggtggacctggagatgtgtagtgtgggagtgtgaacgcgcgccccgatggcctcggggggccgggggagcccagggctcgcgtcccggtctccgtggcctggagcgggctgagagcgctagggttatctgcggtcgccgcgcgggtgcccgcgctgggcagcgtcggccccgggccccaagggagggacgtgctcgcctggggccggagcgcggggctgggagccggggtaggtcggaggtggctcttagggcaggtcgcctctgcgttgcctggggaaggcggggacgcgctgcctgcctgcggccagccgtctcggaggagggggtggcggccacgcgcgagtctcggatgcctgggtccacccgctgagaagccagttgtcgtccctgggctgtggaaccaagcggcagacgcggtccgttggcgggccctcgcgcgggcccccagagatgctgatgggtaaggagctgccgccgccgccgctgccatccccgccgctctgcaaacgttctcctccctccctcccgtgcttgcgccgcggcgcgccccgggcgaatcgtggacgcaggtatttatgtagcattaggcgagacctcggcgctggagggaccagaccgtggaggacgccgagctgctgctgcctgcgaaacttccacttcggcagctcagcggcatcccggcccgctgctgcaggttccagcctctctccagtccagcaacgctgggattcggactcctcttgcaatgacagatctgtcctggttacggctgtatttatactagtttcagtctctttaaagtcatctgtctagtcactacagagtttcttcctcgccgtgtggtcttatcactaactcagccctgggagggcagatttgaggaattgcttcattttcagatgaatgacagcagacttgtcccacctcattcctgatttatttattattattattattattattattattattattatggaaagaaggtatagagctttttaatttttttgtgagggaggagaatgaacaattttatagattgttctttccgacacttagagaaaacatgtccagtaagcactagtgaatactttaaaggctggttggcatgcgtgtatttgattagtccataatctaggtgtttatacaggtatggagctgtgtgctactgatgaatagtctccgtcccatacattgtgctggagtgcacttgatttatcaccctgctataaatcagggaattactagcacatgtgccttttaaactctatatgaatttaatggcatttaaattggtttatgggctgatgcatctaaccaattttaataacttttctgcacaaacatcttataaaccatatttgcctgtgattaagaaaaacattttcttctcctcggtctctcggttatggaaatttataggtctccaactttcatttgcaagcagcaatccaaacgaaatacctagagttttactgaaataaaatatcctatggtagccatggtaacaaatagattaagggttattggttttcatctgaatgtgatggggggtggggatctagtgttgtgtctttttaattatgtttctaatgagtggtggtcatacttcaagtactcagtgtgggagacaagcaagactgagaattcaggtttgtgggaggtttattgaaacaaagactagtagagcccaggagaatgacttttgctaactgcagctcctcatatctaggaacaaaatggataaaaaccttttttttgtttttccagtagatgagcattgagtcagtcactttaagaccggaaaatgcattttgcttataaactattaccaaaggaacctctaaatccagcctgttttctaggaataaacatgttggaagtgtggcggttggtgtggattgagtgtcaccgttgttatcaacacctgtcagtttaagtgaggcacatcattagtctattcaaatcttgcctatttcagtattcatgcatttccgtggtgatccattcatttttatttagtcaaccttataaatctttggcatcaattttagttgtgccatctttttccttcttttatcaattgatttggctacaaaccattcctagtttaaagtatctccttcttttttcctgctagtttctaaaagcctacactattcccagctacatacagatataaaggagttaattttttttcatcaactcaaatggcacccctaatactaatgtcattttttggcatctcatttgatatgtatgtgtacatgggttttttttttctttctttcagcaggcttactgtaaagctttctcactttttggctgggagacatcaattcagtccagcagaactaactaaagtttttccttccttcctcctttttgcttccttcctttttttctttctttcttcttcttttttttttttttttttttaaaatcccagtactgttatggcttaggcattctttgtgtcatcggttgtatctggcttggagagacttcgagactatattagagcaggtctgtcctggggtcttttctagtagtggtcaaagccagaagttttcagaacagcagaggattttccaaatacaatatatatttagtcacagcatatagtgcccctaggatcatagtaacattgtaagtccactgaacaggcagttttacttaaatgcgagtgatgattttgctcacccactttcaacttagctttctaatgatgcaatcccatgctaatcacaaccctgtatatttcagaaatatcaaggcaagcattagcacgctactgacttattaggatcaggcaaagtaattggaacacttaagttcaaagtcagatgaagaaatggaattataaccaactttgtgattctgtaatcagtcaactaagtgcctacttggggataggaggaggaagaaacatcatgaataagaaatccagccttagttgtgctgaatgaggataaaccaaggcagttactgtgtaagaggactggagaacaagaaatgtgttagtggatgggaggactgctggagcccaggaagttgaggctgcagtgaacagtgatcaygccactgtactgggcaacagagcaagacctagtctcagaaaaaaaaaaggggggggcggaatatatgtttaaacagataaatcatatgtttcccaggcctgtcttagcatctttcactgtgctagacacatatccacgcaaatgtytggaagctggtagaatatctgtagtttgtgtagaagatagtcagtttttatttcttaagtaatctggggtcatcgcctgatgtgctaaaaaattaggtagcataattcctggaatgtacttttgtctgaagtaaattttaccatagaaaatggtcttaattttggttaacaaggaaagatgtatccaaattctttacctgcaccttagatcaaaaatgctgagatcaggaccaccctgaaagcaaactctgtggttcttcctacaaccgccacaggcttacttctcccacagtaaatgcagcctgtactttcttcaaggaaaccacttgaaaacaggaaaactgaaactgccaattaagatgaggcaagttgatcactggaagtagcaacagagttctttgtgaaatcaattttatcgtttgggagcatttccacctttagggtagaaaggagaagagttctcattttctgtgcgagagggtatctgcatgaaattcaagtagttcagagactctcgactgtgcagctgcaaatgatgactcacaagctggaacaagaacggcgagcatggttgtaacggccggggatctagcgtgcgcaaagacgacagccgctaggccatttacaggctgccattggcctcacaggtgtctattgttatgatttgtaggtttttgacattttaaaatcactgatcattttaaggatatatgtatgtgtatatatatatttgtaaacagataatcacacatrtatatacacatacatatatatagttatatatacacaaatatatgttctgtcactttgtttaaaccatggtttaaaaacacataaaatttaccatctttacttttttttttttttttttttgagaaggagtttcactctgtcactcaggctggagtgcaatgacacaatcttggctcgctgcaacccctgcctcctgggttcatgagattctcctgcctcagcctccagagtagctgggattacaggcgcctgccaccacgcccagcaaatttttttgcatttttagtagagacggggtttcaccatgttggccaggctggtctcgaactcctgacctcaggtgatccacccgcctcagcttcccaaagtgctgggattacaggcatgagccacctttaccatttttaactgtgcattcgtagcattcacattgttgtgcaagcaagctccagaacccttcgtcttgcagaactgaaagtctatacccgttaaacatcatgtccccattcctacctccctcagcccctgscatccgccattctacttcctgtttatacattcaactaccttagatccctcaggtgagtggaatcatgccacattcatccttttgtgatgggcttgttaaacttagcataacgtcttccaggtttatcacatcttgtggcatgggacaggctttccttcctttttaaggttgaataatattgcattgcatgtatgggccacattttgtttgtccattcatctgttgatggagatttgggttgcttccatgttgtagctactgagaataacgctgctgtgaacaggagtataagacatcctgttttcagtgtttctgggtctatacccagaagtggaattgctgctattttgatgttttctttgttttgagacggggttttgatcttgttgcccaggctggagtgcaatggtgcagtcttggctcactgccacctctgcctcccgcgttcaagggttcaagcaattatcctgcctcagcctcctgagtagctgggattacaggcacgtgccactatacccggctgattttgtatttttagtggagatggggtttctccatgttggtcaggctggtctcgaactcccaacctcaggtaattcgcctgtctctgcctcccaaagttcactctgggattataggcattagccaccgcgcccagccctattttgacttttaacactaacaaattatgtaagttttcaattgaagagacttggtgagaatgcagtcacacagaatactgtccaataaagaatgcagtagatgttactgacatttgttcttccttttctgtgtatgcatttcctcccgagtgtctctgatctcatgctttccttgggggcttgtcctagttgcagtgatactgcagagggattagaaacatgggcttcctgtccacgttgaagtcccgtctccagtgcttcctagctgtgtgaccttggaaagatccttaatctcacccagcctcagttttcttttatgaaattggaagaagcagtagtggcyatctagggyggttgtgagggtgaaaacagataacctccataaacccacattacagtggcctggggaagtgctytgcaaagggggcttaggaaaagtagctgtggaagaagagacagcagcaacccctagagatctcagaaactgtagatgccaatcctgttcaatttcaatcataaatgttttagtcatacaccagggcatgtatatatattatgttctgtaagtctcactatcagtacttattctgaaaagcataagacatttgcatcacaattccaatagttaaaaatacccttgagttgatttgatgtgtgaacttttaattccatctttagtatcataattttagagttgatgtggatttttgaggtcagctaatctacctattattcaatcaccaaacctttattaagccccaataatataataataatagcttccagttatggctgctcactatatccgagtactttacatatattatctctaatcctcatatcaatgcttcraggtagggattatccacattttacaaatgaagatgaggctcagtggtaatcaactggcccaaggccacaaacctagccacgttgttcagctgggtttgaacacagatccctcagctaccagtctgtctgtgttttcctttctgcacacacacccctattcgtgtgtgcacatgcgcctatgtctttgttttttcccatgcatctgcaccacttcatactgcctgtaccaggtactgtgttgtctatactaattaacattttatgtaaaatcaatctagtagaaggaatgtgagctaaaataacaatattaatcaagtctgaccaacatgcatgataccttttggatttgcgcacctgcttccatttactgtggtttctggaaggctaatgagaaaaacttttaggtgtttgaatggcgtctgtttccatcttgagccagcatagtaaataaatagcaaatcaaagaataaaaacaatgtagaaagggttaaagattcatctagaaccactaatcgctgacccgggcttgttcatgtttgcataccgatgcatagcctggtgcctggcacaaaactctggtaaaaatgtttgcctggagaaggtgtcagataacagacatcaaagctgactttttggatgttcttttcactccgtggctgtgtagycacatgttcatggtttgtcattgtgtggaatttttgatgctatatttgggcatatatctattaaatatgcttattgatgaattgtaatctggatggaatcttctaggatttatgatttgagactttgaagactaattctctcttggagcttcatcgttgcagtgacaacctgggtctgtctggcgcttctgagcatccgtgccgtctgtcctctctcaggggctttccttgtgggttgttgtctctgctcagatttcaaaatttgtagtagttcacaaaagcatcgttttaaggaaaaaatgaaacacctggaaatcacagaggcactttgggaagggcgataacactgtattttccaacttcttctgttctatttttattctttatattagttttttctcgagatgggtgtgaatagagcctggagcacacaccacaaaaatgtgtttgctctgttttaactctttcaacctacattcagccaaggagggacttcttcagtttgagattctccttgagaaagacgtggttgcagtgcctgggatctggaccacacaggaggtttggggtgtggggaggctggccccacctgactgctggcccggcactggcacggtcactcctgtgtagctctgctgccgcccctcccttccccctgggcttgtctctaccctagaagtaatgtcaagcatgaggcttcctcttcttgaggcttccccacaaagctcctagaagcaagttggaggtgtgggcggtgagggaagagcagacaagaggactctgtgtctctgttttgtgcaaagcatacgccaaaggcttagatcaaattaaagacccaacagcggccggaacatccctgctttccttttggtcatttagtaacactgagaagtggtgaagagcggtgaaattgggattaaaaacaaaaaacaaaaacaatcttccctttctcctttaccttcacttttcacgtcttccagctttaagcatctgcttctggatcaaacctgcagctaagcttagcctcccagggaactttaaggatatatattcagctcctggagcttctaaatgagggtagattgaataactgtttactgagaaggcacagtgggaagagcactgcctttcctgtggcatctcatttttgctcaccctgtcgcatgggtgacttcacagtggtggtattgctattctgcagctgatttagagagatccaagcatttgcccaagttcagatcaacaaacgtgggtgccaggcctatgatgggtgccggatgggttacagggaggaaggatcctgtcctccagacacctgcctacctatggagaaggaagagagccaatattcccttttctaggaaatataaattgcttatttgaataaaaaaatcatatgtttagccacattgctcactgattatcacagttgacatagtaagttgaggtccagctaattttcttttaaagtgtgaaataaatttaaagagactcaccagtatgatttcaagtaccttcagacttaaatgtgctggcctcatctttgcaaatggaacaaaaattcaattctgaatttgcctgcaaggcttaggtgtatctgactcctttctttgtggtcagaaggcttcctggggtgtgctgatttggatctacgaagattaaatacttgaggattaaatgagttcctgtttgcaaagtgcttagaactgtgctgacatatgccaaatcggtaacatcaatggttatttctggactcgtcttggggatcatggtccttgaaggcaaggactttgtcttttagccttccttggtcctggcacaggctggatattcgttgttcaaatactgtgagctcaatgaattgtgttgaggtgacagaggaaggagacagggcaccacatctcaccaggaagtccatggaaatgagtggtccagtccaggaatttcccgagaaattctgtgagacagtccagagcagagagaaccaagttgtgaatgctgctgtggccgtgacccatgggtccactgggttctgcctaaccacctacattggccgctgctgctattgatttgtctctccrtcacagtagagaggggtagaaaatggtgctactccagttaaggtcacagataggtgtctgtttccacactgttcccagtgtgtgccgagataaattgggaataagcatttagaaactacgattgcaggccaggcatggtggctcacgcctgtgatcccagcactttgggaggccgaggygggcggatcatgaagtcaggagtttgagaccagcctcatcaacatggtgaaacccggtctctaccaaagctacaaaaattagccaggcgtggtggcatgcgcctgtaatcccagctactcaggaggctgagacaggagaatcgcttgaaccagggaggcagaggttgcagtgagctgagatcgcaacactgcactgtagcctgggtgacagagtgagactccgtctcaaaaaaggaaagaaaaaaaaaaaaaagaaactccgattgcattcaacactgccttggcagcatgatccgtgggctcccctcattaactaggtacagaccagtttgcatggtcttggactctcatggtgagttaccaggagagccgcctatggtgtgagtgtgagctaatcatgcaaggtaggaccacattttcgttcctgacagattggtgatgtaaacaaaaacccaaaacctgattcttcaccgcaggtaggcgtagagaactgcctggaagaaacctagctgcagttgtcttgccaaagcaagacatgtcccgtgatkttataacaattgggtctagaatccctcatcagtgagaccaatattgccacctttaggttaacaagtgggctgaattctgtccaacccagtggtgctcatattagcaggggcagcagcctggtctgtcctgcctggaactcaactgccattgttggtggccataaggagggctgcatcccctgcgtttaggtgcctccccagtcggtctccctgatgctgagtgagagcctcaggatcttggcttgggaccctcgtagccacccacatacatcctgaggccaatttgttgcaatgctgccctgttttgacctcttgagatttgggtagcctattttgccattgaattagcttatttgttttgggtaagttattttgccattgacttagcttatttagccaatgggaagacatataagatgacctagccctggcttttcaaamcaaaattaagggccgtggagtttgggaaaggtgcatacctcatttggaagctgggctggttggaccaggaggctgcgtgcagtgcgcttgtcaggccgatccttctagaggagagcctgctgtaatctcttcggttcatgctgttccaaccagctttaatcatcaaaaccagtgctaatcatcaaaacttgaataatatacagactgcgaaaggaacatatttcttgccgaagcctcgatttgccaaagggaagcacctaagcttccccatctacccatctatggcaacatgttgtaaaaataagaagcacctggatggcttcatatgatgtggggaaactgcctttttctacgatgattctcagttttaaaatttcctctctttcccccaagaggagaaaaatgattttcatggaaagcgtgtttcagggaagtcgcttttttttctctgtataaggtcaccacctcacttgtgaccttgagggaggcttcctccctggccccaggtgtctgacaaggtctgctctagtggmccctgggtagaggtctggcagtgcgggggaaggtaggggaggatttgtgctctgagacctggaaggtacctgtgactgggacagagggaaggtcgcaggcagcygtggagaacctcgtcaggagagcagctcctgctgctgccttgatgggataaaggcacacaaacggccctcctgtggcaggggctccagccccagttctagatgagggctgtagtgatggcccctggcccttgcccctccccacaggctctccctcacatcactgagtgagcagggcttttcagagctacggccctgctcaggttttaaaatttaaagcttgattctgcagayaccacaataatgcgtttttgttaaggaggacctctgggggaggcagcaggggtggggtggtcactcactgactgtgaagtcacaatttgacagctgtaacwgtctgctgtttttattcctggtataccttcccgaatgcctggtctccggaaacattttttgatagctcaaatagacacctgggccaagtatagtctccttggtcccaggaaaatgggaggcagttgcccatcaggcccttattcctgtgctgggtgtgaccagtgctgagatggggttgggtggaggatgtgagacactgctgcctgggaactgagcatgcggcagtgaggagggtggggcttggctgtcaggccagcacagtggcaattaaaacgtgctttcaactcaacaaacaaacacctccattaaaaaatgggcaaaggacttgaatagacacctctccagagaaggtataccaatggccaataaggacacaaaaagatgctccacatcactaatcattggggaaatggaagtcaaaaccacaataagataccacttcacgtccattaacgtgactataaacaacaacagaaaataacaagtgttggtgaggatgtggagaaactgcaacccttatgcactgctcatgaaaatgcaaattgtgcaaccgctatggaaaacattatggccattcttcaaaaaattaaacatagaattatcatctgatccagcaattctgcttctgagcctatacccaaaaaaagtgaaagctgggacccaaacagatgttcatacactagtgttgctcatagcaaccacattcacaatagccaaaaggtagaagcaacccaagtgtccgtcagtgatgaatgaataaacaaaatacactagayacatacaatggaagatgattcagccttaaaaaggaaggaacttttgacacacgctatagcgtggatgaaccttgaagacgttatactaagtgaaataagccagtcacgaaaggaccattactggaggattccacttatatgaggtacctagagtagtatggattggattcacagacagaggtagaatggtagttgccaggggatgtggggagagagttatcgtttaatgcgcaaagagtttcagtttaagaaaatgaaatgctctggagatagatggtggagaaggtwgcaaaacaatatgcatgtaggttttgcagatgctgctgccgctgctgggatccccatmctgtcagccgtggtcaaccctgccgtgttcttcgacatcgctgtcgatagygagcccttgggccatgtctctttctagctgttttcagagaaggttccaaagacagcagaaaactttcatgctctgaactttcatgctttcatggagagaacggatttggttataagggttcctgctttcacagaaatattccagggttttatgtgtcagggtggtgacttcacataccataatgacactggtggcaagtccatctacagggagaaatttgatgatgagaacttcatcctaaagcatacaggccytggcatcttgtctatggcaaatgctggacccaacatgaatggctcccagtttttcatctgcactgccaagactgagtggttggatggcaagcatgtagtatttggcaaggtgaaagaaggcatgaagattatggaggccatggagcgctttgggtccaggagtggcaagactagcaagaagatcaccattgctgactgtggacarctccaataaattagacttgtgttttatcttcaccactcagccattcctttatagttcaggagagcatgcctgctccccatttgctcacagtatcctagaatctttgtgctgtcactgcatttccctttgggttccatgttttccttgttcccttccatgcctagctggattgcagagttaaatttatgattatgaaataaaaactaaatagcaaaatagtgygcatgcacttaatgccactgaactgtacatttaaaaatgattaaaatggtaaatgttatggcatgtatgtttcatcacaataaaaaaatagatttccaaacatattccaaagtgattctcctagtaaattctttttaaaattcacctaggaaaaaaatgtgttttacaatttagcaactcttctagggcacttgccrtgttacccgctctgtgctgagcattgcattgcgtttatttattattattttatttgaggtgtgatcgttgagaagcaatacaatgaaatctacagcctcaagtgttcagttcactgagtttcaataattgtgaacctgtgtaactgcatgatgracctgtgtaactttcatcaccccagaaagttccctcctgccctcttctggtcaacccccatcttctttccaaccactttctgatgtcagtcatcatgggtttatgcctgttctcgatgttcttgtagacagaaactcacagtgtrcactcttgtgtgccctgctggtcttgctcagcctgccgtctgctgttgacctgtgctgatgcgtgtccctggagttaactctactgctaactagtactccatcccatacagtttgtgcatccattctcctgtgggtggacattgagatggcactgtggtttggagaccgctgacagtgagtgaagatgtcagctgaccactggggagtgtccyggcagagtgagcttgccacacttcaagttttcggtgctgggggttttgcttttttggtgactcagcactagggacaggaagtggacagatggccttaacaggttgacgtccctgagctgtgatagctgccacacccttccccagctccgacggccacctgcagatgtgatcagatacccaagggggctagggtggaggtggaggagtagagcggcccctgccccaggcagggtttgggtggcctgtccccagcttggcctcttcctttctggattgaagccttgaggctggttgagatgctctttagccacattaaagccattagtctgggactgaagcaccacagcttttccatctttccagtgacttggytctctctgctgtgacccattcttgggtgagtttgtagcctctgagtccaacactgaggtcagtgtctcctcatttccccaatgctgggcagtatcttatctcatgacatggtgaggcctaatgcagagccatgcagctgggcaccgtggctcacacctgtaatcctagcactttgggaggccaaggtrggagcgttgcttgaaaccaggagttaataaaggtcaacttgggaaatataatagtgagaccccatctctacaaaaaaaaaaaatgttaaattagccagatgtagtggtacacgcctatagtcccagctacttgggaggcaggggcagaaggattaacctcctggttaagggtgcaatgagccaagattgcaccactgcgctccagcctgagtgctatagcaagatcttgtctctaagtggtatgggagggggaaagctacacctttgttgcaaatagatctgggctcaaacactagctggctacctggacatgatgcaatcataggcaagttaatctcttggagcgtagctacctcatatgatagcatcaagaatacctttgttgtcccatgtctgccttcataggcctgttggaggtgggagggtaattcctgccttccagtaacatggacaaatttatccgtgtgaaagccagtttcacctgaggtcagtttcctctgctgccccgtttctgggcagtayctcatgtcatgacatagataatgcaagttgagagtgtgtgggtgacaacttcaactgttgctctacagtagagacctgtggagacaggacagactgatcagggtgggctgtggtcactggggaacctcatgaagcagacagaatttgggggccctccaagagaaaaagtatttatgccggtttccctctctccattcagaaaccgtactctatacacccccggtccccaccctaagtccaccaggtcactgacagctaacaattgaccytcacctgggagaggtaagcttgcaaggcccagcttggacatgcacctgtgatttctaaaggacttcttctgaattcatctctgaatgaggttggcggcactgctatggtgtctgagcctatacaggagccgagggctatgtagtcatcagagcctcagtttagaggctcacatgacagagacatggagtgtggagcccatctcagcaagtcagggcctgacgcgttatgcccgctcacatgtaggcacaggagacctgggacagaggaagcgatctgctcctgcctgaagtagtgggaggggcaggaaggtgcattgctgagcagagggactatctgctggtccaaggagcctctgtccggctggactgaggctaccctcagcttccatctctcctcttcattctctagaaggctctgccaggttcagatcctgcctgtcctttgcagctttgtagggagcagtccccacatctctgaggattgcctgatgcargttctcgaggtaactgcttcagggctgcgtgggagtccccagctgacttgaccatgtgctcctgtggaaaatgatcacctcaccttttatttatattctgttgttgattttcctctaaggatctaggccagtgctgggcacattttgcactttcaacagtcgaggggcagaaaaagagaattaccatacctgaggcttgccagtcaggggcagagccagaactggaatcccagcagcccagacgtgggaagagcatcgaggaccggcaggaggaggggatgggagggccgtctgggtgaggggtcatctaagagcccagtgctgtttcacactgtcccgggtggaaaatgcraaccctgtggattttcaccctctcagtgttgactattgtcctatggaaataagggtgatttcctaaaatgtgtggctcaataaaggattccttcaccggggtgtgaaatgactgtgcatctgaatctgagccagaaaagataaactttgctccattttcccacacaccggattagaatctttccaggacactaacctagtgtgtgcttatctaggtccttgggcctaggggcccctggtgaaagcccaggccatgcaatccgagtcccagcgcccccatccttccccctctctcccgtgggtttgtatctccctggcatcccccagcagactgctctgcccagctgtgaactgaacagcctggcttgtcttggggcagaacctgtcctcacaggtgtgtttgggcactgcaggagggttggggaaaagtggtgtaaataaccctccttgcctttctgctgatgagaaaaccatgggaaaaatataaaacatttctatggatattgagaacaaagtttcttcagtgatttcactgtaagtttggttatttgagagaatagtttttaattaataaggaaacttaattaatacatgtgtgtccctgatttcttatatatgtgtgtgtatatatatgtacatatacatatgtatccctgatttctttaaatctatgtatgtgtatatatcttatatatcatatataatcttatatgtgtatgkatatatatcttatatgtatatatacatatagttttcactgtagacgtactatactatatatatagtgtacactataatgtcaagtatatgaaaacaaagaacatagataaaaaggctgaaaatgtgccataatattaacagtggtcatctttctaccataacattttctggtttttaaaataataagcgtatttttcatattgggaaagataaaaatttacctaacaaggcaaaagaattaactatcataggaaagttaattttgccatgcccgtccccatcccatagtgagcagtatgtgtttacgtccatgctgacattaagactgatgaaaacagaaaaaggacaggccgccatgtagaagaaatttttaaactaccagtttttaaaatgggaaaggaaccaaatggttttgtataatcccatataaaaatgtccctcataatgaatctcagactcaccttaaaggaataattctcaggattctcttccatgctggggctccagtaagagtcaagatttggggctttcttaaagcaggcttcaaaccttaaaagcataccttattgaatgccagtgccagcattctcaaataactgtgcccccaagtggtcacatgtacctgtaaattacatgcagcaaaaaggtgcaattaaccaggtcctggactgcagagtttgcaatttattaataataatgatgatgaaaacaataatacatccaaaagagaaaagaaaggggaagatgaaacccaaagagagagagagagwgwgwgtgtgtgtgtgtgtgtgtgtgtgtgtgtgtgtgtgtgtgcaggcgcaaaagacagggaagaattttctcagtgtttatttttgccatgcctctcccaraaaaagagcgtgtgtgcgtgtgtgtgcatatgtgtttgcatttgaggagggaggcctggccagaagaggtggggggtagctgtgggcagagccctcccaagaattctggagactttgcatcctttctcaggagcaatcctcgatgcctttgactgcctacttctctgcagcggtggttccatgatagtctccttggcagcctgccagaggctgtaagtgtacagagaattgtgttttaatagaaggctttacctctgatacagatttaaaatgaggaagaaactttctgttcctcagccagaacgaaatgcgttttgcttcctgtgaaatgctggtgattacaagctcatcttacataattttattattttcaattgctgcccgtcaatctcaggtgatggttccctgggagcagaaaaagaggcagattctgggcgatgactattaaaaaaaaaaatcactcagtcattagcaaatcgtacaaaartttagaaaggagaataattatctttgtgatgatgctgtttaagataatcagaacttgcattgctaagttagacacgccgaagtgaattgaggactgtttaatggcctcttagaaaatgtatttttgctttaacaaagcattgatgtttgagatttaaaaaaaagaaatcctttaaatctcgtgaaggaattctctggaataaccacattttcagaaatccgtgacatgatcgaggtggtccactgtcacgcccacaagagggcattttctcatcaactactgtaaaaacgatttgttttctaaagggaagctgagaggcctgggggaaggagagtgttctgcagagcaggaagtggagagctgcttgcaattgagttgtatgtatgcttccacttaatacgtcctgccgagcctgtaagccaacacttccggccaggaatctgccctctgtgtttacctactctctttttatgtcttattcccagaatgactggggaccaaaggaatcctttgcaggagttttctccagacagacagttccacatgctagtatattgtcgaccccatccataacttccatgaaacttgaatctcatattttaagacaccttctctaggtccaagttctttcctttatgtatgttacacatatttgttgagtacctactgtgtgtcagcttgagccagactcagatcctgtcctcgtggaacacacatcctccacaggaagacttggcataaaaaaggagaacaaatactggagtatgatttagataattataaatgttataaggaaaaataactgggataaggaaaggtagctattttaattggataattaggcatacttctctcatgcataacaaatattctaattttgttcaatccataccaatattgtttggattataaaggtaatacctttttttcaactccattttttctaaaaaagttagttatattgtttattattttacggaccatgaaacatgatggaaaccggggaattgagatgtggccagttgttagtttgtaaaatgacatttaaaaattaccatctactcatcacctcatcatttgacaaaacaatgcatgttttaacaccaaaaagtaggaaagatgtaatcccwgaatagagggcagttgaatacgtttagtgttttggaaaatttgctgcattatctgaggttttctccttttccatggcctatgagaacttcatcagggactggttctggtcaggggctggcatccagttccacagatcctgctgatgacattgtccatgccttccccaaccatgaggaccaacaatgttggcaccagttctgcaagctcagctcccaaccacaacacacaagactcgagcaggagatggtttgctccccatcctaggggttctaggatacttggtaaggagctcagcccaagagctacaatgccgttgtgagagtttctgaagccaggagtcaaggctttactttgagcacatggttttggaggtcaagcagaatgggctgggcaaatccaggaaggcttcatgggggaartgaattttgaacttggccttaaaggatgggtaggtgtaaggaagagggttgtaggattatagtgggtgatatacacatttttgaaagttaatgtggaacaggttttggtagtaaaaggcaacatccattgtgtaaaatgttcaggtataacaacaaagtaataatctctaataaatatattgtctaggctgagcgtggtggctcacgcctgtactcctaccactttgggaggccaaggcaggcggatcatttgaggtcagaagttcgataccagcctgaccaacatgatgaaaccccgtctctactaaaatacaaaaattaatcgggcatggtggcgggcacctgtgatctcagctactcgggaggctgaggcaggagaatcacttgaacccaggaggcagaggttgcagtgagccaagatcacaccactgcactccagcctgggcgacaaagcaagactccatctcaaaaaaaaaaaaaaaaaaaagaaaacacacatattatctagagatgattgttaatattttatcatattgtcctccagtcttttgctttgcattttcacattagttgggaccatgttgcacatgaaattttgcatcttgcttttttactttagtatacaacacacattgcctcatgtaattgaaaattabtcttaaacatcacttccggatggcttcatttatcccatcctgcctgcatgccattcccatcagatgtattttttttcctactgtaactctctggtggatagttctttttatatcattttggttcacaatttcggtatcacacacatctgccaaggtccagctctgagggtaatattgagcctgtcacaatatccaccctggtctctatctgtgcatgtcaagtgaagataatataccaacctcatggggtagatatgagacttatgtgagatcatgtttgcatagagttctagaaatagaattaccaaggtttgatctctttaaaattatgtaacttttcaattataaaagtaatgttctttatggaaaattttaacaaaagaaaaaccatgcaaatttcatcacccagagataaaaaaacaattaacattttagaatctattatttgtcactttgtagcagaattgggatcgtactatatatatcattttctttcctgctttttttcctcttaaccttgcattgcttctcccttgtcattattcatttggaaacaatcttaaaagaccatgtttcattatattctgttatattaatgtgtcttatttaactgtttcctttttgccatttagataattcagtaatttgctactataaataacgttgcaatgaaatactgatgaacaaatctgtggacattttgggttacttctttaggattaattcctggaactgtatttaccaagtcagaggtggagcagcatgtgaatactcactttaccctattctatcctattataatttttttttaatcttagtctgttaggtaggtgagtaatggtatctcgtggtctcggttgcgtttccttgattaccagtgggttggagcatttgtttctgtgtattgaygtacctgtcctctgtttgtccttctatttatattcatcttttttcttattgatttttaagagctctttatgcataagaggatattaaccttttggtataatgttggaaatattttttcagtttgtcatttgaattctaaattcatttatggtttctcggttgtatagatgcctttactttgcttatacgaatcatcaacgtttttgttgttcagtgtttcctcttgtttttaggcttagaaagcccttccccatcctggctttggatatctgcgcagttgcattttcttctaattgttttgcaattcattttgcaaattcaactttttatcaggttttctcattttgctataaaatatgatcggaatttaactttttcttaatagtcatttaattcttccatttgcgtttagtgaatgatctttctgtcctccctgatttgaaatgctacctctcatacattaaattctttgttgggttttttgttgttgttgttgttgttgttttgagacggagtttcttgtcatccaggctggagtgcattggtgcgatcttgactcactgcaactccacctcccggttcaagtgattctcctgcctcggcctcctgataacattaaattcttgtatagactagagggtgtttccaggctgtttattctgtttcattcaaacttagttctataccacactgtttcaaatgctgaagttttcattttgtgttttaaaatctggtagtacaaatcatcttcattattattatttcccaaaatatttttggctactatgtctgacatatcttgtatagcccagaggaaatttagaagcatttcacgctaaaaaaaaaaaaaaaaaaaaaaaaaaaaaaaaaaaattgagttttttttttacrtgatagccatatgaattcgatgagatccgtaaattgatttataaagaattgacatttggactacattattgagtcttctcattcaggaatgtgctattccatttactcttgctctctctgtgtttatttgagtttacttccatatctctctgtaaacatttgtggctttcttcatgtgagctctgtgctgctcttagaaacttcattcctatatgttacatatacatagagtgagatcgttctgtcccaacatatttgctaatgagttattactggcaaataaaaaagctgttaatgtttgtacattgattttgtatcttgctgggttactgaactttctgatggatggaactctttttaaggccttcaaacatgttgaatattgtactaaaagattgtctgtatacccagggatgtctgggagagcttgtattatcatttttaagaagcttttctaatttgaaggaaaacggcctctcgttgtgtcttcacwttgaagtttctttgtgactctaatcccgagtcctggtagcatcatgtatttggggcatacggtgttcgtgtgcaataatccctccttgtaggcctcccctgaagcaacagacaaccatgacagctctgatgagcacctttcagataggagtttggggttcacagctctgccttgttggggggtgtgtgaggggctaatcataaagaataatttgggagctagttctggacacacgttcccagactgattgggtagagcctgttgttgttgagcttgggtttaaattcattcacagccagacaaacgtgagtatgaagaaccagtcagacatcactttccccattggtgatccctgaaggactttccattcgcagcacaaagataaccccttgaagagagcaaaraagaagagaaaggctgaccagaaatatgaccgtaatatctaggcacttcactctccgcagctgtactgagctcacattatattgtcatcttctccagattaaggccttctatcagttatgggaaaggcaaggatttctcctaccctgattcttcctagcatatggctggaggtgggggcggaatctccccacatccccacacagacggcttgtgaatgttctgatggtgtgcgtttcctccgttggacgaacaactcatcttttactctttgctttttatgccagtttgggaaggttgtttttctcccacttgaaaatcttcctcggaaggaatatgttgccatcagcaattcctctgtgttgtaactatctcctatgaagccagactgtaaggcagtgcgtcttccctcaatagaacccaagcccattcttcatggttcagcaaatctctgagtgccttctgcgtgccaggcactgtgcttggtgttggaactcgacagggagcaaaaccatgcctggttctttccctcaaggagtttacagtctagtsggggagacagatgtttatcagatagtgcaaaaggcaataaacactatgaaggaagatggtcagtgccattacagggagctccgcctcttcttggattcagggagtagggggaactgatctgagatttaaagaaatgataagcttagcatttaaagggagggtgagctggggaaggagcagggatgatgcattccaggcagaggagatacatgtgcaggagagagtatggtgccttcaaggagatgcgaaaaggtcagagaaactggcattaagaaaccagaggggagcatggcacaggcggagagtggagaattaggagggagaggccatgcagggtttgtctagccgcataagtatgctgtgtctttattgcaagagcactgactggctgactgtttttaagcaagggaatggcattctgcaaagacagccctggctaccatgtggtaagccactgtgaaacactaaggaagaagaaatggggtacagttaggagaggactgcgggagtccaggagagagttgaggggatggtgcatgtggagacaggtaaatgggcaggctggggtggggggttcgagggtgggaagtaaaggagagggatgtctcaaggtgacccctagattactggatggatgtggtgctgtgctgggcactgggaacagtggaaggggtcaggtatattggagaaaactgagctttgtttaggactgggtgtgaggactcctgaggcatggcagtggtggcagataggcagttatgtgtgtgggtctggctttcactcacaggagacatcagggccagagacagaaatttcgaggaatcatccacataagattctgagagaagaatcttagtagtaagggtcaagctgttggtccgcagtcctcttcagacctcttgctgctgctgctgcttgtgacgacactctgrcttccaaagacagtacttcccaggtgtggaggagggcattgcatttcctgtgtatcctccaccatgtgctggctgagtcaagaatggaggtaataaaagagacgtaaacacgggaaaccacacgtctaaagcgtcccatctgtaaactcttgcttactctccagactcacaggccccatccttcagagtgagtctcttgagtacagagatggaacttggaagtctctcctgctccctccctcctctgaccagagccttcccttcctcccccagcccctcatttctgaacaatgagccttcaaataccttgccccttaaattacgtgcttaaatttaagatcatttatctaattattcatgtaataaatgtttattaagcacctgctctgtgccaggcacagtggcatggataaagatggtggaggcacaagatggggttataatgtcgatatgacaaatgttgaaatatagggatgtccaaatctcctgtgaggccaggtgagggaggggcagttcaagggagtgagagaaggcctagggatttgtgacatgtagcaaaggttgaggacagggtagtgagaacatttggggcagaataaacagatgtgtcagaggaagtgttgtgggaatgtgaagtagtttccatgcctggagtatattgggtatgtatgttgcaaaaattgtgtgtgtgtgtgtgtgtgtgtgtgtgtgtgtgtgtgtgtgtgtgtgtggtcraggtaggatggaagggygaggtaatgggtcatgggggtagagagagggagatgggttatgacctctaagctgccaaggtaggtaacatccaaataaggcaggacctcgagaagagagttgtgaggtcggccagatttccttctgttgtgtgtgtgccgcaagagttttctcagcctcatccattcccgctgtcgggagatgagacaaaaatatccttattcttcttgcattgggaaatgcaagcttgcactggaatcttaacaggtactgctggttctgccttctccacttcccagatgtgggcatggcagctcccagcatcagtagcattgaaarattggttctgagggtctcctcgggctcttttggcagagtggagataagtttctaatctgagtcacttagggttctttgcatgggcccagtctaataactaaaagctctctggaggagccagaattttcgtcatggatgttttctgactcatgttgtcattggaatgacttttagttcctttgggcatgtctgacttctacgcttcttaggaaatgtagcaaaggttgagaaaagggtggtgagagcatttggggcagaagaaacagatgtgtcagaggaagtgttgtgggaatgtgaggtggtttccatgcttggagtatgtcgggtatgtatgttgcaaaaatgtgtgtgcgtgaaggsgggggggggcggtgcggtagaggtaggatggaagggccatctctgacctgagaccactgggctggacagttccagggttggggtgctgtgggcttgtcgagtggccagatcacgcctaatatctgctcagggtgtgtcaatggttgaggaatttcagagaactaatacaaacaagttcatgccattgctctgaattcaggccccagcagtgtttatgattgcttgaccaagccctcaccagctctttctggaawactcagtccagtgagaagtgggcactgggggacagagaaggaagaggagagaatcatgagccatgctggatatgcaggtgggctgcaggrctcaaacttgaaccagtgcatctaaatgggccaatggtgccttgtggactgaatgttctccaaggcttaggaggggtgggaggaccccaggaccactaccttgagggaaggagagagcctgggaccgctggagctggggacagagctrtgagaaccagagggagtggagattactgtggacaagaagcatcttggaaggtctttcaagcacctgggcctggacaaaaaagttccacaggggtcaaaggcaacactgcggaaatcctctgacagactgggtgtagctggccagggtggtccacgggatgctatgaggaccacttgtctcctccgcaagaagctcgcaaaatgggaaatggcaggtgtcggccttggagggagatggctggttcagcagcrcaggcatccttctccctctgcttctgtttgactgcttccaagtcacctttcatgttgtaaaccactgcttgtcactttgccaaattcctatgctcttacttaagtgtgattcaagcactagatgtttttgacatttgaagattacttggttctttgggcaattttctcgtttgccttcaaaaaaatgcctgcagttctctatttcatcyggtggaaaggtgaggcccaggatgcatgtaatgaactgatggcactgtgaggcactgggcccggtgaactcgcagggtgtagctgagatacaaggtgttttctactaaaaggatcaaggcagctcctcgacctcacattggggatcatttgtactgaagataattcttcagcggagtygtgctggcactgagttagccagatgagctgatctccatgctgaagccaaccatggggccagccatttccatcctgactgcccacatgctgtgtgatccattttctttgtggcagagggctggtcactgcagacccatggacacgggtgtcaccatatggtcactccagacatggacgtgggtttcataatatcatcctttctactccactgagccaggactgccatcaccgggcagaggttaattgaaaattcatgtaactatccgctcatttattaagacccacctccttttcttccctctcccratgcctctctaatgccaaaatgagtctccacccctggggagagacgggagaaagaacaacctgctccccaccttgaaagaaaccattgacttcatggaaaaaaccacagattcatggccctgcagtgtttgtcttggaatgtttgttcattttcccatttgttccctttgtaagctgtgcatctgtccccaccaagcccggtgctctgaaggtggcatcgatggccctgagtttgtccctagctcccgcccttcctttgtaatgtgtcccttcttcccccacgggtgyggtgggaggcccgtgcaccctgctgtggggtaaggtggcatcaggcacagagagagtgacccggggttgtctttggtcactcacaaggtaatttcacttggcaaatgattggaaaagaggctgctgttctcacagacgtctgtgaaccccatgcctgagcttcttagccctcctagctgtgctgttccccagatggagtccattccattaaaggactggaaaacagaactcttgaagacaggataaaggattagggataatttcatttcagaagaaagaggctgaggagggacttaattgtctttgaaggatcctcctgtggaggacagagatgagttgttctccatctcactgagcsagagsagacaaagtggatctcaaatgaatgtgcaaagcttcctgtgagctggggccggccccctgcagggaaggttcagggagactgggcagacagagtgggtggcactaggggctgtgggggccgcgcagacggatgtgtttgtgcggcggggtgggagggatgctgtgggagaaagagatgtctccatcccgtctcagaaaggaaattgttaaaagcaagaaattaacagacagtgagtaggagagacccccagtggcaggggaagcaggtgtggagtgggttcaggctggctgggtcctgcagactgggtggaaagcatgtcagctgaagtacagaggtcacacagggagagcaggaggggcccatggggctggagagctcaatttgagcctctttcccccaaaggtatggggacccactggagatccttcagccagggagtgacccatgatggggcttctcattctggtgtgttatcccttgacaatgggggaagccacatagcatagccccaaatgcccgtctacagatccttgccggtctcagactggtctgcagcaaacagaggaaaatactgacaccatgcagtgagtttttcatagaactaaatgcattgcatttaaagtgctgtccttattctgagactgtgttctatcatccaagattctttgtagcaagcaacagaaaccaatcctgggtaattgaaacagaaaaggaatttattaaaaggatattagtcagcccagagtctccagggtagttggagaaccaggctcagaggccacatggccaggaatgacaacagtcatacccagatcaggccccacaaggccccacagctgccctgctggtcagacctccagttggtccagaacagcaccaccaagcttccaaaagtgggtgctgcaaatgctgcagttctgcgctctccccactcctatgggtcaccagtttctgatataaagtgtgtgtcggtgcgtcctgttggtggagcaagggaggtaagtgaatttgccattttcagcttctataatgcaagacgggcttagcttccacagcaaggcaggggcttagctgtgtcttagcttcctagacacaaggcaggggctcaggtgctgagaacctgcccaggaaggaaaggtgtttcttctctgtctctttgagtgtctgtgcatgtgtgaattttaaaaacgttctttcttttgtgaagcgaaggtgattaggttgtttgatgtttaaagcattattgttacttggcagaatatgaagttggaaagctattatttgttcccacaagttttggaggtttagtagtccatgaaatccaaaagactakgactttagtgccagacaggctgggcctcaatcccagagctgccccttactaatcaagtagctttgcatgaaggtttctgaggtcctgttttgttgttgttgttttttaaatccccttagtctgtttatgtatccttagatctaaaggtagtctttttatttttttttttgacatagactctcactctgttgcccaggctaaaatgcagtggcacgatcacagctcactgcagccttaacctcctgggctcaggcgatcctcacaccttagcctcctgtatagctgggaccacaggtgtgcaccaccacaccctgtatatattttttaatttttttgtaaaagatagtaatactcactgctcagagttgcagtgagcagtgaataagaagacatgggtgaagtgtgtaatcaatagctgataagaaattggtgacactattgggttgaggggtcgacattgatcaaaacaactttctagaggcagatcctaaatcatgcagagtggcttagaatctgttcttgtgcctgctggagttacaccttcatggcaacaagcacctgagggcacagtgataacatcccgagagcctggggagtcttgtgtatttcttctctgctaacacttgtatgctggaaagaagctgttgtattctgaaacactgatgcatcccaagttcagaagccctgacctcacagagctccacttctagaaaaacacctagggtaatccaagccccgccctctgatgggactggatgtcttgcagctgcggtttggtgggcattttccctctttgtctccctccctcctctctcagaatggacaggacaggctgtgttgtcctctgcaggtccatgcctcagtttcttcatctagcaaaaggcaagtgatacaccaaggtcaccagggcagtgagttggtggcagaaccgggactcaagtccagggtctcttcatgcaaatgtaagagatgctatgtggtggtgcagtcttgggctggagggactcagcccttttttgcctgtgaggttcacatcaccctgtcttttgagctgttctcatctctctgtcaatagatccattgtctatgatttactgaaactcttcctggagaagctgcattttatccattgctgcctatcgggtaaagagggtgtctagtgtgttgccagctaaataaacatggtggccttcctggccacgttccctttttctgcccctcctggggctccatctttgttctcactgtacacattctctcttcagtattgttatgggctccctaaaacaatggttcccaaatccgtatcttcagtactgaccccactgctgactgtgagacccataacaccagctcactaagggccatctcccctggatactccacaggcacctccatttgagcccttctgaagctgatctcaagcctcttttcccaaccccagcccaaatctcttcctccacctgggttcctatctcatggccctgacagaagcctgggagccttcctgaatactcttccttccacccccaacatagagctgttccccggggccatcagccttcttctcttcattgcctctgtcctctctctccattgccaccaagacccctgcttggttcaggctccatcctctcttaagggatttgacagcaaccttttaactcatctcctggcctctgagcttttccctgcccattcattctccatccagagccagggcaccaattctatcctgacagccttctgctagagccatggcttagagatctcatttggggatacacgtttgttgtgtggccatcatgtgtggctgcatggagtgaccgaagtgaatcatctgcctgcaagcgtttacactcaggtgagcacaattcacatactccttggcttagcacatgtcaccaaacttacatacgtcgaacctcgagctttaggtaccttgtcttgatcctggcaacagtgccatgcagtacgcactgcgcgatccccactttcctgatggagacactgaagcagacggaaatgaagtcgtttgtccaggtgaacagagcaagtcagtcgtggatggaggctctgtacccaggcagccttgaccctgggattttcatttttatcactgcattgtctctcctccagcctcacctttctctcccctccagcctcacttttctctgctcttttcctgtcatagaccctttagagctctgctgaagtgcttgcagttctcccaacaccgtgggcttgttcagcctggatttttagccttgagtttcttctccctagaacctttactgccaccacgacccccaccctctactgaggctgtgtccagtgtggtcagagagaccatctgggtctctttctttttggtgccctgtagcataacatcgtctcctgtcatattctgtccatcgccctggagtagtttgttcatctttcccctcagctagattgtgatttccttgagggcagggtctgtcttgctcatttctgtccccgaagcccagcacagtccctggcatattgtagacacgctgtaagtgtttgttgaaagagtgaatgaatccagacacaccttccactgtggggtcctgccctctcactgcggcagtgggctttccaaactgaagaggccttgtgcttccacctgccctcctgcctgactccccaccccatcctacctggaccccgccatggagccagggcctgatccttggtctttgttgctttgtcagcccttggtgatggagtgggcatgggcactgtaaggaaccccccttgggagggtgtcccaaggctggcaatccctagctgggtctgggggcagatccttcctgactcccacccccgtccaagcaatttgtggcctatgtaggctccacataggcatctcggagggacctgcagacccagtgctttggttttgaaatgttaggcttcagcatgatttagtgccctggcatttctgagctagtttacagtaatcaggcatttgttaatgctcactttctcctccacggactgttgctgacacaggaattttctttgttgattagatttagccctgtgctaaacagtaaccgggggagggtagtaagggaagcctggacgccagcagtgatggtaaccgggggcccagggatgctggggccacagcttatgaactttgttagtgacttaacccctctgagtctcagctgtttcatctgtgagtcagggataaccttacccaatacgctggggttactgtgaggattaaaaaagaaagactacagagcattgtgtttgactcacagcatgcacttcgtcaatcctgatccccccttccctgccccttagtgcccatgttaggcttgacttattggcacatgagttccacaaggtgccagatggcactttccatggtaaaggaatctataggtaaagaacaggctttgtctttctcctagtactgttaggattcattactgcctccaactcctgccccgtcacacgccccattggtgtcttttagagtctggagttgcagaccacagatactagtaaattgtcctactgactaaattaaaacaggccaagtcagaaaactcggcttccagattgccagaccagtatgatttttccaaaaagaagagcttccataaggtcacatttgtgacttataattttgaactctgcagacactggccccgccctctggccagaactgtcccgctcccctgccttctgtttctctccctctcttgagtcatttctgctacctctgagccagtgaaggaggccagataaaggctcctggtctgtcctggcgctccccaggctggagggtcccacctggggagggcacagccatcacaggagctgcagggccgtctgtggcccgcgctgtcggtgggagcccacagccggggtgactgcactcacgtacacatgtgactttcctccttgtccctgtctcgctaggcttgactcatctctttaatcactgtggacttggatgctctgttatttccagggcatcttctcaatttcattctgaaagtatgtcctcgctctattcagaatagatttttaattgccctttccctgaaaaatgtcgagcggaatgagtcctcaggataacagtggccttaaccaggagtctggcattgrgctcagtgctgaggcccgtgtcgcagtggggctggggtctgagggctcccgtgggctgcgctttggggtgcggctggtctctcagcctggccttttccccactcaggcgattctgttcctggctcataggtcatttgttgagaggaagggacttggggccagtcattactccaggattaggctgcctgtcccagctcggctgttgactggctggctgacttcaccactcccttctccccactgagccacagaggccttgtcatgtaacacatcacaaaggttagataagggcgtccagtgctttcactcgtggaatgcctgcagaataacatggtttccccacacacggagacacaggctgcttgtgtggccggcacggggggtcctacgtcagcatgtggtgacccttggcctcgcccaccatcagatcactgtacctgtgtcccctcctgttccctcctgcccagcgaccctcacggactccgcatcgtctatccaataagaacaatccctcagccatttcagagctgtctacagctggaactcgcccaccttgtggccgtccctcgaagccctgtttcctctccttccttgctgcgtccacaccgatcccgtcactgcttcctcctgcctgaaattctcactgcgtgcagcccgttgagctaaagggtcagagactcacttaagctatgtcaaggaatggggcttgttttacgggaggcggaatcccacaggaacacaggcccgctggctcccgagaccgggctgtctggagtcctccatgcrtcttcatctcagggccctgctcacaaagcgactgctgccctctgagcagattctgccgcacctttcttagttttcttcctgatgtcaactgatagatcgtgtgtattttctggcaagaaattccaaaggmagagagtccagtgagcttagctaactgcccctgccccacctgccagagctcctggtgccagggtgtctgcagagtgcctgctggaccttgtgctggccgcctttgggtctggggccatctctgctcccagccacgtccacccttttccagaaatggcactgctgaggcccatctgtcagcggggcctctgggtggggcagtcactatgagtggcacatgtacgactcatctttccgccacccccccacccaaattatacccaaccttcaaagccgagcatcaatctcacaccctcccagaagccctggctgcctcctcctcctcctttatcagtcaacagagaccttagagacctggccaggcgccaggccaggggctttcattaacatcttcgcacactagtcctcacagcaaccttctgggaagtaggtatcattgtgtcccctccttacagagagggaagctgaggctcagaaaggcagggtgactcgctcagtagtgtagacaaggctccagcccaccctgtaattccactcaatgtttcttccacctgttccaggtcctttgagcccctgcagtcctcctggtctgtcacatgctagacaatggttggcacctgtcttgtggtgtctcccggcatggcctggattgtagtgatctgtggtctgtccattgctgaaggggtgtctgctcctgaagatcacatggtcagggcagagccggaggctgggctgggggcccagtagggcctccctacagagcacagggaagtggaggccgtctctgcctctcctctcctctcctcctcttttggggtggctgctcctggaggggagaagtgaaggatttctggtacaaagtcattctgcttgtcctgaatgtcaggaaggaaggtttagacaagattgtgtgtgtgtgtgtgtgtgtgtgtstgtgwgtstgtgtgtctgtagctgtgtgtgtctgtgtgtctgtgtcggcatgtctgctttgtgtgtctgagtgtgtgttcatgtgcctgtgtgtcttggtgtgtgaacctgtgtgtgtgtgttatatgttgtgtgtgtgactgtgtatgtgtgactgtgtctgttagtgtgtctctgtgttgtgtgtatgtgtgtgtgttcatgtgtgtgtgtgtgtctgtgtgcatatgtgttcatacatctgtgtgtgtgtccatttgtctgtgtgtatgtacatctctggctccaaagaccaggtctgtgtgtgaatgtgtatttctgtatgtatgtgtgtatctgtgtgtctgtgtttgtgtcagtttatctgcctctgtgtctgagtcagtgtgtctgcctttgtgtgtctgtgtgtgtcatatgttgtgtgtgtgttcatgtgtttgtctctgtcagtgtatctgtgtgtcatatgtcttatgtctgtgtgtgttcatgtgtttgtgtgtctctgtgtgtgtcagtgtgtctccctttgctgtctgtatgtttgtgtgagtgtgtcagtatgggtgggtctttgtgtgttgtgtgtgtctgtgtgagtgtgtgttctttgtgtatctgtgtatctatgtgtctctgtgtctgtatgccagtgtgtctatgtctgtgtgtgtagtgtgtttgtgtgtgtgttcatgtgtctgtgtctgtgtgtgcctatgtatctgtgtgtctctgtgcattttgtgtttccttatgtgtgtacatgtgccagtgggtctgtgtatgtctttgtgtgttgtgtttgtgtgtgtgtgtctgtgtgtgtctctgtattttcatatgcctatgtgtctgtgttgtgtgtgtgcctgtgtgtgttgtatgttcctgtgtgttgtgtgtctttttgtgtctgtgtgttgtgtgtccctgtgtgtctgcctctgtgtgttatgtgtgtctctgtgtgtgtccatgtgtctgtgtctctctgtgttgtgtgcctgtgtatgtgtccctgtctgtgtgtctgtgtctctgtgttgtgtgcctgtgtgtgtgtccctgtctgtgtctgtgttgtgtatgtgcctgtgtgtgtgtccgtgtgtctttgtctgtgttgtgtgtatgtctgggtgtcatgcggtccgcctgtgcaggtgagcgggcagtgcccgtgtgtgtctgtgtgtctgtgtctctgtgtgttgtgtgtgtgcctgtgtgtgtgttcgtgtgtctgtgcagtctgcatgtgcaggtgggtgggaagggctgtgctctgcactcctgatggatgccgctgtgctcctccaggaggccttgaattccccattcagtgctgagcctgcgagggatccagtcactcgcccacacctctgttggtgaaatgccagcaagccatttatgcccctattgcttagaaaatgcaaactcaagtcattcaacaaaagcagcccttgaatgggtcttgccgactggcccttcggggcctcagggcctggctgtcatggagccgtggcggggagccgcaggcctcagcgtggacagtggggttggcgggccccgcaggtggtccctgggaagttcctggtcacaggaagtgtttttcactcatccgcttactgttcttttttccctgcgaacagaaaagcctggatggttctcccggctgctgtccagggccgggctctgcagggcaattctggggccaccagaggcgtctgctgcgtggtcagcctggccgactgacctcccgggcctgacctccccaggccgtgcctcccaccccagggtcttctctcttcaccgaaggggtcccttccgccctgcccygagagctgccctgcgcgggctgtcccctgctttgtctgcatttgcattcaaatcctctctgagaacttcttaagcagtgtcacagtccgtgccttgtcctctcagattctcaaacgacttaaagcagagctctgggctggtgtttctctcaaagggaaayggcctctgtgatttctggagtgcgtcattcccctacgacttggcgggtctgttgctggccatggggtcagtcagagaggcctagcctcagcctggcgggcgggggtcctgtgggaacaccattccattctccatgggctcagggggtgcggtgtgggatctcgctggtcctcctgggcctcagctggtgccccggggcctccccttgagctccttctccatcctggagtgtcctagccaggtaaccccagcacaacgatgtgtccgcataggccaggctcctccaccacacatatgaaacagcagcagtgtgtcyttctccctgaagacgagcagggagctttgtcacaggttgcacggctccaatctctccccgaccccattcaccatccttagtggcttcgctggagcatccgctctctctcccttcctgcccagctgtccacctgtcacacccagcacagccctgaggtgctgcctcttcacacgtggctccctgaaggacagtggggctcttgctccttttcttgtaataacagcaccatccaccactcctctctgaggaacggtgggtagaaccgatacttctagaacaagtgcttggggcttactgctatcaaaggtgggaaatgcatcagatttaaattacctattgtaaaagtcagccaataattccttacatagtttcccctaatatggaactttgggagcctctgagtgtgcacgtgtgcatgtgtgtgcgtgggcgggtgcatttgcgtgtgcatgtttcctgtgagagaatgcatggcgaacggaaatcagactcggtcaccatttggtttatctccttggttcactttgactgctctacactgttaaattgtttctattatttgtcatctatgctttcatttataaccaaagtggaccgctttggctataaaaagtgacaaagacaggaaacataaaaaacatttatgtggagccaccccaagttaatgaggagcctaagaatgataattctgcaaatttgcctcaaggttgtttttaccagatccataagttgtgatcatctatctgatccaagttcttatataggtcatctaaatgtctttagtacatcaaatgagaggaagaaagaagggtgtggggggcagataatacagagataatttaaccagcttgccttttattgattagaaaaaattattaccagcaatgtgttatttggaagaaggacttataaatctctctccgaatctcgctttatctcatcatttagataacatttgaacattactaaaacactgcagttgattttccttacgctcaaaaatgcacgaattctaacgatcgggtcacaaaagcagtttttatctatttttaaagctgatgcacataattaagtttcaattatgttttagatatgttggtccccaaaccaaaatgtcattttttatttgtcaacaaatcagtctttccttgcacaactaatttaaaggaaatgaaatgttgtgtataacgttaaatgggaaaatgttgaaatgtgtctttatatataatgaacgttattaaaaaatggtcttttaatgctcatttaatataatccttgaataatatactcatataaaatatttaactaaaaatcttttttaccataagccatgcaaaaatgataaaatgattttttttaattgtagggggtttgtgaaattatagattactgtgaaaggagttcattagtcaaaaacagaattggaaatgctgatctagagacacaaagcccagggatttcaggagggagctggagaaggggagagaagtgagggtggggaacaaccagtccccgcctgctaaggaatgtatggcttcctccttgggcgccagcaaatacctctctctccagggccggccagaccagggtcccatagcaaatgccaaaagctagccagaggtgagggcatttaggagtgttgcctttgagttcatccttcaaagaacgcaacgctgggcaggtagcagggtgagccccctgcctgcgtcctaccctggtgtggggatagggagtgagctggagacacagatgaaaggaagccagtgtccccccagactgcagccccgaaaggagcagcccttggctgatccccgctaagctgctttgccagcttgccttagattagactgggtgtactgggtgcaggcgacatcatttctgagaactggctgtcacatgacttggcagaacaatagcagccaggtggaattttgttccttgtaccatttgtgagcactggaaggaccacaggacaatagtgatccaggctgggtctctttcttcatagggcacaaatcaaagcccagagaggtgggaagaggccgcccagggcctcagggtggccaagagcatgctgtgtatacattctcccaggctcccatgtgtgcattcttccagtgttctgggacaagggtgtgtgccatttcaaagatactgatcacagaggatgactgcacccttcccatgcctggggagtgcctttgaggtggggagatggcctcagggtcatgggaaaggctcttgggagggacaactgggttctggaaggctgtgggaagcggggagsaggggatgagtagggcagagggttaacttacgcaacagcagaaaccattctactgtactcaggctctgcaggtgttttgtgaccctcctgcaggaacatttatttgtatctgttccagctggttgacctgccacaacccatcctcaaatgtatcaatccaaggtactattatttatggaatcattgactcatgagctccccagggctcccctgccaagtgacttcccggcggccactggtcacctccaggagcaggagctcctagcccaactgaggggaggcccctcttccatcagcttttcccctccagttctggttctttctgcccctcggggtctcccagtgcgcacctggtccgcctgctacaggaaggcctttcaggcatgtaaagaagcaaagacaccctccccgctgctgcaaataaacgcccaatctgcaagaatgtctcctgccctggctcacacatacttttcatgtacttttggcatctgagtcacgtctctaaatgggctgcagtttgtcaacatcccatggaaagtatggcccgagaatccagtgcagcactcagagccgtgactgggacagcaaagggccaggttgccagctctttctgccaaggtctcagtgcacagctggacccagcctcagctgacagctcttctggaagcttctgygttctagcggggggtgatacagtctgccatgagggtgaagtacacatgacgcaccctgaaatctaacctctaacagagccacatgtgtcattcagaaaagaacattgctttcaaggccttttcttattctaaccagaaaagtgatagcactcttttatagagtgatgtggatttgagccattaaacgatttgcttactgatacccaggcctcttgatctggcatttcatatcccaggtgaccgctgcatggtgcctstgaatgtccctactctttttcccaaaacagtacctaacaggagctcaggtctcctgactccacaagaaggtgctggctaattgcacagccgaaaactgtgcaagagccagtttgaaagggggccacacgttgatcattctgggctgartatttttgcggcgttctatatttacaccaaaatggaggtgaacttaacaatacggtgttaccacaggaaatgaatgaatctgtcaaaaatcactcttttactgaatgacttctttaacctgagctgccagaaaagtctctcacagtgggaagtcatgctttagatggtgtgtcctgatgaaaaattgatattggcggmaataacatttttwaaaacttctaggtgttaacagtaactttgagttctctgtgaggctcagaggggtggcgtgttctgcgtggccacatccgtgtttattagtttatggccttctgctgtggcatttcatcatcacagcaaaattgcaacctttcagcgcctgcggacagtcacgttaaaatggctttgagggagagatggctcatgtggtcaggcgttttggtgtcacactcaattggctaaacatagtaattttggggtctaytattgactaatttgggtaattcacctactgggaaatattttaagataaaaatgtaaaatcctgtcagtgtatgagcaaggtccttgatgtcagttttgtgacatatttttaaacactggaatctgttctgtggaatattctggcatgttgtagttaagtaaaacaatgttgggagcccatcagctgtctgtttgcccatcttcctgtgctcatggaggctcctatctgggtggttattttatacctgggcggctcccgtttaatagagaatgccattaacaagcgtgccagagtctgtctctgcctgcagccttgattagccatcagcatgcgtgaaaactcatttcttgattggtgtcgaaatatgtcacaccctgatggagcattgcaggctatcactgctaacggattaatgacagagcacctgccgcatggcctcatccacgacagctgccatccagagagaacagagtttggaccrtgtccgcagaaggccttggagtgttgacgtgggcaggtctaggaatctgcatgggcagaaatgtaggggagctgagtcactctgyggcaagtggctgtgtcttccgctgtccccctgcatgtgaggcttgggacctgaaggcccattttcccmcagtgatgttgcgaggtaggtgtttagggtctggcatgggtataggatttcactagtttccctcaacttctatccctccttcctggcactccatartcactttactatgctttgtcttttgctgkgatgggtgtcccggtctcagctcctctcgcctacctgcaccaacaatgaccacacaactgttgtgtgcaggcaccattgccagagtgcatcatacaggtcgtcagtcccttggaggcaagaaaggtaccttgtttaccatcctaccccccgccacacacacacttaattatgttatatgattgatactcagggtttcagtggctgttgtgagtcaaattgtcatttgtggccgagtggtgaacaatgtccctcttctcgtgcccaaacctgagggctgaattggaacttggcataccctgaaaatttcaaaagattttacatgatgcaaggaatgatttggggccgttgsstcccccaacagaaccagcaaagcctcccggtacttctttagtattttgctttgcaatgtcccagcctttccctttaagtctccttttcggacaatatatagaaagttctacaccacatctctcagcccaggttaagcgaggctggactctgggttctcatcctgattctgctgccagctcaaggtatagctttggttgggctagtgtcttctctctgggccttgactcccctgtgtgcacagcgagggagtttggaactcatggccaactctttgggtgaggatcgtgagcatccacctctccccaacaccagcctgcacttgggtacatatgttcacatacacmcaggcacgcacgtgtgcatacatgctcagctgggccctgctctgtcactgatgagccagggcctctaagatctgttctctccatgtgagttgcttttgtgcagcccagggagccatggttgctggcgctggggccttggtgcccacatgtccctgggagaggttgcactgtacaatgatatgtgctcctcagcgtgtaaaccaccacccagccctgagggacagagctttggttgtgggggtctcactgcattctacagatgtttcttttgtgctttcaaagtaacataattgcctcatcaaaagtttgtgaaacaggctgggcgcagtggctcactcctgtaatcccagcactttgggaggccgaggtgggcggattacctgaggtccggagtttgagaccagcctggccaacatggtgaaacctcgtctctactraaaatacaaaaattagccaggcatggtggcggacgcctgtaatctcagctaccctggaagctaaggcagggagaattgcttgaacctgggaggcagaagtttcagtgagctgagatcgtgccactgtactccagcctggatgacagagcaagactctgtctaagaaaaaaaaagaaaaaagaaaaaaaaaatttgggaaacagataggaggggaagggaaatcacctataacacccctttcccttccaacagctaccactatcattttgtaagtttccttctagtgactttaaatttatattttttcaatttttttaatacttggcactgtaataggcactttacatatattaactacttgaatcttctcaacagtcctcctggataaaaatgaatgaatctcattttacagatgagaaaaccgagtagaggttgagttgctgggtatattcagcttgctggggctgggatttgaacccttgccgtgtgactctggaccctctcttccttccaccagtgcagtggttatcaaatttcacctgtctgaaagtcacctggaagacttgttaaacctattcctgggcctcacttccagagtgtgcrattcagtgaagctgggtgagggaggcctgccatcctgcacttccagcaagcccccaagcaatgccagtgttgctggtatggaaaccatatgttgagaacaattgtactagtccatactgctgccttgtgaagacctcatcctctatcctgatttccccactcattctgaaagaattccactgtgttactatttggcttcacacagatcacttacagtgactacatgagatgacgcatgttctaaaaggaatctrttgcttgtttgatgctttggaattcacaaacctgccttagctcagagcccaggaaaatcacccacagttaaatccctccctgagaaggactctctgggccctccagctggcccaaaagggacaggtgcctgagatcattacatcagtgcccagtgccgttcagttacataaatctgacccattcttcaaggcactgttcagctttcacattccccaggaaactcaccctgcctacctcagcccacaggatctcttccttgctgmgcccctgatrcctgtgctactgtggtcagtggtctaggttagaacccgggaactaattttttctcttctagatagtgagcggcccttgggtagcatttggtccagcctttccattttacagatggtaaaaccgaggcccagaggcaaaaagaattgtctcaggtcagagtgctgtgtctataaactccattttgaattaattcttgacaaacacagttagaccttacagttggtttacatttacttcttaaaatgacttcccagatatccctacactgaaaggatgcagacttgaaatagacggacacaacagatactcctttctccgtgctgtgcagcctggagagtgtccccagagctgctgcagtggtcttgctggaaaacccctctagcacctgtgtagaagcatcaggaggagctgcctctattctgtgtcccattccagacatttcagaggtgtatgtggagtccatggcaccaacaggtcttcctactctcccgaggctggagctgagtttacaggtgtccagagttggcagatgggtcctttatctaaatgtgtgaccctgtgttcagagctcaaggcatagaacagcagtgcagtgaataagaccacagctggtttttctccgtgggaaggaaatatgcctggaggcttctgatttcattatctaacaagtgtattttctctgatgtgggctcaaaatggggaaagaataattattcccagcagccccacctctgccgtctcccgttccgggactcccttgacaggctcctcgccagccctgctcctccgccggcagcygcccctcagtagctgccgtgaacrtgggcagtgggagattattcttcatttcaatttcattcttttttttcttattaaaaaagcagtgaaggccgggcgcggtggctcacgcctgtaatcccagcactttgggaggcctaggcgggtggatcattgaggtcaggagatcgagaccatcctggctaacacggtgaaaccccgtctctactaaaagtacaaaaaaattagctgggcgttgtggcgggcgcctgtagtcccagctactcgggaggctgaggcaggagaatggcgtgaacccgggaggcrgagcttgcagtagtcagccgagccgagattgcgccactgtactccagcctgggcgacagagtgagactccatctcaaaaaaaaaaaaaaaaaaaagcagtgaaaacacatgttcattatttaaaaatcagaaaatatgaaccaaaaagaaatgaatgaaaatacctcataataccacccgccccagggataaccacagtttaaaactatggacgtcaattccagatcaccatttctcgaagtttcctcaatctctttcttgtttcgggttttgatgcacatataaacacgctatttagtgctatcatttcattttactgtacatgaaagtatgcttatgcatagtggaatctgcttttttcacttagagaatcttgggtacctttcatgtcaatggttgaaaaatctaattcgtccttgttaaatagtatttaataattaataatgccaaagcattgattgacataatctgcctttattggttatttaaattatcttcaaattttgccctacgagcaacacacctatctgtgctcttagctggttacagttatttccctggttattttttaaatggggaagctttctattcatttgttggaggaaatattttccagtcacatgctgtgtgccagccatggtgccccattctggggattcaacagtgcctgagacaaggtccctgtccttgcacttctggaaaaggggcatggcttatcagtaatacacatgtagatttaaaagaccattgcagattgtgataagtgctgtaaaaaatcaacagggtggtgggattgagggagaaggcagcggagctcctgtgacagagctcagggaaacctctctgaggaggcgtttttgagctgagacctgcaagagaggcagccagggctggaggagctgtgcaggtgctgaggcaggaggggctggtgcccctgaggctggaaaggcaacagagcagagggagtcgggggcaactggtctaagaagaagttgaagttggctggagccaggtcactcaggtttccattggctgcagccagtatgtatatttcattccaagaactatcaatggcagggaggatgaagagacaggaaagggcatggtgagggagacaggggttgcgagtgggggaaggcacagagaaaggaaggaatcaaaggggactttggggttcatccaggagggtcctggtgctgattccttgctgacattcagagtgtgtgccctccgttgtcttgataaagggaggggagcacctcctgccgtctggccggtgccccttctggtggcagagcacccttgggtcagcgagcgcttttctgctcctgcaaagtcccgccagcctctaagagggtggatttctatgccagaggcctgggtctccaccagcaaaagagtaagttctatggcaagaaacccctccagaacatgtgttgaaatccttttgcagagttaccagtgcacctgaattatggtggctacaaagctgctagggcattccccggatccgagcttggaggaggccaagmctgggcaatttttctgactttactgcaccatcatccccatgagggaatctggtgttgggggaggaggggcagggagtggccgcggaggccactggctcatacttgacctggcagtgctgtccaggtgtcctggcacctgtgggacattggtctggggacaaagtacatccccacagcagctggtaagagaagggtgctgcctacgttatgtaggcaaatggatttccaactaaatttcacaaagcaatgatggtgtcttgacaaaaaatgagcgctgggcagggtggcttacacttgtaatcccagcactttgagaggttgaagtaggaggaccgcttgaagccaggagttcaagactagcccaggcaacataatgagactcccatctctacgaaaaaaattttttaaaaattgctgggcatggtggtgcacacctgtagtccgagctattccggaggctgaggagggagacttgcctgagctcaagagtttgaggctgcagtaagttacaatcacaccaccgcactccagcctgggcaatagagcaagaccatgtctctaagagaaaaaatgaacagttaactgttcaagatccaagtgcagtaagtttcgttagtgtttgagggtatgtgtctgtgggtgtgtgcaagtgtgtagagccctttaaaaagctaggctccggccgggcgcggtggctcacgcctgtaatcccagcactttgggaggccgagacgggcggatcacgaggtcaggagatcgagaccatcttggctaacacggtgaaaccccgtttctactaaaaatacaaaaaattagccgggcgtgttggcgggcgcctgtagtcccagctacttgggaggctgaggcaggagaatggtgtgaacccgggaggcggagcttgcagtgagccgagattgcgccaccgcactccaacctgggagacacagcgagactccgtctcaaaaaaaaaaaaaaaaaaaaaaaaaagctaggctccgtgagtcatggcccaaatccaggagccctgggctctgacaaagtgcagagccttggttcccattcccctggtggggagagaaaggccttgtgcaaaccctcccctcaggttagggcaccagtcaagaatgcaaccctaattaaaacgtgaggcagtcagtcaattacagttccatcgtggatggaagttctcctgatttcaaacttgggccttgtagacgggaagaaagaaagaagagacattgagagtccttcccccaggctatttctggtgagccagttactggggttttatatacattttctacaaaagaacaaatatttgggtcagatgaagtggctttgcagcaggctgggttttgacatgctgtaaatagtcatccataatggggcgaggctggctacactgagccattgctgtgcttaaatcctggttctcctcggggcccgtgggcagtcagtccagctgtgagctgatcacccctggcccagcatcgtgtggtcgaggcaggctgtgcctgtcaaagcctgagagggggtggggagtgtcaggctgtcttaccacctgccagagggaggctctggaagtgggaagaagggttgggctgaggctggctgaggaaactgatgtcattggcataaacaagacataactctgctttcacagagctgatgaaacgccattccatagctccatgtcctcagggctggtgtgaggcctgaactgggtgtgatgggggtgaggaggatgtgaattcactggggaaagcaccttaaaagtggcaacattggagtgtggkcttcagaatggggactggtgccatggagacggggaatgtatggtgttgggtaaggtcgggcattaggagatggcactggggaggcagacagagtcagattttagatgattgtgaaggccatactgagttgtatctcctcaggatacagggagccgtctggggacttctgtgcatacaagcgatgggtcacaggtgcacatttggaagatggcctgtcaagtggaggctgagctaggctggatcagggaaaggctataggctgatcagggagaggctagagaccactgggagccatagagtccaggtggatatgacagtcctaaacaggacagtcatagcgtgacaaagaatccacagggctggggaatggtttgggtgacatgatgaaggggaagtcaaattcagctcccaagtttggggaatgagctgcggttgcacgtaaatcaattttctgctccactaagtttattcatttaaatgcccgaacttaaattaactstttttggatggaaagctttctaaatagtgaccactgaacatcaccctctgcctttttcaggaaaggaagtagaacatattgtaagcatagtgygatgggatagttgctgtgaataattgcagctatccttattgtcagttgcctcaaggcctggtkaggtgtttggaaccctttgccccagcaatgaatggccccaggctgttgtgcttagctagttctgggttttctttctttctctctctctctctttttttttttttttttttaaaaaggaaagctgttgtttccctcctggctcttcccttctttgctttcagctgtcatttctcagtcctagagctttcgagaccctcatcctccggctatttctaatcttctgccccgggcttttcaaatctccaactcctcttaaagtatacagcctctgtgatggctgtttccttaacttgtgggtttcttcttgttgcttccccttctatagctttattgcagatgactgagctttcagtgcatggggatgtttctgtatttcttgcgtattccccgcagtgcctagatggtgctgagcatgttgctgatactcagtaaacatccatggatttaagagaagtaaatagccaatcagctttgtgtgtgtgtgtgtgtgtgtgtgtgtgtgtgtgtgtgtgtctcagcaccagagaagtttaccttcagtttctcaaaagctggagttgcaaagccatctttgagagccacatttttttctccctcaaaatatggtcttaattgtgtggtgatagccacagacaccgcctggaagccttcctgtgcttcaggagcagaatgactctcctcattgtctgtgggtttaggcaccgagagctgcacagataaaagcagatgagtcacaggtgtggatctgctgggcggctcttgtcgttagcagtacaaagccacaggtgcgcattcagcgctgcgaagcgggaagaggagccctgacgattctgagggtctcaggtcaagttagttacgtggggacttgaaaatgcattggagatgcagcctggcttccgcagccgtggagaaaatgagaatgatttttgctatttgcttttggggcaccatttaagcccatgtcttgctaggtcaacgttttcatgcccatagctataaattaaagagatgccttagacttgggagctgtttctctgactagaagctgcgtctgtttattcccttgcagttgctaggagcattgcagaccagaaggaaggaaatggaggatgaatgattttaagcatattttccaagagtaatgaaaccgaaaacacaaattcccacacaccagaaaggaactggtttccatccagtgtagaaaaagctcctggcaagatccagactctctgataatcattcccctttgctagggtttagctgggccaccggcttgattgaaagcccgggttcagcggaatgtgtgggcaaagtgtactaagcaggccaagtctatgcaaaccaggatctgaatcagttatttaaaacaacagacttgggtaaaatcaacagtcattctaatctagtttatctgggagcagcagtttatctcacagaacctcatttagttccatgaaattgagattggtttcttgatctatgagattgcaacttgstgtggtattgtggccttccatcattttaatgaggtccttaatgatataatcccactcttggatgagttgaaggtggcatccctcttgctggagagactaggatgaaaggcattttcttttacgtaggtgacctggtttttgttttcatgaattcagaaaggaattagtagacaacaggttctgctatctaattattaccataaagaagggttgctggatacttaggctaaattcgaagtcaacactttcggtataggctctccagcattcacttggcgtacagcctacagcctgtctcagtttatatattgctgtgcaaaaatccacattaaaacttagtggccattgatctatatctctgttttggtaccagtaccatgctgttttggttactgtagccttgtagtatagttttaagtcaggtagcatgatgtctccagctttgttcttttggctcaggattgacttggtgatgcaggctcttttttggttccacatgaacttcaaagtagttttttccaattctgtgaagaaactcattggtagtttgatggggatggcattgaatctataaattactttgggcagtatggccattttcgcaatattgattcttcctacccatgagcatggaatgttcttccattttttgtatcctcttttatttcattgagcagtggtttgtagttctccttgaagaggtccttcacatcccttgtaagttggattcctaagtattttattctctttgaagcaattgtgaatgggagttcactcatgatttggctctctgtttgactgttattggtgtataagaatgcttgtgatttttgtacattgattttgtatcctgagactttgctgaagttgcttatcagcttaaggagattttgggctgagatgatggggttttctagatatacaatcatggcgtctgcagacagagacaatttgacttcctcttttcctaattgaataccctttatttccttctcctgcctaattgccctggccagaacttccaacaccatgttgaataggagtggtgagagagggcatccctgtcttgtgccagttttcaaagggaatgcttccagtttttgcccattcggtatgatatcggctgtgggtttgtcatagatagctcttattattttgagatacgtcccatcaatacctaatttattgagagtttttagcatgaagggttgttgaattttgtcaaaggccttttctgcatctattgagatagtcatgtggtttttgtctttggttctgtttatatgctggattacatttattgatttgcgtatattgaaccagccttgcatcccagggatgaarcccacttgatcgtggtggataagctttttgatgtgctgctggattyggtttgccagtattttattgaggatttttgcatcaatgttcatcaaggatattggtctaaaattctttttttggttgtgtctttgccaggctttggtatcaggatgatgctggcctcataaaatgagttagggaggattccttctttttctattgattggaatagtttcagaaggaatggtaccagttcctccttgtacctgtggtagaatttggctgtgaatccatcgggtcctggactctttttggtaggtaagctattgattattgccacaatttcagatcctgttattggtctattcagagattcaacttcttcctggtttagtcttgggagagtgtatgtgtcgaggaatttatccatttcttctagattttctagtttatttgcatagaggtgtttgtagtattctctgatggtagtttgtatttctgtgggattggtggtgatatcccctttatcattttttatcgtgtctatttgattcttctctctttttttctttattagtcttgctagtggtctatcaattttgttgatcgtttcaaaaaaccagctcctgggttcattaattttttgaagggttttttttgtcttcatttccttcagttctgctctgattttagttgtttcttgccttctgctagcttttgaatgcgtttgctcttgcttttctagttcttttaattgtgatgttagggtgtcaattttggatctttcctgctttctcttgtgggcatttagtgctataaatttccctctacacactgctttgaatgygtcccagagattctggtatgttgtgtctttgttctcgttggtttcaaagaacatctttatttctgccttcatttcgttatgtacccagtagtcattcaggagcagcttgttcagtttccatgtagttgagcagtctcgagtgagtttcttaatcctgagttctagtttgattgcactgtggtctgagagacagtttgttataatttctgttcttttacatttgctgaggagagctttacttccaagtatgtggtcaattttggaataggtgtggtgtggtgctgaaaaaaatgtatattctgttgatttggggtggagagttctgtagatgtctattaggtccgcttggtgtagagctgagtacaattcctgggtatccttgttaactttctgtctcattgatctgtctaatgttgacagtggggtgttaaagtctcccattattattgtgtgggagtctaagtctgtttgtaggtcactcaggacttgctttatgaatctgggtgctcctgtattgggtgcatatatatttaggagagttagcttttcttgttgaattgatccctttaccattatgtaatggccttctttgtctcttttgatctttgttggtttaaagtctgttttatcagagactaggattgcaacccctgcctttttttgaacagagccctcagaaataacgccgcatatctacaactatctgatcttcgacaaacatgcaaaaaacaagcaatggggaaaggattccctgtttaataaatggtgctgggaaaactggctagccatatgtagaaagctraaactggatcccttccttacaccttatacaaaaattaattcaagatggattaaagacttaaacattagacctaaaaccataaaaacyctataagaaaacctaggcattacmattcaggacataggcatgggcaaggacttcatgtctaaaacaccaaaagcaatagcaacaaaagccataattgacaaatgggatctaattaaactaaagagcttctgcacagcaaaagaaactaccatcagagtgaacaggcaacctacaaaatgggagaaaattttcacaacctactcatctgacaaagggctaatacccagaatctacaatgaactcaaacaaatttacaagaaaaaaacaaacaaccccatcaaaaagtgggcaaaggatatgaacagacacttctcaaaagaagacatttatgcagccaaaagacacatgaaaaaatgctcatcatcactggccatcagagaaatgcaaatcaaaaccacaatgagataccatctcacaccagttggaatggcamtcattaaaaagtcaggaaacaacaggtgctggagaggatgtggagaaataggaacacttttacactgttggtgggactgtaaactagttcaacccttgtggaagtcagtgtggcaattcctcagggatctggaactagaaataccatttgacccagccatcccattactgggtatatacccaaagggctataaatcatgctgctataaagacacatgcacacgtatgtttattgcggcactattcacaatagcaaagacttggaaccaacccacatgtccaacaatgatagactggattaagaaaatgtagcatatatacaccatggaatactatgcagccataaaaaatgatgagttcatgtcctttgtagggacatggatgaaattggaaatcatcattctcagtaaactatcacaaagtcaaaaaaccaaacaccgcatgttctcactcataggtgggaattgaacaatgagaatacatggacacaggaaggggaacatcacactctggggactgtggcggggtggggggaggggggagggatagcattaggagatatacttaatgctaaatgatgagttaatgggtgcagcacaccagcatggcacatgtatacatatgtaactaacctgcacattgtgcacatgtaccctaaaacttaaagtataataagaataataataataattaataataaaagaaatcagagaaaaaaaaaacttagtaacctaaaagaacaacatttatttgctcagaattctgcagtttgggcagggctcagcaaggatggttcatgtttgctcttcatgatgccagctaacatggcttgactgaggttgcaagatgcacttccaagatggctcactcacatgactagaaagttggagctggctgttgactgggaactcaactgctgctgttgaccacagcttcagttcctttccatgtggcctctccatgtggttacgttgggcttttcacagcatgatggttggattctgaaataaaggatactaaaagttctaagagaacaagccccactgtgcaagcacttattcagcctctgcttgtatcatgtttggtcatatctcattggctaaaaccagtcacatagtatgatgagcagcataatggtctcccaaagatgtccatgtcctaatcgcagaaaactgagtatgttatcttacatggcaatagaggttttgcagatgtgattaatgttaggctcttgagrtggagaagctatcttgggttatgtggtgggctcagtgtaatcaccagggtcctttatttttaatttttgagacagggtcttgtaggctagaatgcagtgacacaaaaacggcttactgcagtctctatctcctacctcccaggctcaagcaatcctcccacctcagccttccaagtagctgagaccacagacttgtgccaccatgcccagctaatttttttaaattttttgtagatatggggtctccctgtgttgccccagctggcctcaaactcctgggctcaagtgatcctcccatctctgcytcccaaagtgctggatttagaggtgtgagccactttgtccagcccaaggtccttacaagtgaaagacagagacaggagagtcagagtcagagaacaagatgtgatgacaggagcaatgatgagagtgatgcagagtttgtctttgaagatggaggaaggggccacaagcaaaggaatccatgcaggctttagagcccagaaaaggcaagaaaatgggccttccccggagcctccagaaggaacatccctgccaacacttckacttcagccaagtgagactcttgttagactgctgatttccagaaccatgaggtaataaatctgtgttgttttaagccactgagtttgtggtaatttgttacagcagcgagaggaaacaaatgcacatgtacaaccccagagtctgtgtgggaggggccatacacagaggcatggatctaggagccatgtttggttgggggtgtcaccaaagtaacrgtccattattcaaactggcagacatttgacagaccagaatctcatgtcattttcttcaggaagtagttttgcccagagttaaatattttatggatgccttacagtctttctgttcaaggtggatgttccattatctatgcttcccactggttccaagttgaaattgtagctgccacgctgaatgtgataccacttcaggcccttgtgttggagccactgtaagctcccctttcccttccccaatttttattatgaaaaatttccaacatagagaaaagtttaaagaatagtacagggcatttagggatacctaccacctagattcaaaaattattaatattctgccatatttgcttaatttatatgtgcatgcatatctatgtatattttttgctgagctgtttgaaagtttcagacatcaagtaccttcacccctaagtactttttagcacatgtgtcctaactatagggacattctcctgctttgccacagtggtcattacacctaataagataaaaaattctccacaatcatctaacatacagtctacattcaaatttcccgagtggccaaaacaaatttttagaattgttttttaaaaatctattcatatgttacatttagttattgtccctctagtctcttactctaaaataaccctccacttttttccctttcatagcattgactgttggaagagaccaggccagttatcttgcagaatgtcccacrtagtacatttgcccagttatttccttgcagtgctgtctaacttattcttctatcccctgtatctcctgtaaattgaaagttatattcaaaggctagactagatgcaggttatgcacttttcgtaagaatatttttataaatgataccatgtcctgcatatggcatcacttccagcacataatgtcaggtgtcccctgtagttgacttggtttaatcattaggttaaagggatgaacatgaggcgatgccattgtgaaggtagatttttttccttctgtaattagcaagtaatctgttcgggtggtactttggcaaggagcagatatgctgtttcccaagaacttgtcacctaatggcttttgcatcccttggtaacccttatgtgaggtagcaggggtattgtaaaatggtgatttttaaaatcctatcattctttctacatttattagctgaaagtttttgtaaggaagacctcatgtctctctttgagttcttccttgcttttaggcacaatatgccccagacaaattgtatttttattgtttcaggcatagaatccgtgatttttctaaagaatcctggttctttttagtgggacttacctcttaggcactagggatgctcgttctaaggccatttagtggatagagctaggaaacatagttaataaattatgcgttcaaactgatgttttgaattcagatttagaactcaagatttttttccttaactttttacctttttatatatatttctatatgttttctcaaactgaatttttgtttgtttgtttttgctcttgttgcccaggcctggagtgcaatggcaaaatcttggctcactgcaacctccgcctctcgggttcaagcgattctcctgcctcagcctcccgggtggctgagattacaggcgcctgccaccatgcccagctaattttttgtatttttagtagagatggggtttcacgatgttgaccaggctgggctcaaactcctgacctcaggtgattcaccctcctcagcctcccaaagtgctgggattacaggcgtgaaccactgcacccagcatcaaactgaaattttgattcctgtgcgttaacatgtttacctgtttgtgtataatacatatattcacataaaatagtcttaaacttataacaccaatattattactaacaataaaactaccaagtgaagcttttcttggcactttctttttgtccttagaatatatcccgttacagatgtacgatcagagttcaaatgagttgaaaagtcatttgaaaaaattctttgtgtgattatgttatcaattttataaacagttagcttcatgtgttttggactgtaaggtttaccccccttttaaaattaattttgtttcttagaaaatataaaacattatatagcaggtcctcaatgtcatccataagttgttggaaactgtgactttaaatgaaatgacatataacaaaaccaatttttttcctcacagtgttataagacaatgttgaatgaaatgatattattccaggacctgctgtatgtcatttcacttaaagttgcagtttccaagaaccttaacaagggcattaagtgaagactttatatatgtggtttaaaagtcaaaaccatataatacagtaacctcatagaaatcttgattccattcctgtcttttctgctccattctcctatatagataaccattttgctagttttttttctttccagtgcatctttttgtaaaagaaaagatttcatactcattcttatttctccttctttcttagacaagagcagcagcatgtcctctatattcttcttcaccctgcattgtccgctttttaatatagccttgaaatccctccataccagcccttcaaggccatcctctttgtccattgcatgtacttctccactgtgtggctaccccggaagggattcagcarattctctgtccataggctgttgggttgtttccggtctttttcttgcacagacagtgctgcaatgagtaatctctagtgcatgtcatttcgtacatgtgaaggcatatcagcaagggggattgatgggtcaaaagatgaaaacaggtgtaatttgtcagatattgctacattctcctctctgggggctgtaccattttgcattccctcagcaatgtgtgagaacacgtgtctccacagccttaaccacaaaatgcttgtcaaacttaaggctctttgccaatatgatgaatgagaaatgagtgtttctgttttgttgtatgtttatcttatgagtaaggttacacatttttttcataggtctaagggccatctccccttttctttctataaactgtgtacatcttttgttcatttttctgtcatgtgattggtctttttcctttcagagaatttctaaattagagagattaagcctttttctctaaattgcaaatggtttcctttcttcgttttttcattttttaacttatatttttgcaatgcatttattttatttttattttatcagtcttgtatttcaaatcgtaatcagaaagacttttccactccctggtgattaaggaacagtccactcatgttttcttctagtacacatagaacttcattatttagttagctgtctaatgcatttggagttttttttttttttctggtgaatggtatgatagggatccagttttgtttttccaaaaagttatgcatctttcccccaaaggtttgagatgctacctttatcatacaccaaatttccacatggggtctatttgccaactttctcttctcttccattgatctgtcagacccaaggttcttgaagttcatcttgacccaggacagtgtgcctctgtcatattcttccatagtcgagagccagcccaccccaagatggtgaaagcccaaaactgagcacttagcctgcagcgtggagtggcacgtctattcctgtggatactctaaaagctcttcctggctcttgctggactgtcagggtactgtgtaccaatctgtgctattttggctccttgtggaattgcttttgataaacaaggcttattagtgacaggtcatggccttgtactgagggatgtgctaaggaaaagccctgtaaaacccaaggtgttgagaattcactacatcattctctcacgcctgattttatttttcctctttttacccagctttcctgacattattttccttttatctttttaaattatgtgcatctttgcaagcagttctggagtatatattgtcgaaagaggagggaaggaaggaagggaatcacataagactgatgactttctgctgcagtgaaatatggaaacggtgcagagtccttgatttcaggctggatttactgcactcctcaaaggaacttttcttggacaggtttacctaatgcagaaaaacaccttttcttccaggtcaagcagctttcatcctttaaatctaatcgttttcagtgagataggaataaatgcagaaggattttcaagctgatacaggttcagacacgtgtgttagatgccacagtcagcttgaagcatttgcttttgactttgttgaacacatctgcaccttgactcatggtggccatcgtggacgtgtgctggagtaaatcctgtattgtccctgggaccaaatgcagacctttctgcaggcatccactgccatccagtcacttgtttttgtacatgacgtgttatctccctcacttcatgatacttctccctggtccagtgcccattgaacttgtgcatgggccacaccacctcgaggaggccttgactgctttgttccctttaggcccccatttgcttcagtacctagccctgagctctgctggtacctaaggtggctgcattggccttgcttcctgcttcatcaatgcctctgcacctttctccttgcctgggaaatttctgcatttgttgtatttgatcaagcatccatgtaaatataaaaattcctgcatcacaaatcagtctgctgcatcttcctaacgctgataatggccttggctgaggcccagttgtcccttcctggatgaccaggctcccctgagtctcagtgtctaaaccgttattgtgtcattatttcttatccgaagggcccatatcccttagccaaaattctgaaatagaaaaggctctgcaaacaggaaatcatttgacagcaaaacccagcctaaactgacatgaggccatttatagtccttatttatcccaatagatgtgaatccttataccttttgctgtggaaatatgactgtgtctgattctggagtactgtcccagaacctgctgggagtatcatgatatatgacgtttgtcatctgaatttcaaaacatatctggtcccaaggacttgtgataagggattatgagcctggaggaaatcagaggctggagatgcctgtaatttcatgtcatatgactgtcaggatagctcgtgcatagaaatgacccatgcctaggtaagtaaaagtatatgaggcccaagactttgaaaatactcaaagtattagtatactaatactttgtatactaaggacttccccattcctggaagatccacaggacgtgtgagaagactaggaaagaggttcccaaatcagaatatactagatgtccccagtccccagagtttgtcaattgcaggtgctctgacaccagcaggtttctggatttacaaatctaagaataataagatttgaaacactttccttattycaggcactgttctaagtgctcagtatgggtaatctaatcagatccttgtgacaaccctttgaggcagttgatatcaccatcccttaaaccatgaggaaactgaggtccatgcaggttaagtgaatccatatcagttcagatgcccgaaaacacaaacctcaccagctatttaagaaaagattaatagaggggattgggagtttccagaattagaagggcctagaggagcaggatggaggctcagcttccaggartgattctcaacaggacactgcatggctggaccctcaagattgctgcttccacagtcaggaaagttgagaatcaggactctattgcaggaactgtcaaccccaggaacacccactcaaccaccttctggggaccaggagaggtgaccatgactgtttgcttcagagttggcatgccttttgctgcacctgcaatctgcttttcagcacacctgcaaaactggtgactggtctccttgcctgtgcttgccagagaacggcagaatctaccaccgtatggcctccacctcatttccttagcytctcaaagcatatgcaaacacgtctgcttggtagaatcttaaacacatctagaacctggaggtgcaaaggaataggtcgttgtcattttgccaactttggcatacagcaaggcacatggggaggaaggtccaatggatgttgattgagccagtctgcagacccacacattaaataacttcccagagcttacacaggaagtggtggatccaggatttgaagccaggctgtgtgttcccagcatctaagctctgtgaagtgtactgcctcacaggaatcccgtgagctcatgcttggggctggctggactccatgacaaacatgtcttctccatattctgtttcttcagcaggttcacagctctagtccatgtgtctgtatggtacaaggaggactcttgagctggctctgaatcctttgaggactgattttgatggtgtctatctaatggctattgactggttgtatccattaccctttgatctaacaatgctgcctaacaagtcaccctaaaattcactgacttaaaacagtagacatgtaatattgttcgcctagtctataggttggctggttcttctcagctgggttcactcatgcatcagtggtcagctgcaggtcacttaggtggctctgcttatcttggctgggacctgtcacatgcttggggttagctggctgatctctcactaagtaggctggtttctcatcctccaatagtccagccagtgtgttcttatagcaatttctgagaaatgaaagaggaagttgaaatgtgcatgcattttcctaaagccagtcacacagtcatgctcaaggtcatggtggaaagggtacctcaaagttgccctctctggatacagagaggccattagttggggtcatcaactaattagagaaccttaggcacaatgtttaacctctccaatggcccatacaactgaactccttggaaagcatagcttggatgagaggygtggagaaccaagccctckggaaccctgcatgttaaatctaatatggaattcagcacccaggggctatctagcgaggctctgcctaaatgaaatcatctgttcttttggctggctttattctgtgctcaagccagggctccccagctgactcagggacacagccattaacttgtggggcctgtgcttaacagagctgcttctcaacaaagacagtcttttgacatctcaagcggcaagctcratcgccaattaaaaagctcatgtcctcaatgtgacaaataccggggaaaacaagtctgcaattcagaacacaagtggaggaacatgaagcaagttcatcatgacggcagcaccggccttgttggagctttcatctcgcctctcggtgagacagagcacgactctcccaagatttcccaggtcatgccgcttagctgggcaagacgtgccgccaggccgagatggttcaccctgcttcatgggatcatgtgaagggtcagggttgtttttctatagcttagattgcggcctgcacatcttacattttcttaattcatatttaataaccttatagggctctccggtggctgtgctgygagacagatcaggaagccaaggtcrtccatgcagccaggatcctggggttccttagggccctgatcccttctctgcagaacattaggggctgcccccaagacttcagccctagagattcaattggcagcttcgatattgaaagactaaaaaaaaatggacattcctcccgtttttcttttggatccgtttccctttgaagtgaagttgcactgtctccccaggtccccagtgaaagcagagttgtgtatcctctggtttgtttctcaggagatgtgttttaactaagttaataataataataacaacagctttattgataaatagttcacataccctataatttacccatttaaggtatacaattcagtggtttttaatatagtcacagatatgtgcaaccatccctatggcttatattagagcattttcatcatctcaaaaagaaaccccatacacattagcagtcartccccatttttccttcccccaatcactggcaaccactaatctattgyttttttctttttcactcaaacagatttctgacagatccactttctatgtctatagctttccctgttctggacagtggatatcaatggaattatacaataatgcggtcttttgtgacttrattctttcacttagcataaactaaggaaatttttttaagtttgtctttgaagccagatggctgagtttgaatcctggctccacakcctactccacttacctaaaaactggtttgtttttaggtaagtgacttaacctytctgtgtctgtctcctcatcttaatacagagagaattccagtgatcactcccatagaactccctgggtaaatccatgtaaaggctgtatttgagctgtgcctggaacacagtagggacccagggaatgtgagttctcatcatctttcttgtcctgtgttccctgaaggcctttctagctctgtttggggagccttgcttgtttgttttcattcccacagcaaacatcagtggcagtgtggacagctcttcccatatgaattgcacctgggtcatggggactgggaagctgtgcatgcgccttgcaagctctcacccaagtctagagcctcctgcatctccctcttcccaaggcagcctcatggccccacttgaggctctgaggttctgcctttaagggaatagaaagtttttctccccagctcccagtgaaagcagctgtttccttgtgagtgtcctccaggtgggagayggagggattttggacgggcacattagtccattttactcctcagggtttaagttaacaggaatagtagaagggatcaacgttgacccagaaaactggcccacaggcctgctattgggtaatgtactagtccattctttagttgctataaagaagtacctgaagctgggtagtttataaagaaaggagttcatttggctcatggttctgtagggtgtctaggaagcatggcactggcatcctctcctggagaggcctcaggatgcttctaatcagggcagaaggcgaagagggagcaggctgtcacatgacgagagggggagcaagagaagggggaggtgccactcttatttttattttttcttgaaataggtcttgcattttcacccagtctagagtgcagtggtgcgatcacatctcattcaagccccaatctcctgccctcagttgatcctcccacctcagcctcttgaatagctgggaccacaagcatgtcccaccgtgcccagaaaaaaaaawttttttctttttttttttttagagatggggtctcactgtgttgtccaggctggtctccagttcctgagcccaagtcatcctccaacygcagtctcccaaagtgctaggattacaggtgtgagccrtcatgccttactgtcacagccagcagtctcatgaactgagtaagaactcactcatcaccaaggggatggtgccgagccattcacaagggatcctccagggtccaatgcctcccaccaagccccacctccaacattggggatctcatttcaacatgagatttggaggggtcacacatccaaaccgtgtcagatgggaagctgagaaaagtgacatctgcctctgaaatagttctgggaacgtcactggagggtgactgccaggttcactcatgccatcagccccgcctttgtgtcctcagtaatttttactctgagcataatcacagccctcgttgagaggagccactgtccctgttggtcttctttctagaagtatctcttatatactgatatacagcagtgcatttacattgttaactgtaaaaatgacaccaacacatttagaaaggccaccagataaaataaagaaaaatgtatccctcaacgctgacatacttactggcttgcttttggaacgttcttctttctgtcttcaggtgctagaactttaggagagtaagtgggctctgttgagggactctgaagactggtcacccccccrcccacacacacacacacatcccccagcacttgagctgcgcttccacataaccacttcctttatgctgggactgtggtttctttgtgtgtttttatgtcttttccatgtctgggtctgggtttgcctcccctgagagaccgtaaacttctaaagaacaagaactgtgttgtctccttttataggagtgtatgtttcattaaaaaaaaaaaaagtaaaagtaaattttaaaaaacgtttcttgtctatgcctmcgatgttcttattgacttgagggtttagacagtgtctcygaaaattctctggcaaacactccctggccccaccatraacagctggttgatgtaaccacaccgtagctcagtcaccacgtcacaggagctgtgtcttcttctgcccgggaactacctgtcctgtgtgacagaaaaatgcagcggttgccagccaagggcccacaggcaggattcccctgaagctgtgggactttgctaacaatgcatctcccacattgaggcttttcagaaatgcgattgaaaatagaagtgtgggtgcagcattttccttcctgccacatgggaattctggggaaagagctcaccttgaaggaacaaccttgctgggagtgcagtggggggacctttcccctggagccggagcccctgctgggttctggcagccccaggatgcccactgagctctgcttctctgggcaccctgagaaatggacggcagcggccctgactccgggctaaggcagggcttcaattaagccagagaaacacgatttattatcagcatgttttcagttccaagccgtgctttgaaaaggtcaccttatatgaatatttagaaaaagcaagatcataaaataagagggacttggtattttgttttgtattttttttttagaagaaaattcrggctcactggtaacttacaatgggcaaactctagcactttttatttaacctgcatttaccctttaaaaatggggaggaggttttagaactgcatttgaggagactttctgtgtccaggggattttacagcgtttgaaaccagggcagtgagccttacacccgggacccaaggtccgcttgctgactaaatgcccattaaaacagcaaatgaggaggcyaggtctgctttgaagagcctagcctaattgtgttgtatttgtgtcagctgatggctacttttttcattagggacttttaacctgtgggtcatcttttgaaatacacattcgattgagtcagttcttcctttaagacctcaattggctctccttgcccgaggagaaagctgggcccctgaccctcccgccccggccccttgagatctggacacagccttgcctcagaactcagcctgtcacctcccctcccctcctgtcacgtcctgtgtcccattccagtcccatagtgaggggacttagtggattatattgtaggatgagcttagttaaagattaaacgagtatgtttattctttatttcacagagtaattgttttaaaacgaattttatttttatgcttagtaggatggattttatttaaacccccaggcagactccatttaaatctgtctataaattgtatagtcttgatgtttttgtataactttgatatacattctttacaaaatcccggttttatttttacaagatgaagattatacattttaaagcagttatttcgtcagctttttctgtctccttgtataatcatatcagaggactgaataatgatttcgttatttcatttgcacagtctctcgtgactgctaagcactctgcttgtagttcctgttttttgctattcctctgttcttgcgtttttttctgcaatctctccccgccttgcccagatctcttcctcaatgatttttttttwaattttgtacaacaaatattcctcggtgcctcctgcccaccagacactatgccaggtgccaagtgtagaatgcagattaaacagccaggttgtctaccccttggcacttggcatggaattccgtggcgcctttccattaaagagggctaagggctgtcagctgaatttgacaactcgtagaaacaggaacagtgggttgggggggggggcatttatttctctcgcatctgcagcctctgtgcaatcagtttgtcatctctgaagacaaatttattgtgaattaaataagatcaccctttgatgtctcttgaatgtggcctcttctcaggcctggctccttctggtagagctgttgtctttagttkctgrcattatcaataacaaaatcttggcccacccataaaattgtcccacttccataatccttgacctcttgtgactgattagtaaagctctgtaaaaaggttacctgaaaatatattttataaataccgtgtattatgattcagagttacacctcgtgcctaaaatatgttcttcaactttaacctattttaagttgaaatagttttgctagatttggttggtttatcattactgttgttatcaacattggtttggtctgttgttagtgaaggtctttgttaaaaagcaaataaataagtggaaatccagttaatgtaagatattttggtttgtgaattttatttgcctttctgctctaagaagtttccctgaggacaggcagacaagtttgccattgagtgatgaagagaagcgtcagctgagggatggtctcctgattttttttttttttttttttttttgagaccgagtctccatctgtcaccaaggctggagtgcagtggcrccatctcggctcactgcaacctctgcctcccaggttcaaaagattctcctgcctcagcctcccgagtagagtctcctgattttgtaaattctgccatgtggttcatttgttagtcagccacagttaggcactgaattgtgtctccccaaaattcacatgctgaagccctaattcccaatccctcagaatgtggctgtatttggacatagggcctttaaaggggtgattaaggtgaarcctgattggtgtgyttataaaaagaagacacacagagggacacaggaatgtgcatgcaaagaggaaagactgtgtgaggacttcgtgagaaagcggccacctgcaagccaaggagaagaggccccagaagaaaccaaacctgctgacactttgatcttggacttctggcctccagaactgtgagaaaataaattcccattgtttaaaccacccagcctttggtattttgttatggcagccctagcaaattaatgcaaccaccaagcctgttgcaaaggatttttcttccaagcagattcctgtttgatggtaggagccagtatcctccccattgttgtagctggagggggccaaggcagagaagactgccggccctgggcccttggtgcaatggggcagtgacagcaatgggactgagagggagccacctccacagaacccccagcatgctccccatagcagctgagtgcttgtagagctgtgccaggaayccaggaagatgcaggtggaaacatttgttctagaatcttcggagcagtgatttgggctatgctcaggagtgttcattctcttttccgtggatcttcacaaaatatccgagaactaaatctgaaacgtctctagtaaggccacgtgatgcgtgcgtctagcacccacgagtgaggagccggaaacattctcccgcgccagctctgcggggttctggctacttgtgcttgggtgtaaatgctcgcattgcgttttctgttcctgccacattgcacgcttcagcctgaatgcagcgttatcgctgctgtgggaatttttgacaacttatttatgagtattaagatcctggagtcttcccccaccaaaaaaagggggtagctatgcctgcacttggagatgtttccaggatggcagcccttgtggggtccagtcacccagggctggcaatagatgctgtctcccttgtgcacccaggctggtttgaagtgtgctgacggggacttgcggagacarccaggcagagggagaaaaaaggtggtagggttgctccaggtcacacaggccaccgcagaagcaggcctggctacatggaagggagcagggtggcggcatctcaggtgtcagggccggagcagcagaggtcgaggccttccgaggcccctccccaggcatctgctgagaccctcccttgtgccaggccctgtgccttcccgacgccggggactggagctagaggcatctggtgacaggaacaggaggaggttaaagcaatccgtgccctgagtgagcgcagggtgcagagtaaccctcacatgcacagtgactggtgtaggatgatgtttgaccaatgctgaactcatatgggctctgagcccagaggggccaggtctttggagtctggaatgactaaggcaggcctttcctgtgagaagtggtggctttgagctgtggggacctagagaagagacagccagaggttcttaattctttccttcatcttcctctcctttgattctgatccattaagtggttttggcatggttctggggcccttcccctccaggacccctgcggtgtgagtgctactcctttggccccatggatcacccctcaacccgtcaccttgtgttccccgaggtgggggtgcctctggaattccctgttctgcttttaggagtgtcacaaggattgtaacagcgtcccactggtgctggatggccaacaataaattcccaggctctgaagcaccaggaacaaggtccctgcagtmagatgaaaggtcccctccttgcctggcaagacctattatctgggactctaaagaaaacgtaaggccgggcgcggtggctcacacctgtaatcccagcactttgggaagccaaggcaggcagatcacgaggtcaggagatcgagaccatcctggctaacacagtgaaaccctgtctctactaaaaatacaaaaaattagccaggcgtggtggcgggcacctgtaatcccagctactcgggaggttgaggcaggagaatggcatgaaccagggaggcggagcttgcagtgaactgagatcacgccactgcactccagcctgggcgacagagcgagactctgtctcaaaaaataaaaattaaaaaaaaataaaacgtaaggatgcctgctcctggggaaaagcgtgagggtcagcatgtcagtaacagtgctataggcgtcagtgcacgtctgcaggtggccggcgttgccccagagagggcccgtttgagtcacttactcagcagacaccagggacctactggaagctcatttattcagcttgcccacttgctcattaatttaacacatttgtattgaatgtctgctttctgcaaggcactggtgctcccactggagctgggctggcagactgtttctataaagtaagtattttaggctttgagggccattttgtctgttgcaactactcaactcttgtagaacaaaagcagccatagacaatacataaacacatgggtgtagccttgttccagaaagactctattgacaaaaccagctgcatttggccacaggctatcgcgtgctggcccctggactatgtacagaggtaatcctctatctacatagagcttatgctctaggcaaggaagacaagaaattaatcatataatcacaaacataaattataattatgaacacgtgttctcatagctctacagccaggatggtatgtggcaacctcacgtcaagaactgcttccctcaagagttgctgcttttgttggcatcagaatcagcatgaaccaggtgaagagagagaggaaccagcatgtggaaacaccctgcagtacaagtgcagcatcccaggaatggaaagaaggccagtggtcatagcggagaggagaacggggacaggggtgagatgaggcaggagaggacatgcagctggtgcatgcatggtcttggagccatgctgtgcctccagtctttatctgagtctaatggtgaaggctaacgcagaggagaaacaggatcggatttgcactttgctgcaacatgaaagcagattggggaagagcaagcaaggattcaggagaaccaagtgaaaagactattgcaagagaggacagtggcagtggggaggtgaagagaagtagctggaggtaagaggtatgtcgaggggtcataatgggctgggtatggagggagaaagcctccacaggatggctcctaggtatcagggttgtgcctgattagatggttacatctagatataagatggttggtgtgctctattctgagacaggaagcactggagaagcccagagttctttgctttgatttgtttgggtgagaggaagaggcatgatcagtctgagttgcctttgaaacatcacattaaaggtgtcagataagtaggtgagatgtacagatccggagctcagaggagaggtgggactggagagaatatgttttggagagtcatcagcatatggagagtgattgaagccttgagcatggattagatcatccaggggaagaagagaatggagtaaaaaaagagaagagggcctggcaaaacatcttctaggagctctgatgtctaatagccagggaggcaggggtgattcggcaaaatggggaaatgacgaccaatgaagcaggattaaaaacaggagattgttgtgttgtggaagcaaagggaagcaagggcttcaagcaagacttgcattcagcctgtatgcgcaggcacagtgagactggccacggatgcccagtgaccattctgacttgtcggtgcatgcactgtgatagtggttagtgcccatgccacatcagttgttaaacttgattttcatccctgctttcaaggagtggccaccagtgttgaaagcttctgggatagcacacaagataaagagtggaaaccgtccattggatttagcaccatggaggacactggtgaccttaacaagagaactttggatagagtgatgggctaaggggtgaatgggaggtgaggaagttgacaggaggcctaggcagcctttccagaagtttcaccatgaagcagaggagctaagcaggacaggtagaggagaagctggaagggtatcctggagtcaaaattttactttcaaatgttgaaatgatgagaagtatttgttcaacatacctactgtgtatttattcagttagcaaactgtgtatctcattcatttattcattacttgatccaacatgcctatctcaaccttgagtaggatatttattatgagcactaaatttattttatttcatttccttctttccttgtcaacagccatttattgagcatgtattatttgccaagtactggaccaggtcccagtgatagagacatgaataagttatagcctgtgtgttcacggggcttatagttttttctagtgcagtggttctcaaccagggatgattttgttcctttccccatcctaggagacattgggcacttatctgggaacttatctggagatatttttgtcatgatgtaggggggaagggatgctactggcctctagtgggtggaggctagaaatgctgctaagcatcttaaaatgcacagracaagcccattacaaagaattatcttgccccaaacaagaatggggtgaaaatggctagattaatatgtgcatgtggtaactacaggagctcagaggatgagcacttggacacacagtggagctggccaagcagaagatgagggacagacaagacaggtggaggccacaggtgtggaaaggcatggagccgtgaagggagcatcgtgcaaactcaggagcttcccgtgaagggagcatcgtgcaaactcaggagcttcccgtgaagggagcatcgtgcaaactcaggagcttcccgtgaagggagcatcgtgcaagctcaggagcttcccgtgaagggagcatcgtgcaaactcaggagcttcccgtgaagggagcatcgtgcaagctcaggagcttccagcagttccgggcagaggcaccgtgactgataagggcggaagtttgcagagtagctgtggccatagatatcataccaagtatcttggattttgtgtctgcgctgagaggccactaaaggatttcaaatgagaggaaaccagattggtgtcttagaaagatcgtcccggtggctgacaaaatcaaacaataatcaccaacatctgttaagaatcaaatctgtgtccagcacttttttgagtactttattgtattatcctgtttagtctcccagcaacccaatggaggaaacactcttgttatccccatctcacagctgaagagactgaggcagaggggtcgggtagcttgcttgacattacgtgagtagtaactgcagggccaggatgtggctcccagactgggcgtataaacaaacatgagatgccctgtggttctttctgtctccyactttgggtctgagctctgggactagatttgagcagccacaggatctcaattcataattcatgtttcaacacttttgcagctgctctaaaaattctatgcctctagccttaaagagtacggctttgaggtaaccacttcttgttgattaggagttctcgcgtagctgttaatttttctakgtgctctggctgaaatgccctatcgacagagaaacacttgagtgaattgtgctgatgggaagtcaaattcactttttgctgcctaagccttttaaatggacccggtatccatacgtgacccctctaccttgtatgactcgctctgccttctctatcagctacttcaccccactatccagtgtaccccttctttatctttgctgggggggcaggggggcgggaaatagatgactttgcctaataaaatttaaagtagatctcagtgcacaaagctgcatcgttagccagcgatgatcctgcttttcagggtttttaattgcggtggttccctgctctgcattaggagccctaatgagaagtgacacccgcttctgacccaggactgatggcccctagggagagggaaactgaggttcccaggtattagtttggtgcaaaagtaattgcggtttttgccwtttttttttttttaatgacaaaaatgcaattacttttccaccaacctaatagaaggggctgcacctgtgttccttccacccatgagaagagatttttgtctgaatctcagctgctgagggaggcaggtgactgacaggtgggactcaaggatgactcccacctggcaaatttcagcagcactcctcccatttggaaagaagagcccagacacatttttatatgtatgtaggcttttaaatacatgtgtctctctctttttgaaaacattggcagagttctggcaaagcataggaaatgctacctggtctgtgatctggagggagctccctcctgagaggaaacaggctctgtctatgctacactggatggctggcctagcctgctgccggtgggttctttgaggctkgtctatcacctgtgagttcacagccccaaatgatccccaactgacagaaagagccccaggctgtggcctctgtcactagggagtctggaggggcagccagctctgatttctaggcttcttcctataatgattccgtggtaggacagagaattctctgggcttccgttttctcatctgcaaaatataggggttgttggactgaagaccttctagtgtccctagcggctttgactggtggattaaatcagacctttgacaggataaggactgcccatcagtgctaagaaattaatcttatgcccaaacataaggcagttccccactttcccaaagaaaagctttccaaaaactttttagccaacctgaatatattaaatttttttgaatatagatgcaacaaaaaagtatacttacaatgtttaattattttagtttcaaatgttaaaaattacaaactatataaaatgctaaccgggcatggtggctcacacctgtaatcccagcattttgggaggccaaggtgggaggattgcttgagcccgggagttcgagggcagcctgggcaacatagcaagaccccatctttaattaaaaaataaataaaaataaaatgttaatttagaaatatttccacttatatttcatgagtaattattcaaacttgttctgggcagctttgcctcccatgtttttttttcagtgtagtttttttttttttaatcactagagtgactttttgagtcctctgacaattttttggaacgtcatggcactttttgaatgtgaggattagaccttccctgggaattctatcccaagttgaagcaggtgtttttggcttttttttttttcatttggtttataggtaaatattcacagtctctttgcaataatttgttatgattcttgttaaagtgaccttcraaagtctgtttataataacatacagacactaaaatttatactacatcatatttgtgttaattagagtcttcttactgatacagaatctatcagtggatatattcgatatcttgaatagaaggcaacaccttgttgagggctaatgagggaggagggaaaagatggcatagacaaaaaattttactgtacaaaattctcatttaaaacccctcagcttgttatattgcacgtataagcatttctgtagtggctgtttggtagcctatgtctgtgaatgtaggcagaggtctcttgatggagcccaaagacagaacaccgggtcttctgctgagtcttttgggccccgcaagaactctgaccaacatccttcaccactttccaaacacaaggagccgtaagccccttctgaccacctttctgccaatctgctgttgggcttttgtgtagtttaatgagcatagagtcatttggaaatatgcactgcgcttcacaaaaagaaagagtaatataatcagaaatgattatatttcagcacttcagcactattgctrctattaatgtccattatcactgtattacctgaaatgtgtttaacaatcacagtcactaatcaaggtgcctgtcctggaaaatgtgtattctctccatctggatcacactatgtattgtgctgttactgttttaaatttttttcagataattggaacctgctacttcatactttgaaaagtaatgtagcgggtgaagccctgagaggttcaaagcctatgcttccatcagggaaataatgcaatttccatgcaaaatgattataatattattcagtgattacatgggggtggagggtagtctgtttttgttagacttttgaaagtggcaaattgaattccatccaagtaatcagaggttatgagtttccagcacagtgtgtttgcacttgttggaggctcatttccccagggtctctgcaagcccggagcccccggagcccccagagcccttgctgaccacttgggacagacgtgaagggccagggaattaattccccgccagcagctttcagcccatgataaatgggaggtggaggaaacactccagctgccttcgggggggataactctgagaccccctcctccctgtctcccacaggtccccagtgggtgagattggccccacttgcctgctcatttggagcaatctgtgttgacttccttcactccctcccgtccccactcccctgcctaagctttctgaaccactgttcaaacagaacactagcctcagatcctcatctaggttctgcttgacaagagaggcacacgtggcctccccactttccccttcccctttttgagggcatccaggggcctctctggatccttctttcctataacccattttgtggagggttcttggcagcacccagaagtatttgtgttttaaggcatcgtcattctgaaaaatgaaaagtctgaacatttcttatggtcaggaagttgatgggtgtaatttatttttcccacctcttctcttaattattattactccattcaagtgagacaagatgatttaatccaggctgtatttaaaatgcccataatcaatgctctcattctgagcatgtatctatgtgctcttagataatttatgtataattttaatagattcgtcaacagcagcccttcctcatctaaacaggctgcttgcagacagatcgcttaatttgcttctcaatgttatttttcatacatggttgctgcacggccgacagatagtagatgatcccattacgaacacatttgacacggcctctactgtggggatgagcaaactcgaggtctcgtactgtggcaggcagggtatggccccctctcactcagaagggtcagatcccagagaacaaagccaccaggaaggtgctgaagctagtcctggcagcgtttgggtgctgatgggagccctggcatcctgctagagcaaacaggaggctgtcagtgctgcacccattttccagccagggcatcacctgctcatgcctctcacctgctcacgcctctcacctcctgcctctctgtgtgtgagggcacctagcaggcaggctggaggtgtgggggcattcatactgcagaaacagccctctatcagcaagaggcaggaggcaatgcataaataccccggcttcctcgcctcatcgtgagacaatttcaggtgcactctgcacgactctcagagggttcccagcaggacagagccccagctggccccagcagtgaccccatggcaaaagcgtcctcagttggcttttctcctgtcctgtctcataccctagtgcttccttggatcaactcccaaagaaaccacttctgtcaaaatcttgtttcaggatcccctttaggaggagcccaaatgaagacatttgcccctctgaatttcttcacgttgatctttcaggcaccaccttcctccaggaccccgcttaagccctgctgtgaagtcgtcctactccctctggcccagaaactctcctcctctggccatcttcagtcccactagcttagttaacttagcctgcaccatcagcagccttatctgtcccctatttctgcttgtgggtgtgtgatggggcaggtgccaatcccgccaccttcccgctgactttcatgtgtgtctcagaggtgacggtgttcatctcagtcctcagtctggagtgcagacaagagacgtcgagcagggtaaaggatgggtggccagataatgccaagagtacactctttaagggaaaaaaaaatcacagagaaacgcctccttccaaagaccaatgtgagtgctgatggattacttgcaccatttccgtccrctggggtaattgcaagatgagtgcattgtgttccaaaggagaaatattctgtagatgtggtaatctttgccatgcaggctcgtgacagagagaaccacatcaacttctaaattttctcaatggagtgcaatgtgtgtaatgtgtaataaaatataaataagcctttaagaagcatctatgtgtttctttttatcaacctttagatgcgttaaagcgaagtacaattttatatgaattctagatgatatgtagtatttttatttgctacttcattgctaaatgtttcatataaaactgaagagaaaaaaatacacagtcccacatataaaagaagaagcagatggctaaatatgaccgtgggagagaagcagtgaatggtgtaggttcagaaaggaggctctcccctaccgtgtgtgggcccgagatggagaggagggaaatttgtatgtgcagttacctgtgttcattagctgtttgtttccactgtgttaaagtaggccattagtattcataagaatctacaggtatctttgttatggtttttttatcttttaaatgtacatataaagagtatgtattatttatagatgtatttggatttagaaacatcaagcttgaaaaataatgcagcaaggaatatttgatttaatgcttactagggaggggagaggaccaggactttctgcaggaaggaagactgggttgggatgttatctgacctttctgggggactttcctggaagctctttagtgacagttacagtgtagaaagatcttgggtgaaagaaaggacagtggccagagagttaggaagccccgggtctcatcccaactctcctgctgactggctgtgggacctgagcttgtcactcaccctctcctgtcactcagcctctcctgtcattcaccccctcctgtcactcaccttctcctgcctttggtgaccctgcctggatccagacatcaattcgtgccaggctgtggctccatgatgggtacctccgtgctgactgctgctcagctgctggcctcctttccagaagagcagtcagggtggtaagccatcccgcgtgtttcttcagatggatcacagagccacagtgcgatcaagccacttacctacacacattggtagagaccaggaaaacagaattagcttctcattctatttccagctcctaggctctttccatattggccaagaaaagcagagtacttacagaaattcctagttaatggcatctttctgcctgtgtatggagaaacatgcctgtctgtagtttatttttaaatgaataactcatcatatttgggtaaaaagtcctgtaatctctaaagcctttctttcacaattttttttattctgagagtgtagaaaacagcctcagatctattcaaataaaatagcttttttactgagtgaggaagcaatgcattttaagacccacttgtgttggggaaggggtttttggccactggctctgtaggcttgggctcaaaggaaaggcagaatcatgaaatagaagctgtagcagcatctgcccgraggtcttgattttggtttaccaatcgctggctgcaggcgggatgggaacaggggctctgtgaaggctgaaattcagggagagagctggagggagcggagagtggtcgctgaccagtgtgaaaccaacccagcactcttgcacacgtgatcagcccgttggttccaccgccttctgaggaagacccctcttcattcatttgtgccctccgtgcccacttctttggcggggtggtggaagagaaggctccatctagtgtgactcccagccatccccatggcactataggtattttgttcttcaatgagcaggcatgatcattataatggttattgctgccatgtgtatgtgccatagactatgttaagtttctttcttatggtagaacattcaactctcagaacaaccatcgatgtttagtggtatcatccccattgtatagaagaggagcttgaggcagggactgggagtggagggtgggcagacgtggtcattgccatcaaacggcagagctgagatttagatgcagctccctcagattataaatcttccatgctcctgaccactacacaggctgagccagcctctgaactggtgtctccgagactaggatggaaacccaaaatgaagctcaggtggtgctgtgcagaccaggagtgaggctacaggattcagacttgggagaagatctctgcatctctgtaaggggaccagcaaatcacgaagtctaatagcccaccttgttttaccctgtgaagccattctgttcccatcattcctctttaaagctatcaagaggccatgccctaaaggggtggggcttcaagagacaccgcccccctccccgccgagcatcagcagctatatctgtggaccagactggctcattccagaccctaggagtgagctactatgctgtctgtttctcctgtccccacggccgtctccagccccccgacacctatagctttggtctggctagagggcttgtggtgttttctgatgtggctggctatttgagtgcttggggtgcaggtcacaggctcccctgaagaaccgggccaacagttccagggctgatcaccaggcaaaagacagacttcagacaagaaactggaacagggaaagccgaaggcaacacagaagccctgctctctctgggctctgcttacggcgtccagacttgaggtggcctctttcctgggtgcgagtttctgtctggtggatgctgaggacttgggatgggcctgaccaggcccctggggccctcctggaaaaccggccgggagccaagttgtctggctgtgtgttgctttcttctcatggctctcgcctatttctttgcctgttgttttgctttactccacaagactccagtcaagtcttgtttaaatgttatagcctggtcccaggagtgtcagggagagtcgaggaaagctgtgtccacactggagtcagacttttaaaggggcaatgcccctgagggcaccaaggcagcgggagtggagcctctatagatgggagtaggcgctgtgagtctctgactccccacccacatggtgacctggagggtgttggagaaaaggctactgtgtgttgctcaacacccgcacccaccgcagtccaacttgagagagctggcagctggcctgcccgtcagggaatcagggatgtgggcacctgccctgcctcatggggttcgtgtggcatctaatgagggagagaagatgcaggagcacgccacgcagcccgcagcaccaggcagaggcgaagcatccttatgaaaagctgagatttatgggtctgaaggagaagcaacatctgggaaggaattattgcaatttacagggaggatggaggcctgtttataagagcaaaatctggaagcagtgtctgatttttttttaaactggtttatattccaatcatcaacctatggtgtgaacatcttccagatgttcaaagaaaaattgtggaaaatgagttgaaccgtggaggcaatttccttttttgaacagagctttactctttactgagcatctactacgtgccaggtgggtcctccctgccgacatcttcagtgctgctgtgggtgagtcargctttggtaggtccagttggcacctttggcttcyttttcttcatcttgtggaaatgcaagggtcattccggttctgcttccagtgatgggcgaatctgtattaactggtagagtgagggtggggggatatgtgccagcattgagtggcagggctgagttgggtgagttcgagttcatttcattttgggggggtctgctgtgtatcaaaaaaaaaaaaaagattttaagaggattttggtttgcaactttttttcctgaaacctttcatgctgggtttatggtggagtcatgtcatggcataacttaggatccagtccaactatgaacacctcattttctttatcttcccattctcctcgccccaaaccatccaaggcaactakgagatgggccctttggtgctgtgctggcccaacaggaagcctccttgggtggcacgtgtgtccttattgtgatagtctccagtattttgcctggaaagtttcgtactccagagagtgcagaaagaagtgtccagggaggagttttcacgaggagaagggtgacggcagctggaggcccaggaacaaaagcctggaatgggaggcacaaaatccaggcttgctgttcaggctccctctttgacttgctgtgtgactttggacaacctttttttgccatgagcctctgttccctcatctgtaaaatgaggattacaaaagtaatcaactcataaatttgttagaacaggtaaatgagaaaataagaatgggctaggctttgtaaacttcaagccttatgaaaacattgttacctctcaaatcggtcagcctggcttctgcagacactgtctttctttgaatacagcctacaaaaagcatgccaggagctgcatccctaccagctgaaaataacggatctcatcagtggccaattgtggctccttaatggaataggcaatctctgcgttgtgctgggtggactctcatgacttactccatctttgcatcttcactctcccctttaaaaagcagtgccttccggaccccggctcatgaactgtcgtgaacctgatggataaaccttctgagaatgtttatttttgtgttggcaagaagcctgcaggctttggtgaacccacagttgatattattaatggatggatggcctgtttttctctcgtcttaaaaagaatatgaatgagcgttccccttgcaggacacactgggagcaggcgttcctgcccagggtcagaggtgccgcagagtcccatatctgggctgacaggagggtgggctcgggagccggtttcctccctacagtttacagcctccagttcctttgcttttcttttccaaggaagaaagactctttgttgcccagtttgctgaggggtgctgaacttctgggttctggacccataattggagagtgtggttacgaccctggcggggctgctttctgatgctgtgtcaaactggaggctccctaattggtttctcctctcttaaggcagtttctctcccctaaaaacatggtgtattttataaagaagtaaaaaatcctggggcccttgttcataattctcttgaccatcagtttggttcatgttaggaactatctttatttatagacttagaggtaaaatggatctcaaaatttttctctagtttcattttgaagctctccaagcatttaacccaaatagcccattcaagggtcttgctttcatattggtcttaatgccttgtcaaagtcaattaacatctcttgagtaccttgggaagctgaaagtcctaagacccctttcacaagcagtgactgactacctactgtattttttaaaataaattagagtcctctgtcctttagcttttacgatttgttttccttaagactgtaggctgccgtttgatgaaattagtggaagggaaaaggtcaatttggccaaaagtgtcacaaattaagccctgaagcaatctctttattcacctggagatagaaaaccatacctgcctccctgtgatttcctgggttcattcctgggattcattttcccaggccatgatctttggaaacgttaagattttacagtgttaacttgggaacaaaattattactaaaaattggtttctagtaatttatttttaaatcacttttaaataccatgtatctcattagagtgggacatgcttaggtgcatggatgtagcttataggcctcccagaaaggacaataatgagtcaaggatcgtttatacaccgctacatgatgggtgctatggaccagagattccaaaagatactgtctattaagcccagggtctaactgcaaggcgtgggggttgggtgggtgggaaaagaacaagaaaggaaagatgtgaaaaaataaataaaatcactgaggcatagactgatgctaaatgttaaccgagaacagttagaaaccctttcaaggaaagagtttctggttggggtcggcaaagatgtcgggaagcaggtgtgcttgccctggactttgagcaggtgatggcacttctgagatggtgatgctgagatggaggaagaggaggaggatgtcacgggttctctagttttagcactttgggaggccgaggcgggcggatcacaaggtcagaagatcaagaccatcctgaccaacatgatgaaaccctgtctctactaaaaatacaaaaattagccgggcatggcggcgtgtgcctgtagtcccagctacttgggagactgaggcaggagaattgcttgaacccgggaggcggaggctgcagtgagccaagattgcgccactgcactccagcctgggcaacagagtgagactccatctcaaaacaaaacaaaacaaaacaaaaccttgataaatatgaccattatgtgtcctggggttactcttctcgagtagtatctttgtggtattctctgtatttcctcaatttgaatgttggcctaaaaagaatgggaaacagaggttcctaggagttaaagaacttacctgctgtcacaaaactaagtgtcagtgttagaattctaattcagatgtatctgattccagggtcttgcttttaaccctctctgtgaatgtatctatcggggtcttgaaatagacatattcaaatgtgtaatttggagagagttaagtaaaatgactatccacaaagatgaataggcacagtatagagaaaccatcatagcacagtgcccccaggctgatgatgggatgaggggaattactgcctttgagcataatggtcaggggaaggagctattacaggaatccagagagagagccttgtggagctccttgttccccagctagagccatgacctgcaggtgagggacaccctgctcatgaagacgcagagagggaggggagcaggggaaccaacagtcaaccctgaccctgtccccagtctcctgctagtgcttgcatgggctgaacctaaccagaagtcagagggtccaaaacatgagggatgctctccatacaggtcaggtgagcctcccagggctcgcctgggagaggtggggaagaacagggtggggaaggtggaaggcaggtcaaaagggcccaacacaaaacatccagtacagtctataatagccaatgggtcattcacttccagaccttttcatcagcacatgaggaaaagtcccagagaactcagctgtgcatgtggtttatttttgttcagaactgtttcagttgtctcccctagaggtagggaccacagagatggaagggcaaggccactgtcgtcaggacaggcgtagacagcctgtgcttccttcccaccactgtccctctaggctacagtctagcctattccatattcattcggcacagcctggaaaggaagtggattaacccgacatgaactctgagggttttggctcaagaaattgggagccacttctaaagatggtggctgggatctttgggctctcaagttagtagacttcacagtagcctacagggccctacgcaatcaggatgctcaccactctggcctcacctcttactagaatctccctccaccagccacagtggcttccttggtggtcctggaacataccagccatgttctcactggctgttccctctgcctagaacacttagggccagatgcccacacgacctactcctcatcttgaagtgtgtgctcaaatgtcctccactcacaagactggccctgcccaccctacttaaactgcaccacaggccccccgacaacatgcaccctaccctgctccatttcttctctaataaattgcatatactaccttccaaaatatgatacaattttcactactttttaagtgtattgtatattctgtgtttccaccctctagaatatgagctccctgagggcaggagtacctttctcttttgttcactcatgtattcccagtgccttgaacatactgcctgacacatagagggaatcaatatttattaaatgaatgaatgaatgaatgagattctcaagcacctaaaaatggtttgacccctatctcctagacctctctgttcaccagcacttatctgccaaggatctttcccagaatacatcgatcaccagtattgccaataccttgtggtcaaagtgatcagtttctccttgtgcttcaccttggagaggaaatgtactcgccactttggttctgtgtcaaaattaaatggcgaccttggctgattttgcttccccgcagaggttatttcttagtcgtaaagagaacattctatccttgagaaaaataatatttttgccaccttcagcttgaaaatggctatttgatatggatcacgtgcatctctatcagcggccgctggaaaagcttaggttgagaggatctgagaaagactcgttgcgttgtcagagggaagctgaccataaggcagaatgagtttacaataacttatttacctgtccaaatccttcatatcacattaaagctttcccctgctacccgggactctggagtgctaagaggaaaaaggaaaatcaattgataatgatatatttggtttaaaaaaatatattgattcccaggtaatgacagtcgtgcgttttgcagtgggggatgccatttcccgttgtgaagatggctttctcatagattacatttaaaagaaggaaccaggagtagctctgcctccccgtaatagatagcctctttctcctaggtattaaatctataatttaaaaaaaaaaaaaaattctccccagggaacctattctttgcctcctcaaggtcttcttgcccattgtgtgaaaaaagtaatgatttgtttttgtaattctagagtttgtgtccttttcagtattagattaaagacttaaatgttttctttttccccattgctggagtttcttagtttggattagatggaagacaataccattgttctctctgttattcagtgtcaatggctcaatggtggggattagggctgtgtgtattcggaggatgggcgggggatgcctcatatctgccactcggagtactctgctacccacttcgccccactttgcatgtgctggcagagtttgtgcacagcctgtgtgagataatccacagtatgcaactcagcatcagggatatctgaggcagagactagcatccagttagtgtggggaccacccaggatgctggaattcaaaagacatctttttgcaaaaaaaadaaaagaaaagaaaaaaaattagaccttttccccacccctaccccactgtttttccctctctttctagactatctggcttcctggtgatgctcacgctttgctaagtgttggcggccatcgtggttttcgcatcctggggacgaatcctgagcttgccagagacgggcggcgcaaggtaggtctctgcttagctcacctggaaataagaaaggcatcagacctgagcatagccagctctctcctctcatgctaaatgtgtgggggaagggaagaaagtacagtaggtcccctcgccctcttcctcagtgcgattttaccacaggcgtgtgtgatcaactggtactggggcttagctaagccattttagcctcaatcctcctagaatcaaccaaagagaatatctatgactctttttgttgttgtccagcccaggctggagcgcagtggcgcaatcttggctcactgcaacctctgcctctgggttcaagcgatccttccacctcagcctcccaagtagctgggactacaggcatgtgctatcacgactggctatcacgtgtgctatcacgacatggtttcaccatgttggccaggctggtctccaactcctgacctcaagtgatctacccgcttcagcctcccaaagcgctgcgattgtaggcgtgagccaccgtgccccatcagagaatctctgtgacagttccttgcttacctgggtcttggctttccccaggaggttagatctagggatggccagcaactagatgacctttaacctccttaaaaactgtaattaagttttataattaagttttggtattaaaatgtattattaaatatcatgaaaatattatttattcattataaagggattttaaaggatagtagctaaaagtatataaatgacttataatcctgttccccagagataaccattttagtgtttctttccaagctttttcttatgcacatacgtaaacagtgcacacaggatctgactgtgggtactgttcggggggcatgttatttagattccacaatgtatcaagccatttcgtatgtcggtaaatagaaatctatatcaccatttttacagactgtctactctgtggatataatagcatacatgattcacttaatgccctaacgatggacatttagcatattttaaatatttcactattacaaataacagcacaacaaacattgttgcatatgtatctgcatagtcatttgattacttctttggcttaaatttttagagtcctagcttaaacttttgactccaggttctccaagcaggatcaggcagccagaaatgccggggaacctggcctgccttgggagggcacaatcttatgaacagaatccgtgatctgggatctgctttagcccccaccaggcaggccaggaatgtgcctgcagaggcaaggaggcctggagctggagttgacaacgttcaccacatttcatgctactgaagggacaggagctgggcctggaatgaagcaggctggagggcagaggagtgggctctcggatccaggacagtggaggcccagctggcccagccttgtatgtccttgtgggacttgagcctttagaagtacaggctgcgtctgcataacacacagggcctagtgctgggtgagcacaggccatagcagccccgggactgctgtattctcagccgcccaccctcatgccttctgaccggtggcctcctggcctctgccttggaccaaactccagcttccctctgcagcaggggcagaacatcagaccaacaaggctcctgccacgtccagattctctgctggtcagagagctttctctttggactcagagacattgaggttggggatggctgtcccctgccagaacccttgcacagagaggagaaaatatggctttggaatctcaggctaggcgcagccttggttgtcagcaggaagcgggagaaggctctgggctgggccaggatcagccactgaaatggaaggttccccaccctgtgaccccacagtgcatccagccttcagcctcccagcagcccagtgggggcagccagaggagaggtgggttcttgacctagggagctggtgggctgttggcacacgcccatggcaccactggtgggcgacagctgtccttgctagcgatatcgccggcactggggaatcctttgcctccaggcctcctgttgggtcagagaaggggagttggaaaacaagacagcgcagcgtcagtttggcagccatggcatccccgctcctacacggggcaaagaaaagattgaggacgtattcttcacagaagccagctctccttggatgcacctgtgagtttggcaagagtgaagggaacagagacaccccagggcagtgggttttggtttcttcaatgttgacccttagtttggggtctaatcttccctgctgctgatgcagggtggcacatggctcttgttctcttgttcgtcctgagctctggcaatcatgtactttaggatggggagggactttgagggcagtttcaccaggcatagctggtcagatgcaccctatgtgggcctctatctctgtgcccccagaccagggtccctgttgtgaactcaagtctgtcttccctagcactcggccagttcctggaggatgggaatcatacctgatctgtctctgtgttccgctccctctgccactcataccagtacctgatgagctctcagtaaacaaatcactacgtgcagctgggactgtgcctgggagtgtccgcaacatgcagcctggtgctggctgtgccctcccctcacatgcaggagtcccattgatttccaagatgataggaaggttccgaggcccctagatggttctgtgacccctggggatcagtggaagcagctatcagtttactgtggaaactgggccagctcacagggtcctgtgtaacctgctacaaaacaggccagttcaagagccatgtgtggagggctgcgctctgcttttctgtggtttggtggaaatcacccaaataagtaagaaggccatactggaaccagctaggaggagtgaaatctgatacctgcactgcaggaaagaggggtggggggagttgagccgaggactcagtttgcgcagagcccaaggctgagccaagaatggcattagcagacacctcgggctctggaggtggtgaagggcagtgctgatcgtcactggtgctggagccaccctgggcagcatcccctgcctccatcattgaggccgtctcagtactgtctgtccaggccgtttgtccccctgccctcagcaaacgaaatgccctagatgccgcctgtgtcttcggaggaggttgcaaatgtctccagagctaacggcagttagagaacaccatgggccatgtcctgggcttccacaccccccgcctttacttcccccagtccatcctgcaggcgtcctctctgaccgcactcccctgcccgctgcctgccttccctccctcgtgccatggacagccttacttcctgagctctccccttgtccactcccctcttggcctccgtggtgtccacctcaaggagggacctgcaggcagacatctcactgctgctccggccgacacagacactctgctgcccccttgtcttctgactgtacctgctttccctggcccactctggggacctctgcagccccttcttcaaataggtatgtgggcgctcacacccctgaaaaggccgtgtgaccacacccactagctggggcccagatccctcaacagaacctcagccgaaccctcagccctacacaggcatcatttgggattctggtccgttccctgcctggtgccctgcagctgctccgcacctttccatcaacagggctgcagacccccagcctgcgctgtccacctcggtgtcagcaagtggcctctcctcctgcttcctgtccatcttgctcgtgtgagctgccgtcctccagctccaccgcctcctcctgccaggaagggaagctgttggtgccgcaggctttccttggctccctgtatccccagccctccctccactccctctgcttcagctgttcccagacttgactcccagatggcacctctgtcctaaggtccggaccatttctccagtggctcatgcgtagcagatccctgctgtctgattcacatatcagactctacctgtccaaaacaaagctgcttccttgctctccaaggaagccttgtactcgtactgtctcagtcctcctccctccctcccttagccatgcatctccttctcctttgccttaggctgctcaccttccttcctggaccctgagctcactgaggacagggatcatcctcttttctctacaagcccggcacagggccctgttcatgcatatctcttgggattagattattttattcagttcagagattacagaaccaccgacagtgtgtcctcataagcagcgtggtggcagggaacctgggattggaggcaagctctggattctagtcccaaatctacctctaactctgggaaagccctataaaaccttctgagcctcagtcttctgagctgtaaaacgggaataaccacggccttcccatttctcaggaccttgaaaggtgacaagggaggaacggtgccaccagggccagcagttcttagcccttggtgcacattgaccggagtgctttaagaattacagatggcccggccgtggtggctcacgcctgtaatcccagcactttgggaggccgaggtgggcggatcacttgaggccaggagttcaggaccagcctggccaacatggtgaaaccccatctctactataaataaaaaaattagccgggcatggtgacacacgcctatagtcccaggtactcgggaggctgaggcaggagagttgcttgaaagtgggaggtggaggttgcagtgagctgagatcgcaccactgcaccactccaccctaggtgacagcggaagattctgtctcaaaaaaaaacaaaaaaaactacagatgcctaggtccttcccccagatattctaattgctgtcatgaggatatcagtgtgttttaaaactttaaccactactttcaactcataggtgttattaccaagttcctgaattctatggcttgaggaactgagatgggagttataaagagtttgcaaaacaatattcctggatgatgtgtaatttgtctcatctttcagttcctttaaaatctaccccctggatcaagccatccaaaagctgggtaccttggctatgttgtactatgttcatcttgcgccaccccacatgaactctacgggctgttagaatatctgctgccctccatccaggtcacaacagtgcaccctcgtttaggattctgtggcagttcatgtttatcctgtcacttgtgactcctttgctaggacccttgggagaggtgtctctgattccaccacagacatattcttctcccgagccactgtcataggatctcatggacccacaaatcatgttgtaacagatttgcctcttccatgctctcgaaacggtaactctcaactctggctgcctatgacatcacccagggagattttttaaattctcatacccaggctacataccagatctgtgagatcacagtcagtctctgggaggtggatccaggcatctggatttttgtaaagctccccaggtggttctgatgggtgtggccaaggtcagaagcactgccaagcctggaggcagatttgtggcccacctgtaggctgtgtatggcattttctaaatacggtttcatgtaggcaacattccctcctccgtttcctgctcctacacttgtgattctctctcctacttttgatttatggtgtcttaatgtatccttttaagtcccctgcaatcctttctggaacttagcaaagtgaaaacaaatagagtagaaaggttcctgcttttctctggctgggatctgggcacagctcccaccccagtcagccctcgctggaaagagggtaggagcctcctgtttccccagccacagtagctggtcagcagcctcgttctgtaaccccacaatgggtaattgtagctagttctgccaagagccctccaagatcccgtagaagaggctggtttgggctgagagcggtggctgacgcctgtaatcccagcactttgagaggcc

SEQ ID NO: 97586 - DNA, 18880 bp, Homo sapiens
ctaagtgcaggctgtagcggaggttgcagtgagccaagatcatgccactgcactctagcctgggtgacagagtgagaccctgtctcaaaaaaaaaagaatgaacactggttgtaatgtgacaaaaggacatcacaagactagaaggtaaacgtgtagctacaagactgcagctacaatccaagtgagagatgatggtggcctaggcagtagcaatggccagaagagagaagccgacagattcaatggatagttagtggattattaaacgccaatggatagagtttaataacagactggacaagagggagaaagacgggaagtagttaggaagacaaaagcctacatttctactgaactaggtgattgtggagcctttacatagaaagggaatgcaagaagaatgggtttgagggaaaagatggattcagtttgggacaatgagaggcttgaggggcctctgtgtcatccaggcaaagatgctcagcaagcacagactgatacactattctgtaactgggcttgggatgtagacagacatttcagaatattagtctttagacagtatcagaagccatggaggcagataagcttgcacaggaagccatggtagtgtgagaagagggcgtaggcagaacggttgccataggttgttaatttggggtctaaaacacattgagagggaaaaaccctcccttttcttgaattcttcctatctagaaatagactagctaaagtaagtaatgcagtgttgactctatggttcccatggggacccttccggccagcacctacaatctaactgcctcacacaaaaagttttaaacttttcttaaagtggcatcaattaaaataaaagactccaaacttccagggacacaaacaaatgctgtcttcagattttccagatggtagaacttgagccttcctactaaatttttttcttggcattcttccaaattaaatttagcatccaatgttttctgtgtttgcaattaaatagatacataagaaaaataatgtccacatttacaaatgagcaactttagttatcatttgctcaagctcacagaccaaaagaaagcatgaactttaaaatttcattgctttgtgacttcattgctatacgcatgttacttataatctctctgaacctgtttcttcttgtttaaaaagtggataatatacaaaatatctgttcagtttcaaaaactagaagttattatgtaatatatgaggaccttctccccttcctcattttgtttggatacagaatcaaaagtagcacaatggacctaaagtgccaaatgagtccatacagagaggagagacgctcagaaaattctggggtcatgcctcctggcatccgctataatctatgaaacttcacagtacctactgacccagctatgactgctccaagaacctttcctgcttccctctaattctaagaagaaccctaggaggatcctagggtatgagaagagccatgcaggatccagccatccggctgggtaactttttagtttctaagcttccttggtatgtggggaagagaaaattaggaagagaatcagatgcagctgaaaagccctaacgacctgagatgagaggtctcagtttcagagcctgttcctcacagctgtctggcaaaaagagaacttttccgaactgaaaagcaacaccaagtattgactgccaacccactcggtcatccaggttaactgtgtatacagacctgtgcaggttatgtcaccaacggttactctgaaggtgaaagtgggcacgtgtatttgcacatcagatctttcacattcataaactgggatgttcttggtcttcatgccgtattcgtgtaatacctgaatcggtgttttccctggcttagctgttatcatcttccccaaactgcaaaaaccacaaaaaggtgtgctttgcatgccaaattggagattgaagcagaagcgtagaggccagttttaaccgccaccgacggtgacgagggaggcgccgagttccccggaggccagggccagagctggcgaggctggggcgcacctgtcttccggccccgctgcggcagtcactccgcaggagcaggcggggtgagcgaggtctttagagagagcacttgaatgcgggtaggagagattctcaacagaacagggctggcagcagcgccgcagcctctcagggaaaacctgacgatcccttcccgggcgcgccgaccgagcgtcacctccgcccgccccgcgcgccgccagggaccacgagaggggcggggcccggccgcagaccccaaccctcgccgccgagagggcggggccgagcacccacagccgcggaggcgtgggcgccgggcacggctttacccagaatgcctctggagggccggctccccgcgccccggccctgccgcccaacgctcccggccctggggccctgactgcccgcacgctgacctgaaggtcccactgtcctcgcgctccagcggcggggcctcggcgcggtgcctgctctgggacatggcgagaagggacggctcagcggctggaggaagagcggtgcggagcgacgtgctcgctccccgggtcgctggtccccgggaggagctccagcgccgccacctcctccgactcccccgcctcctgcttgcgttgctccagcgagggggcaggcagggtgggggcggagccttggtgccgtagctccggctacgccccctcgctgctcctctgcgggcctccgtcccggcccaactccgcccctgtcccttccagggtccgcccccttcccgcccggctccgccccgctcccgcgtgggcacaggcattgggctcccgggggttctccgcgcccgcccctgccggccctgaccagcctgtagtaactggcccctaggccgcagttctttgtccttagcaggaggccgtttcttgccgggagagagggattagagggattgtccggcgtgggtctagggtcgttgaggcctaaagttaagcctttgtggggaggacggattgggggctgggtcactttaagaaaaagattctaaaattacgaaggcagaattccagggagtctcccgggcctggtcctgaagcttgagaccccggatatatacgctccagggggctgcggtgcgctcttcgggtccccgagccctgtgtttaggaacacgcggggacgtccaaacacccgctcctctcccgccgggcgggctcctttgtcttctgggctttcgtcgcgagatggaacgctgggtcagtgcatcccagcaaaacacgttaggagtaaacgaaggcctttccggggacctgggtagtcggttgtaatggcgtttgcctgggatgcagcacctttggtgggccattagatgacgtgtcgcttctccaggggcttgctaggcactagcagaaatgctcccctgtgcttactcggtgttatggaagattgcttgcacaatgctattcgtacgaaaggatattattaaaagtgatttatgggcgggcgcggtggctcacgcctgtaatcccagcactttaggaggccgaggctggcggatcgcctgaagtaagcagttcgagaccagcctggccaacatggtgaaaccctgtctctactaaaaatacaaaaattagccgggcgtggtggcatgcgcctgtaatcccagctactcgggaggctaaagcaggagaatcgcttgaacccgggaggcaaatgttgcagtgagccgagatcgcgccactgcactccagcctgggcgacagagtcagactccctctcaaaaaaaaaaaaaaaaaaaaaagcgatttgttgttttgttagcatgtaagccctggatgcttgaaacaagtgaaagatgttcagaatctaatcaaattatatcatctgatgctttaattagagcctattctctcttcctctccgtctatatatgtatgtatatagattactatccatcactgttttaatggatatcttattggaagggctacatagtcagtatttcacaatatatgaactccgcataacacctatggcaaaacatttcagcactcaggtaaaattcattttttgccacaaaattacttaaaaacaggccagaactttatatagctcttgttaaaggttaagtagctgggataataatgaaacaaaaagatgcagcaggactccatttcaaagagagagagtctgtgtgcccaacttcagagtaagaaaccactaggtaatagtttatatagttacttatatgtaatgtggctttattttttaaataaagatttgcatataattgtttatatctgtgaatttatatttaatattaaacacagttttgtaagcatataagatggaaaatgaatgaaatgctcaatcaatgagctgtatgccatgaggattcaaaacagcactttggtgttgccaaaattccggtggtggacttgtgaaggaattccctttggactaggtccactgtagattgtatccgggactatcgttagtgcctaaattgcattgcttcccacagcactatatgcttcccttaaaattggcccattgccagtggcaaatcactatctactgtgatccttatcatagacattggtcatatttttacgttattagttttctgtgtatattttagtgctatagcctgccattccaagttaaacatgctcttagcatatcattttacaccgttgatctataattcattacctgagcacatgagcagaggcagggaattatacagtggtaaactacttggtgaaaccatgctttgtatttttaagatgtataattatatttaaaaacaagcaatgcttaattttgtgcctgattttcctctttaaaaatggatttatctgggggttgcagttgatgacgttttgattttaatatgtttgctgctgctaccaagagctttgtcaagcaagttggagatggagggagattagttcctgttccaagcctcagtgaagctgacaaatatcaacctctaagtctggtggtaaaaaagaagcgatgctttctgtttcctagatataaatttacttcaacaccttttacactgaaagatattctcctaggagacagagaaatttcagctggtaagtttaaatgtttgggagtgccaactcattcatctgtattattggcaacctaaacataggtcatatatgctacttatgttagtaatacacattttcaatgattaaagcaacttttattatgatgttagtgtaataacattattaagattaacaatgccaaaagtttgtataatatcaaatctcttattggtcaaataattttcaaatctatcaattattttataaattgttttaaccaaatcaacttagaatatgacatatttcttcatctataaaatgggatattatttgggcttacctatgttacatggtcaaatgagatgaaaataatttgtatttattttttacaattcaattattacaattggtaaactgaaatgtattgaagggtaggttatataataagctgatattttgatgagttactacttataaacgcttattttttcttttaattgcccggtggatcttgatgcttaagaagttctgttggctgaatagaaaatttgagttccttttaagaattctggctatgtgtttctttttgttgtaagattaattgaattactactttaagtcttggtgagtcatgttgcctttctctaacatttgggtatttgagtcttcaattgttaatttaacatgttactatatataatctacataagataaagatgtttaaaaaatactgagtttcttcttataaaggtatttcatcttatcaattactgaattatgaagatgaatcagatgtttcactctatggaaggcgaggtaaccatattgtaaatgacgttgggattaacgttgctggatcagattccattgcagtgaaagcttcatttggtatagtaaccaaacatgaagtggaagtatcaacattactcaaagaaattactacacggtcagtataataatcctaatatatttcagtgttttcattaaatactttaggtatataaacttcattacaaagaatgcttaaaacattgaggttgtattttactagtgtaatttgctagatatgtttgaaatacattrgtagtatatccaaactttgaataaggatagatatcaaaaatcacttggctgaagtcagagacctcagggccccagatcaaggagctaactgatgaagaggcagagaggctgcagctagagattgaccagaaataggatgcagagaatcatgaggcccagatcaagaatggcagccttgactccccagggaagcagaagactgaggaagatgaggaggaggaagatgagaaggacaaaggaaaactgaagcccaacctaggcaacagggcagacctgcctgattaccgctggaccaagaccctgtcggagctggacctggcggtccctttctgtgtggacttccagctgaaagggaaggacgtggtggtggcatccaacggcggcacctccaggtggggctcaaggggcagccagcgatcatcgatggggagctctacaacgaagtgaaggcggaggagagctcgtggctcattgaggacggcaaggtggtgactgtgcatctggagaagatcaagaagatggagtggtggagccgcttggtgtccagtgaccctgagatcaataccaagaagattaaccctgagaattccaagctgtcagacctggacagtgagactcacatcatggtggaaaagacaatctatgaccagtaacagaagtccatggggctgccaacctcagacgaacagaagaaacaggagattytgaagaagttcatggatcagcatccggagatggatttttccaaggctaaattcaactagcccctgtttttccctccctgaactcttggggctgagctgcaaccacccaactttctttcccactcttctctgggacttgtgggcctcagggcttggggcaggcatgggactggcccaggcacacaggtcccagggcatcaggagaaaggctggggcttggggtcttgtcctccccagttggcctactgttacacattaaaatgatttgcccagctaaaaaaaaaaaaaaaccacttggcttaaacaaaacttttaattgttccacaaaattactttggctctacacacatttgcttaattattagatttaaataatacagcaatctgtctgcaacaaatagagtccycttcaacagactttcaacagacagagtgaaacattctgcataagcatgttttaagaaaatagagaggagagacaaattattacatttcttttgggtgtattttctgactattaggattgccttgatttactattaggtgaactatgaatgaataacacatgatagcaaaaaatgtatttgattatgtgtaattagatgttatagagtcttgtgaatgtatcttctttattttagaaaaattaactttgaccacagcttgatacgtcagtcaaggagcagcagaaaggcagtattgtgtgtggtcatggagagcatccgaaccacacgacagtgctcactgtctgtgcatgctggaattcgaggggaagcaatgcgggtaaaccacacttgttgggttctcttactaactaaagtgttgccatgggaatttttttaagtattgaatttctagtcaggcttgtgtattttgtgaaatgttctgatgaaagagctgcagttgtataggattttgcacagcaatgtctgttctagaatatgaaaaaaaaaaacaaatcttgggattctaaacatgtgtaatataatgcaaaaacagtaatccttgtgaaattacgtgcatactggagtccctcaagttactatttaagtgttgttttaagaataaaaattgagtgagttgaattgattttatttttaagtgatacagtttttgactgggcacagtggctcacgcctgtaatcctagcattttgggaggccgaggtgggcggatcacttgcagtcaggagttggagatcaagttgggcaacacagagaaaccccatctctactgaaaatacaaaaattagccaggtgtggtggtacacccctgtaatcccaagccactcaggaagctgaggcacaagaatcacttgaacctgggaggtggaggttgcagtgagccgagattgtgccattgcactctaacctgggtggcagagtgagactccgtctcaaaaaaacaaaacaaaacaaaaaccccaaccaaaaaaaaaatgtgtaacataatgcaaaaacagtaatccttgtgaaattacatgcatactggagtccctcatattactatttaagtgctgttttaagaataaaaattgagtgcttaagttgaattgatttaagtgatagagtttttacactttgaattttttaaagctgaatttatagattttttttttgagacggagtctcgctctgtccccgaggctggagtgcagtggcgcgatcttggctcactgcaaactccgcctcccgggttcatgccattcttctgcctcagcctcccgagtagctgggactacaggcacctgccaccacgcccggcagtgttatccaggatggtttcgatctcctgacctcgtgatccgctagcctcggcctcccaaaatgctgggattacaggtgtgagccaccgcgcctggcctgaatttatatttttatattcaaatagtttttcaaagttaatattatcaatggccatacatgctttattcaaggttagttaaatcctttaaaaaatattagcggcaaggtgcagtggatcatgcctgtaatcccagtgcttaggaagactgagataggaagacagcttgggaccaggagttcaagaccaacttgagcaaaataatgagaccttgtctctacaaaaaataaaagaattagctggttgtggtggcacatgcctatagtcccagctactcggaaggctgaggcagggggctgcctgcggggtttgggtcattgtcttttagaatttgggaggctttgaaaagccgtgcttttgtgctggggaagatgtagcagtctcttctccaaaccacccatttgccttcggacttctctggggccagcagccatccaactaggggcccggggccacgggctcagctgacgaccatgggcttcgcgtccaaccagcagtttgcaggttcgagctcaggacttggcggggacaccttaggatgcaggagtggccaggagttcaaggttacagtaggctatgattgtgccactgctctccagcctgggtgacagagagagaccctgtctctgaaaaaaaaattggaaaagtatctgtgtttaattttcagctcaattatgatattgtttatctttgtcattcagtgacacctaataatgacttgattggattaaaaccaattgttagaaagatagggttcaaggataatcttttcaagtctttgcaaataaaagttattttcgcatattcagctgcctgtcaaattctgattaacattggatcatttttgaggcacaaactgaaacatttacttgattgttagcgattgctttagaaagctactaaaagctctggagggctttggaatggtagacaggctaggctgaaaactttaactctggcactgctttctaagatttcctgttaaaaaaaaaaaaaaggcttctgctccagagcattatggttgtggtagcactaatcatgggctgtaataccaaagtaagtgaaaagtgcagaggtatttcctaatatagaccaggagtttctgttggaccaattggatctctgctataaaaaatggtttaattcaagcagaataatyctttacttgggaawtttttgttttgtttttggtaggattataggaaatgtttcatttctccaaaaagctatccttacatgttatgatccttaattatgttatttatttattcaatatagtttcactttatggatgaacagaatcccaagggaagggacaaagctattgttttcccagcacatacaaccatagctttcagtgtttttgaactcttcatatacctggatggtgcctttggtgagttaagggtctgcatgaaatacaaatgattatatttttaaggagcattcattagggcatgtgctctctctctctcttttctctcatttctcgtgtctaacaattatagaagatgctctcagcactgtcaatcttatgctttggcaaaatagctgagaaagaccctccgttcgctgcttccccattccacttttctgcttcttggtgaaggttgtaaactctccactaccccatttaaaattataaataagagctaaaatgccatctactgacaaagtattccttagcttacatggggagataataaatgaccttcttataggtagtttttgatggtggcaaacagaggagtaggtagatagtaggatgcctgaagtgttaggatgcccaaaccagggcctctaaagacagcttttcttacttcagttttacttatcatagacccagcttccccttgcactcttcctaaaaaataactttaaaaagtgaaaatacttcctccaaaattgtcaccttgtataatacctaagtgcagctcactttaggtctctacatttcacaggtctttaaggtctgttggccaactggaacaagtccaggtgtagcccaagggatcaggaaaggcagcccctagccatggtaatttacaaatgtttttagacctgttyttgttcatttctgcaattttgtaggaggagggaatagggagtccagaaacaaaacaaaactacatgttaagtaaattgtctttttaaaaaatatttttaatttttgtggctatatagtagattatatatatatttatgtatgggatacatgaggtattttgatacgggcatacagtgcataataatcacatcatggaaaatggggtatccatcccctcaagcatttatcctttgtgttacaaacaatccaattatactcttttagttatttaaaaatgtacaaattctcagtctaagatggagaaaaaactgtacaattacattattttgactgtagtcaccctattatgcttccaaatactaggtcttattaagtaaattctaattggataactttaggtttttacagttttattgatggttgggaggaatgtaaatggactgatatatccacaagaatttaaaatatatatataatttggacttccacttctaggaatttatcctacagatatatttacacatatatgaaatgatatgagtgcaagtatattcagtcctcaataacaagagattggaaacaacattaaggagactaaataatggtgcatccttgcaagagaatactatgaagccaataagaatataatacttttaatagatatttttcaagagctgagtataatatgtaactatttgggcataaataattttatacacatacatgtatatatgcatctttctttatgcttataaaatatatggagtatttctggaagcaaacataagaaacttaaaccacgggtgcccctaagcccctgaggtagaagactgtggctggatacagggtgggccagagacctatttgtcactgtatctcctttctgtatgaattttgtaccatgtgaatgttaccttttccaaaagtatgtaaaagtcaacttttaaaaacaatacaatgaatgatttgtactagaattcatcaccccatcaaacaataaaatatgaattattcaagttataacatcttctaacaattttttttgtagacctttgtgtcacttcagtgtcaaaaggaggatttgaaagggaagaaacggcaacatttgcactgctgtacaggttgagaaatatcctatttgaaagaagtatgtttattgaagagtactgtgaatgtcttttttttttctttcctggcttaacacatgaggttttctattcagtaatctcatctgttaaggaaaaatttaaatttaaaagcctggctggtatggtggctcatgcctataatcccagcactttgggaggccagggcaggcagattgctagcactcagaagtttgaaacacttgggcaatgtgagaaaaccccatctgtacaaagaatacaaaagaaaaaaaattagttggttgcagtggtgtgcacctgtagtcccagctacttgagaggctgaggtaggaggatcacttgagcgtgggaggcggaggttgtagtaagtggagattgtgccactgccctccagcttgggtgacagagccagaccctgtctcaaaaaaaaaaaaaaaaaaaaaaaagccaaattatttcatgactagtggattcacatatttattaatgctgtttgcattatgtatttttcattttcacttctaacacatttcttttctgtttttgtccttttagatagaagagtgatggatgtcatttctcgttcacagctttacttggatgatcttttttctgactactatgacaaacctctcagcatgactgatatttcactcaaagaagggacccatatccgagttaacttacttaatcacaacattcccaaagggccttgcatactctgtggaatggggaacttcaaaagggagacagtttatgggtgctttcagtgttctgttgatggtcagaagtatgtgagacttcatgcagttccttgttttgatatttggcacaagaggatgaaataaaatgaaaaatgaatacaccgtgttggtgttttaggtgcagttgtgccacaaaccttccctaaattatctaggtttgctttgatgaattaaattaaaatgagaaaagcaaaaagaaattaacctgtctgggtatcatattccctatctataaagtagcaattataacagtagtgtctatttcttaagttgtcatgaaaattaataacattgtttatatcaaaaaagatttacatataaaattcagagattatgaatcatgccagtcactttagaatcatttttgggatgtagtctatcattttagttcaccttttttttttttttttttgagacagagccttgctccgtcacccaggctggagtacagtggcatgatctcagctcactgcaacctctgcctcctgggttcaagcaattctctgcctcagcctcccgagtagctgggattactggcgcctgccaccacgcctggctaattttttgtatttttagtagagacagagttttaccatcttggccaggctgatcttgaactcctgaccttgtgatccactttcctcggcctcccaaagtgctgggattacaggcatgggccaccgtgcctggcctagataactttttatataattaagagatttttgtaaataccaattttattttcaatcaactttcagttcaatatgtaaggatgacaagactgcacaagtagcaacttttggtgtttcaactattgcctttggtctggtaaaatgagaaaaatgtgttaataatttaatgcaatcttaaatgtttaattgcagtatcaaattaaaagcacactgaactcaacatggggttttgtgtacacagttaacaaggtgactgatagtagtaatgggctgccattctatgatgtggatatgctcacgagttttgtcttcataaaacgcaatacggtcattgtgaagttaagacaggtaagacacatctgtttctttgaaaatgtttaaaacatttaacatattcaattctgaaagatctttttaatctactctgctgagaaatctgaatttttcatacacaaacaacctaaattactatttacctttattaaaataattataaaatgaataaaatgttaaaattctagaactcaaggcaaccccctttgggtccctccttgaatgggagctctgttttcactttatttcactgtcttaaatcttgcaactgcactcttctggtccatgtttgttaaggctcgagctgagcttttgctcgccgtccaccactgctgtttgccaccgtcacagacccgctgctgactcccatccctctgaatctggcagggtgtccgctgtgctcctgatccagtgaggcgcccattgccgctcctgatcaggctaaaggcttgccattgttcctgcacggctaagtgcctgggttcgtcctaattgagctgaacactagtcactgggttccacggttcttttctgtgacccatgacttctaatagagctgtaacactcactgcatggcccaagattccattccttggaatccgtgaggccaacaaccccaggtcagagaacacggggcttgccaccatcttggaagtggcctgccgccattttggaagtcgcccaccaccttcttgggagctctgggagcaaggacccccggtaacactttggcgaccacgaagggacctccaaggtgaattgaaactgtaaaactacaaatggttcatcaaatggagccccagatgcagtccatgactaagatccaccgtagacccccggaccggtctcccagcccatgctctggtgttaatgacatcgaaggcacccctcccaaggaaatctcagctgcacaacccctcctatgccccagttcagcaggaagcagttagagcagtcatcggccaacctccccaatagcacttgggttttcctgttgagagtggggactgagaggactagctggatttcctaggccgactaagaatccctaagcctagctgggaaggtaactacatccatctttaaacatggggcttgcaacttagctcacacccaaccaatcagagagctcactaaaatgctaattaggcaaaaacaggaggtaaagaaatagccaatcatctattgcctgagagcacagcgggagggacaaggatcaggatataaatccaggcattccagccagcaatggcaaccccctttgggtcgcctccttgtatgggagctctgttttcactctatttcactctattaaatcttgcacctgcaaaaaaaaaaaaaaaaaaaaattctagaactcaaaatgtagtcacagcactcaatgccacatatatgcatatgaaggcataaggcaatcatgcagatatatgaaatacttgtacactgtattgtatgtagaatgattataaatttatttttaattatgtaaatacaagttttagaatgaatcatcttcctattcatgtggcattatctgtcattttttaaaaacaagtttaaaagcactttgtatgataatgggacaaaaaaattagaattacaaagtttagattatagggtgacttcttaatatggatacaaaaaattgagacaggttccaaaccaaaataaagaatattgagttacttagtttacttcaacggagcaggtttttttgagggaaggcgatgaaagagtaaatgattaagcatgtgaaaaagtattagaaaattgagcatagaaatgaagaaatattgggaggaaggaaaagatagtacagattcttgttttataaggtgtcaaattatgtgctagccatatgtattatttactaatctcatggttgtgttacccctatgtatacttttgtttgtttttgtatgtactcatctgaaagccctctatttttaaatagaatttttgatagtgtaaagaagttaaaggatgaacaatggtttggaaagagcaagtttcagaaggtagaaaaaactttacttgtttggaactcaattattttgaacagagctatttactgtctgaccatactttcctatatatgcagtgtagtagtccattttcacactgctataaagaactgccccagactgggtaatttgtaaaggaaagaggttaaattgactcatggttccccatggctggggaggcctcaggaagcttacaatcatggtggaaggcggggaagcaaggactttcttcacaaggtggcgggtgggagaatgaatgcaagaggaactaccaaacacttataaaaccatcagattgcatgagaacagcacggggaaaaccacccccatgattcagttacctccacctggtctctccattgacatgtggggattatggaaattatggggattataatttcaagatgagatttgggtgtggacacaaagcctgaccataccatgcagtatgcaaaatctatgttccgatagacatgtgccctttctttggtaccaacgtgatcttctacagcatctcttacatactattctcaagtcatatgatatcataacttgaccatgacacaaaattgccatggcactgtatatcctcctttgtttggcacatttatcaaaatttgacagcataccaatttgtaatgatcattcatcattagtgacaagaatgatgggaaatgaggtgacataaggaaagagataactagagaaagggaacgaaaactaagaaatttcatggcatcaatttaaaactatcaagacaaaagcttggggtggcagacatcttataaaggtttacaagagggaagaggagttgcacatttacaataatgtctgaaggaatacaaaagccaggcagtacagtctttatgcttgctataagaggcaaaaagtctttggtttggtcaaatatttttaaacattccccactggaaaatacccaaggctagaagcttacaccaaaaagtttagagactgtgttgcgttctttgtggaacagagatatacaactatcttcctgcacatataccaaaggaagactcttcagttctaggatttttatatcgtcttcataatgttataaaaatgtataaacaagtgaaatgctaattcctgggtccttaatggatattttcaaaatatgaggcactttaacttttaaactataaaaaaactggatattaacatgctggtaaggttaaagttgggaaaagcttgcagtttttgacatactatacatgtcctcctacatcctgaaaggggaaaaaatgcccactgggacccagaggtctgtttcatggtgctacaattcttgtttacagaataaagcagtaggaaacacagtcataccattcctgcaagttaagtttgcaaaacagcctcacatttattataccaaaatcaatgtattggggagatcaaaatatcttctcataggggaaaaatagcaaatacaacttggagaaaagtgactttgttttatacataaagtacagtaaatagctaaaaaaaaaaagtagaaatacaaatatgctatagttcatcgtgttggtatacattgtattccttgggagaaatgaagccatcaccatcatggtcattcttcttaaaaatatcttctaaaactgcatcctgatatgacttgtcacgtggcttctcatctttttcaaattccctttgcaagtagaggtttatctggaaggccaaaataacattcctttaattaaaaggtatcacagtgaatttccagtaactttaaggaatagttataataatgaaactcatgtgcaagattacttacagtaaatgatacaacagtatgaaaagctatttgaggttttatttttcttattctttgaagcaatgttttggagagaaacaggtcttcaaattagttttccctaagatgatagatggttagtggtacatactcgaagattaatatttaaactgaattttgttgaaactaaatgctttctaataatccatgctgttcctattatcaaaggaaaatcacgcatgactgccattagtgaaagaaacccaattggcatttctataatctctaaaactaatgaatatgttgtataatcaataaaacacaaccatggggtttgaaataaaatttagtattttaagtttttctatgcttctatagctctcctccaagtctacataactataataatctctttaataatgtcaaataaagaatcctgaagtattcactaattatataaaatttctatatgcaaacacacattaaaagtattgtccaatatagtagccactagccacatgtgactaatgagcacttgaaacatggctagatcaaaatgagatatgttactataaatataaaatatataacagattttgaagacttcaaaaagttatctcattgataattttacatcgatctcatattgaaatggcaatattatagatatattgagtgaagatataacattaaaattaatttcacctgtatctttttactttttaagatgtgactataaaaattttaaaattatatgtgtaacaattgtatttcctttggaaagcactaatccttataataactaaagaaagcaatgcacaatcatctggaggtaatgttcagtaaggctggcattatagaggcaagagtatttttgaaagctagagtttgagaggtttttagcaatacatatcccagggtcaacccattgcaagttgactttattttagagcaatcagtggaccttaatgaaggatacatcaactgttctcaaatgggactttggtcctacatgaggcagacacatttttttcttccagccaaagcttagcaatcctatgtaggggtaaacaatttttaataccttcaaatatttctcagtttctaagtaagtcaaattatttttacataaccaatattgctgatgcttaaacttgactccttttccagtaaactacagtacagaggtacaaaaagacagtgggtaagaacatgaccttaattttgctagtaatgggttccacactatttccactttttaatttaataaaatactgtatttcccccgtcctttccgtctttattaatattaaagaaagtttttctttttcttttttaaatgttccttcctgtacactgatgaaatagt

SEQ ID NO: 97587 - DNA, 16180 bp, Homo sapiens
tcaccgagaaaataagagccaagagagaattggctcgttctcccaccaccaggttacttcctgggggaagccaccgcttagggtggcctctccacccgcacttgggttctctcctcatctctgcaaggagctctgacgcctctgcttctctactggatcacttccctcccaaaagcccatccatgacctctgagagccacctcttccccagccaccagcctcttccctctcagaatggaatccttgaaagagctgcctagaatctggctctgcttcctcaccacttgttctcttagactcacattagacagtcttgtgtcaccttccactaccctgaagccatacttgtctggtgaccagtcacctcctaccaaagccagtgactaattcttagcttctctcacctctcagcagcattacataattggtcaccccttcctgaaacactttcttggcttctgactttcaggcgtcccttcctcactaaagaacggatgacccaggactcatccctggagctttccccatctgtgcacactcccaagtgatctcatgcagcctcatgactttatgcccatctccatgcccacttctgtccttacgccctgactcacagattcacaacctcttctctgagctagagactcatatccagctgccaacttgagatctctacatgcatgttaagtaaggcatctcaaagttgcaatgtctaaaaccagatgcttttccttccacagctgctcttcttccaggcttccttgtttcagtcaatgccacgagtcacctagtggcacagtataacccttggggtcattctgcataccgtttctcatacccctcatccagcccactgccagatcagctcaacctttcaaatattaatatgtgctcttgcctccgcagtccaatctaccgtcagctcttgcctgaccgaatgaaaagcttcctagttctttctggttctattcttgtccctaccagtctttcaacacagcagagttaactttttttatttttttgagatggagttttgctcttgttgcccaggctggagtgcagtggcgcaatctcggctcactgcaacctccgcctcccgggtgtaagtgattctcctgcctcagcctcccgagtagctgggattacaggcatgcatcaccatgcccagctgattttgtattttcagtagagatgaggtttctccatgttggtcaggctggtctcaaactcccaacctcaggtgatccgcccgccttagtctcccaaattgctgggattacaggcatgagccaccgcggccgactgagttaacttttaaaaaatgtaaaccagttcatactactgtcctctcagaattttctagtggcttcccatcacatatagaataaaatccaagttcttcaccatggccttctaggccctactccatctggtctcctgccccatctcctacatgccccttgcttactctactctggtgagactgactcttgatgatactagcatgtgccaggcttatccccacatctgggccttttgcccttcgtctcctctgccctgtgatactcttctcagattgttgtatgtcattcattgactccaggtctctgttaaacttctcactttctcaatgatgccttccctgctgacctactttgctttgtctctctgtatcacattcgtcactgacctgtcactcctaattttttttttttttttgagacggtgtctcatcctgtcacccaggctggagtgcagtggcgtgatctcggctcactgcaacctctgtctcccaggttcaagcaattctcctgcctcagcctcccgagtagttgggattacaggtgcacaccaccatgcccagctaattttttgtatttttagtagagacggcatttcaccacgttggccaggctggtctcaaactcttgacctcaggtgatccacccacctcggcctcccaaagtgctgggattacaggtgtgagccactgcgcacggccaactttatttagtagagatgggttttcaccatgatggccaggctggtctccaactcctgacctcaggtgatctgcccacctcaaccttccaaagtgttgggattataggcgtgagccactgtgaccagcccatttgcttatttattacatcccctctcctagaatgtaaactccatgagagcagggactctgtcttggccacctctgtgtatctcctatatgtcagaacagtagctggcatatgatggaacgctgacatgacctttctcttgcctcccccatgcccagaggtgattgtggccttggctgtatgtggctccatcctcttcctcctcatagtgctgctcctcaccgtcctcttccggatgcaggcccagcctcctggctaccgccacgtcgcagatggggaggaccacgcctgacaaccactcagcccccttccctccacctcctaggggaggtgggctgggccctcgctcctgactgttgctgctccccagcccatggacaggagatcctgggttgggcctccctctgatgaccccagccagatgagcgagtggggctcagcgtggcccatggtgcctgtcactcagcattcccatgcctgatgtttaccaagtgctgtgttggacactggctttctccaaacaggatttgcctcctccacgctccctacacacctgagatgtaaactggcagtcagtgttcactcaggacctaggattagaaaatggcagagttggtgctggatccaccttgcacttctatcaagccctgttctttttcctccagcctgaagtcttcggcaaatagctcagagggacacggtcttgcctctcagtgcttattttagtgggaaaaacagctaataccaggggtacaaacattggctcccaaggaactggatcacccaacagccagccagccacatttccctgtgtctggctagagccaccattagactcagacagaatgcttcaggaatcgttgtcaccccttcaactggagcaggacggaaggttgtctgtacttgggagggagtggggagtggtgggaagggagttgcttgtcacacgaatcaggaaactgctctccctcagctgggctggggtctccagggacctgagctacatgcaggttgtgagctggaaaagaaagttctagactgtggcccagaatagggctggggcagctcccagagaatgaatagtgctgtttcctattggactgatagtgctgtttcctgtgctttttcttcatttctgagacgcaagaagctctctgaccaggtcacttctggaagatccacgcagaagctcagtcggtatggttttattggccatatcaaaagtgagcacaaatcaaataactgcttgatccctctgctaccacccactgagaggagaaaagtcatttagttccaagataaccttggttccaggctagatacagaggggcccttgggacagctgtgtcaccaactctggagcagtctctggaggcaagtccagagcattaacataaaagtgtcccagtcccacagtgccccaggtcccagcacccctgctccaaccctaaccttggatacttttggccctttaacaaatcgccacctctgcttgcaggacttgatcccatgtgtgggctccaaggccttgtctggcccacaccttctttagtgtctctcacttccgtgtcctggcttcctcctggctccagatgagaatgtggtaacctaggaagagtgagaccagtctgacttacactttctgttaccaatctctcagagcctggggctggcccgcaaacctacaatttggtaaagaaatactaggaaggccgggcgcggtggctcaagtctgtaatcccagcactttgggaggctgaggtgggcggatcacgaggtcaggagaccgagaccatcctggctaacacggtgaaaccctgtctctactaaaaatacaaaaaattagctgggcgtggtagcgggcacctgtagtcctagctactcgagaggttgaggcaggagaatggcgtgaacccaggaggcggagcttgcattgagccaagatcacgccactgcactccagcccggggggacagagcgagactccgtctcaaaaaaaaaaaagaaatactaggaaactggacagtagccaggcattgcatgaccaagacaaagccagaggaatggagggccttggctatagagaccactgtctcccagccatcttcttcgtgggccactgccctggggtgaatgtggcagggcggggctgaggctggcccgcactgaaccttgggaagtaggatcggacttggcaagtcagagacattctcctcctactcacccattgcagaggccagcgtgtcccccatgggattgaattcattaagctgcagagacaagagtgtcagcatgaggagagggtgaaggtattagcagagacacctgatttctggtcacttttggtcaataaggtaggttgaatccctgcttcctcccatcattatttgaggacccaagcctcaccgaactgatgccagaagattctgggtcatagagctgacacatcatcttccctgagtttccatcgaacacgtcgatcgtcctcaattcataaggggtacaacttttgaaattaggatctgggtatcggcccacaacaatgaggttgtagcgaggatgccaggctgcctaggagatggagaggccggccatgagggtaaacacagaacatgatcaagggggacatcaaaaacaaatatgaacaaagaggaacatcaaaagtattctttgggctgagtgcagtggctcacacctgtaatctcaacactttgggaggctgaggcaggcggatcacgaggtcaggagatcgagaccatcctggctaacatggtgaaaccccgtccctactaaaaataccaaaaaaaaaattagctgggcgtggtggtacatgcctgtagtcccagctacttgggaggctgaggcaggggaatcacttgaacccgggaggcggaggttgcagtgagtgaagatcatgtcactgcactccagcctaggtgacagagcaagactctcaaaaaaaaaaaaaaaaaagtagtatttgccagtaacaagccaacctaataatggagataagtcttacagaaaactacaagaatggttttaggttgtgtgtgcctctgccattgcacatttttaatccctagctggcctccctggcccttagggcaccttcaggccttctccctcatttgcatttcctaagatcataccaactggtaaacgttttaacatcagcctgacccagatactgacctaagaggcctacaacaaagcagaaaaagcctctggtgaccaaaccctaacaggacttgagttctggaggagccccactgtcatcctgtctccatcaacacgaataactaagagctgagtgtaaaattgctaatggctaaaaaagagaaggaaacccacattccccagatcaccccactaaaaacaaatctggcagttattaaaatggcagaattggatgggattttcctaaacttctcaaggaagttttgaaggaagaaagacatggttagcaggaaggaagaaatagtacatgcgaaggcttagaaataagtcacaaatcacacacaggaagctgtaatgacttacgacacctggctagatacaaactgggacatgcagacagatggattatcgggaacactgatggattaacaggaacaccaactggggaaggattcttgacattatttattaagagcttggatgtgattgaggtacgtgggggccactcaatattcaatcatcatttattgaatacttaccagtacttaccaggtgctgggcatggggccaagtgctttaagtatactgactcatcttcacaacaaccctatcagttagagactagtattccctttttgcagatgaggaaacagatccaaaatataagtaatttgcccaaggattctaacccggggggtctggctgctggaaactggcgctccccaccactattctgaactgaccagagaagtataggcataaaacctgaagatctgaagaggatctgtagttttggaaaagaatgcagaactagcagagctcagtctgcatgggggcttaggcaaaaaggcatcaaaggacttgaaagctattagtgttggggactaatgatagagaagctattaacaagagcctgagaaaaggtgggaaaataaaagacttatttttattattagaagcactgaaacctgcaagacaaactaagaaggcaaagttgccaggcgcagtggctcatgcctgtaatcctagcactttgggaggccaaggttgggggatggcttcaacctaggagttcaagaccagcttgggcaacatggcaaaaccccatctctataaaaaataaaaaaattagctgggtatggtggcgcatacctgtagtccaatctacttccgaggctaaggcggaaggattgcttgaacccaggaggttgaggctgcagtgagctatgtttgtgccactgcactccagcctgggtgacagagcaagaccgtttcaagaaaaaaaaaaaaaaaaaaaaaaarggatcagcctgggtaacacaagaataccctgtctctacaaaaaaaaaaaaagtgaggcaggaggatcgcttgagcctgggagatcaaggctgtaatgaaccatgcttgccccactgtactcccacctgggtgacagagcgagaccctgccttaaaaaaaataataaaaaaataaaaaatgaaggtttgtgggtcaactgtacacaggtaactgaagctgagaagacagaacagagggtcaggatcttagaaaattctcacagtgagatcagagctgggctgaaaaaactcagaaaaatatcttatcagcgagacagaaaactcaaccatatgggatggcagaagtgggataaaaggaagagagagagccaatgggtaagagatgctctgtgctcgggccaggagcgatctggggtggcaggcttaccacatcagcccttccccactgtgggcagacctgctccggcctcatgatcacagcctccttctgcgagctccttcccaccgccactcaccttgatgggtgtgaggtgctggaagtgacggtgagggtgcgggatcaggcccagggggcagtcccactgggaagcagagtaaactcrgatctcgctcttctggtccgtggtcaggagccgggctccatcgggactgaaacaagctggcaaagtgaaaagcccctgagctgaaggaaccacaagccctctgtggtcctggccttgcaggccttctcctgcaggggtactctccctyccactcctctctagacaggarcggaaaggaagaggtgaatctgggctgtgaacaacaacaaaaaaattctggaaactcagcagctgatggggacagccacagccacaaaggttcccagacatcagcttggcagacgctatcaggggtaaaggtttgacgtagtggcttccacactgagggaaaaccccagcagtggtcagacaggcagggtctgcaggagagatgaggtctgggatatcacacctgcgttgacaggatgcctgtgcggcagcgagtagaggaagctggctttccctctaacctggygcaggtcccaaattttcactgtttgatctacggaggctgtggccaggaaccaatcacagcatgggttcagggccacatgcgtcactttctttttgtgcattctgagattccaaagctgcagagaagagctcggttcaggtggggacacagaaccgaggtgggggtgagggagggaaaggcaggacctcggagaacgcacctctttgccgtccatgttcagcaggatcacgttccccacgttgtctcctgtgaccaccattcggctactagcagacacatccaggctacaaaaccagatgctggagggagagactgtgttgtaagattcttggggacagagatagtcctatttactcactgttgccgctccggtgactaacccacagcgggcattcaataaatatttgttgaatgaatgaataactgtcttgccrtggattcctagtgaggaacattcagactgctctaccgtccagacagaggggatgggataatggggctcagaaatctgtctggttayggctgggcccaggatccccagctcctaaaagtccctgaagcagacaaagcttataccataaagcaagccctgaggcacgcctgccccccacaccccgggttctgagcaagcctcctttactgctctctcctttcactcttcaccctttaggccaaaggagacacaagccaaagagggattgcctggccctgttcctcagagctggctagaaaagcacttctgcccccttctgaacactgggggaaaaaacacaaccaggagctcttctggtccctcaaaccactggactgggaggctgactaggrgggtgcttcagggatcctgctattcagccagaagagctcagctcacagtttttctctcaaactctcaaatccatgctacactgccttttgccatcccctatgaatatcttcaagcaggaagatttcttgcggaagagtagcctggagccttgtctatccaattgcctgctgatttgcgtgcgcatgcactcctcatccctgcgggacagcccaggatccaatccaatgctagttacaccccagcaccctcacttaattcctcagggagcagtcagagtcacggctctagctggaaatcaaagtgacgagtattctgtaatttttttttttttttttgagatagattttcgctcttgttgcccaggatggagtgcaatggcgccatctcggctcactgcaacctctgcctcctgggttcaagcgattctcttgcttcagcctcccaagtagctgggaattacaggggcctaccaccacgcccagctaattttttgtattgttagtagagatgggggtttcaccatgttggccaggctggtctcgaactcctgacctcaggtgatccacccaccttggcctcccaaagtgctgggatttcaagcatgagccactgcacccggccgcattctgtaatttctccagccactttctcttgggaagtccagagcactttatggaaaagattccatccatataagcttccacccaggaacaggtcaggtcattacaccacagtgagtgcagggcattcagtctcaagttctgagctgttgctccattctctaggtggctttctgggtccacgccatgctggcttatctagtgagggtcaaggtccagtctaatacaggtatgacttacagaagagctgaggctccagaacaccttcccaaagcagtaacccacctggaccaaagtgagggcagccaaggagcagtttgagaaagagaaagaagggcggaaagtggctgacatctttcctttcttccctgggycaggttgggttaaggaaatgggatctggatgctcttgccggaactacacctaagcttagaagccctttcccctgctagttaaactactcacttgatggtgtctgagctggcaaaaactcgtagaatgttgcctttaaagtcttgcagcctagttgttccctccattgaggaggcgtaaaactggttggtattgagagggttaaacttcagcccagtgatgctccctccagctccaatctaacacgaggaaggaaaaagccagtgagtgatgatgggcctggccgtgaggaaccaggcctgggcacacatgctgcgccgtcacagaagcacccctcgagcagcgcttggggccaggtcagcttagacactaggacgctctctacagggccttcacttctttttcttttcctttgaaatagggtctttctctgtcacttaggctgaagtgcagtggcacaaacacggctcactgcagcctcaatctcctgggctcaagcgatcctcccacctcagcctcccaagtgcgtgccaccatgcccagctaatttttstattttttttttttaagatggggttttgtcacgttgcccargctggtcttgaactcctaagctcaagcgatccccctgccacggcttcccaaagtgctaagattacaggcatgagccgctttgtctggccccttcatttctttcttttttttatttttatttttatttttatgtttttgagatggagtcctgctctgtcacgacctcggctcactgcaacctctgccttccaggttcaagcgattctcctgcctcagcctcccaagcagctgggattacaggtgcccaccaccacgcatggctaaattgtatatttttagtagagacagggtttcaccatgttggccaggctggtctggaactcctgccctcaggtaatccgccacccttggcctcccaaagtgctgggattacaggcgtgagccaccgtgccccgcctcccttcatttcttaaggctttatttttacttttttttttaattaacatatagcaaatttgggatataaagttctctgaattttaacatatgtatagacttaaataaccaccacccaaatcaggatgcagaacatttgcaacagcccaaaaactccatcgtggtatcccattgtaatcacaccctcccctcgcccccagcccctggctgatctgttctccatcactattgttttgccctcatagaatgtcctatagaccgagcacagtaatcccaacacctggggagactgaggcggggggattgcttgaggccaggagttcaagaccagcctaagcaatatagggagaccccatctctacacacacaaaaaaaatttagacatggtggtaggtgcatgtggttctagctactcagaaggctgaggtgggaagatgacggaagcctggaggtcgaggctgcagtgagttgcgatcgaatcactgcactctagcgtgggtgacagagcaagaccctgtctctaaaaataaaataaaataaaattaaaaatagaatgtcatgtaaatgaattaggcagtatgcaaccttttgagactgtcttgtttcatttcactcatcatgcctctgagattcatctgagtttgctgtatcaagagctcatctcattttattgctgaggtattccattacatggatgtgccctaatttgttattcccacagtgctctctttagaagagcttcagctcagagcagtggctgagttaggagggcaggagtcagatctgtgccccttcctattcttccaaacattccagaaaatgatgatgaaaataatcatgagaatatcaatggcttaaccttattaagtgcttactatgtactaggcgctggttttttggggggattttctttgtgtgtttttttttttttttttttttttttgagatgaaggcttgctctgtcgcccaggctgaagtgcggtggcacaacctcagctcactgcagcctccacctcctggattccagtgatcctcctgcctcagcctcctgagtagctgggattacatgcccacaccatcacacccagctaatttttgtatttttagtaaagacaggtttcaccatgttggtcaggctggtctcgaactcctgacctcaggtgattggcctgcctcggcttcccaaagtgctgggattacaggcgtgagccactgcgcccagtcaggcactgttttaagaactttacatccccaagatgtaaagttctccacttgtccgcctttctccaccttttccacttcttctttacgctgcagctatcccagcctcacagacctgtacaagttcttctatgcaacaaccacttagctatcacaacatactaactggcacattcccttccctctataaaacattctaacctcacggtcattctaatgctcatggtctgccaaatgcttgctggtagtatgacaatcttcggctccctccagttgagttctatgcttaccaaaccaagggttggttgtagttgttctcaaacctgtttattccaattgtatcttttattgcaattaacaccaaatttaattaagcatgtaaattgatgaaatacatgcaaaaacaaaggccattattactactataaaagccgtgttgaaagctttggaagaacttgataatgagttgcaaaaataatagctattggctgggcacagtagctcacatctataatcccagtattttgaggggctggggcaggagaatcgcttaaggccaggagttcaaaaccttgatgcagtggtgcaatcctggctcagcgtagccccaacctcctgggctcaagcaatcctcccgcctcagcctcccaagtagctggtgctataggctataggtgtgtgtcaccaatttttttttttttttttttttagagacagggtctcactatgtaactcaggccggtctcaaattcctgggctcaagcaatccttccacctcaacgtcccaaagtgctgttacaggcatgacccactgggtccagcctctataaaaaattattaaaaattagctgggagtgatggtgcacacctgtgctcatagctattcgagaggctgaggtgggatggtgacttgagcccaggagttcaaggctgtagttagctatgatcctgccactgcattccagcctgggtggcagagcaagaccctgtctctattaggaagaagaaaaaaaaaaaaaaaaaagaagagccatcaaattaagcatagggtgagatacttataaaagattaaggtaataaaaatgtaaaaggaatctgcaatcagattgcttcacaactgtcttactttgtatactgaaaaccttaaatttgtatcaatgtcttcaattcaaagtcaacaccacagagttgatttgagtttctctctttccatgtttataattcccttctttgacagtgaaaaatgtggttcccattttactcaatatacttacatatttgattaatctccttgtatgtaaccagtcttccactattgctgccacacactccccaaatgcacgtcttccttaggatgcttggactcttttaccctcccgagggcacaatcaccctcttccctctctccactccctcaaccatgcagacacaacttccttgcccacatcaggcgccacggccgcccctctccatgcaaaagccctgctcaccccacttgactccgccaccccactctaggcctccctgtggttcagcatcctcaaccccgcttcagacttcactattccatgcccggcctcctctactcttcacccctgcctacatggatgcccttctgatcttgtttgggcccagtctctatgtactgagctgccacctgccacctgtaatgacattcacctcagcttcaggggccccagcatctggcacttccagcactgtagccttcccactacgtaaacatctatcttgcttgatcctacctaatgacttttggtttgaactgttcaggaagggaaaaagaagatgaagaaagaggaagatagatagatagatagatagatagatagatagatagatagatagatagatatttcttttttttttttttttttttgagatggagtctcactctgtagcccaggctggagtgcaatggtgccatctcaggtcactgcaacctccgcctcctgggtttaaacaattctccagcctcagcttcccaagtacctgggattacaggctcacgccaccacgcttagctaagttatgtatttttaggagagatggagtttcatcatgttggccaggctggtctcgaactcctgacttcaagtgatccgcctgcctcggcctcccaacagtcatgagccaccggacctggctgaggaagagatattgatctttccttccttttttttttttttttttgagacagagtcccatgctgttgcccaggctggagtgcagtggcacaatcttggctcactgcaacctctgcctcctgggttcaagcaattctcctgcctcagcctcccgagtagctgggattacaggtacctgctaccatgcttggcgaatttttgtgtatttttagtagagacagggttttgccatgttggccaggctggtcttgaactcctgacctcaggtgatctgcccaccttggccacccaaagtgctgagattacaggagtgagccaccgcacccagccagatattgatcttaaaccctccgtctccacagactagaaaaagagggaataattcccaagctaaagagggcagcataattttttttttttttgagacagagttgtgctctgtcgctcaggctggactgcagtggtgcactcagcttactacaacctctgcctcctgggctcaagcaattcacagaaatcagcataatcttttttttttttttttttttttgagacagagcctcactctgttgccaggctggagtgcagtggtacgatctcacctcactgcaacctccacttcccaagttcaaacgattctcttgcctcaacctcccgggtagctgggatgacaggagtgcgccaccacgcccagctaatttttgcatatttagtagagacggggtttcaccatgttggccaggatggtctccatctcctgacctcataatccgaccgcctcggcctcccaaagtgctggaattacaggcgtgatccaccgcgcctggccagaaatcagcataatcttgatacacaaatgtgacaaggatttggccaattttacacatgaacacaaatgcaaagatcttaaaatatttgccagctcaatccagtaatatttaaaaatgataaatatgttatggccaggatgaacttattccaagaatgcaaagttggtttaactattaaaaatcaatcgggccagctgggcgtggtggtgggtgccagcttcttgggaggctgaggcaggagaattgcttgaacccgggaggtggaggttgcagtgagccaagattgcgccattgcactccagcctgggtgacaagagtgaaactccatctcaaaattaaaaaaaaaaaaaaaattcaggcatcaaaagaaacaatcgacaaagtgaaaaggcaatctatgaagtgggagaagatattttcaaatcatagatctgataagaggttaatatcatggccgggcgcagtgtctcacacctataatcccagcactttgggaggccgaggcgggtagatcacctgaggtcaggagttcaagaccagcctggccaacatggtgaaaccctgtctctactaaaagcacaaaaattagccgggcatggtggcgcatgcctgtaatcccagctactcaggaggctgaagcaggagaattgcttgaacccgggaggtggagactgcagtgagccgagattgagccattacactccagcctgtacaacaggagcaaaactccatctcaaaaaaaaaaaaaaaaaaaaaaaaaggttaatatccagaatatataaagaacccctacaaaacaacaacaaataacccaactaaaaaacaggcaaacaggagttcaagaccagcctgggagacatagcaagatccaatctctataaaaaaaaatttttttttaacttagtaagtcctttctgtaagagacagcgaaaaaaacaaaacaaaacaaagttagcaaggtatgatggtgagcacctgcagtcccagttactcgggtggctaaggcagcaggatcactggagcccagaagttcgaggctgcagtgagctatgattgtgccactgtactgcagcctgggtgaccaagtaagaccctgtttcaaaaaaaaaaaaaggcaaaggacttgaatagacattccttcaaagaaaatatacaaatggccaagaagcacacgtaaagatgctcaatatcactaatcattagagaaatgcaaatgaaactacactgctatcacctcacatcccttaggatggccactatcaaaaaaacagaaaaggccgagcatggtggctcacacttgtaatcccagcaatttgggaggccaaggcaaatgaatcacctgaggtcgcgagttcaagaccagcctggccaacgtggcaaaacccgtctctactgaaaatacaaaaattagccgggcatggtggtgtgcgcctataatctcagctactggaggctgagccaggagaatcagttgaactcaggaggca

SEQ ID NO: 97588 - DNA, 16458 bp, Homo sapiens; identical to SEQ ID NO: 97413

SEQ ID NO: 97589 - DNA, 16391 bp, Homo sapiens
atataaatatatatatatgtaaaggggagtttattaagtattaacttacatgaccacaaggccccacaataggctgcctataagctgaggagcaaggagagccagtccgagtgccaaaactgaagaacctggagtttgatgtttgaggggaggaagcatccagcatcggagaaagatgcaggctggaaggctaggcctgtctcgctcatttcacatttttctgcctgctttatattcactggcagctgattagattgtgcccaccagattaaaggtggatctgccttccctagcccactgactcaaatgttaatctcttttggcaacaccctcacagaaacaacgcaggattaatactttgaatccttcaatccaatcaagttgacactcagtattaaccatcacatgggccatcccttccagtgctggtctgttctgttcttgaagtttgtattgacctatggccttcaaggtcccacccttggcccttactcttaaaagagtcatttctttgtcctttagagactgtcttaaaattcccttaagaatgccttccatcactcttaggctgtaacttggtcatttccatcttatttagtttagaatataatagatgttaagaactagatggggtattagagttcatcaaatttgacctctttaaagaaactaagatccagaaaggttatgctggtaagccaaacagatgtcaaagcctcaaagctaggtttcaaggtcagtgatttttccctcgaagataattactaattcaatatctcccaaagtgtgtttggtagaatgttattactcccttaatatgctcatgaaaaaagaaaagattttcatcaccaaatatgtttgggaagtgatgcaaattatatttccttcttcaaggttcacaatgaacattaacatatcaaaggttctgagtagtgctatgggaaagaaatttgttatatttagttttagtcagcatttcccaaatttacttggtcatcaaacacttttctccagaaagacctataaacatccagaggaactaatgttctaaggaagatatttttggaaatgctgagcagatgctaaagcttcagaggtacctacgtggcctcggtagcagataccattgctcatttctctctgcattacatgagctctcagacccaaaactactttccatgccttctttttcaaagaccctgttcaccttgagatatcctctgaattcctcttcctaatctgagaaatagctccagcttttagctcatttagaggaaagatgattccatgcatatttcttcaggatatttttgagacatagggagtgcagtctcagaatatcattattatggtttttcagtaccagaaatactttatatacaatgacatatatcaaataaagagtacattctttatcaatgcagaaaggttttaaaggaaagaaggaatatggattgccgggaaaaacaaggaggaattataaagtataatagaaagaaataagaaataactaagtgataaaagtattatttgttcattattgacttgctaatagctgaatttctggcatgcataaatgcattcattcaacaagcattccttgaacacagttatgagccaggcactgtgctaggtgctatggacataaagagaaataagattttaccagttcagctaagtaaacaactaactttaatacaacgaaattaaagtgcagaaataaaatgctacaggagttacaacaatgtgctatgggaagaagtggttaattctccacagaggtaccaaagaaatcttgactataaagatgacttttgagacaggttgagaagaaaagtagttcagcaaatggagaaggtgggaaagggtatttaggcagaggaagcatcatgaaattttaaaagattttcagtcttgctcttcatatggcagcagaactgacagcatggtcttgtcttaagtgtctctttttttcaccctgggggcagtgagctgagtgaatgaatggtaagagactttttttttttttttttttttttttttttttgagacggagtctcactctgttgctcaggctggagtgcagtggcacaatcttggctcactgcaacttctgcctcccgggttctagagattctcctgcctcagaatccctcaactgggattacaggcacacaccaccatgcccactaatttttgtatttttagtagggatggggtttcaccatgttggccaggctggactcttgaactcctgacctcaggtgatccgcccacctcagcctcccaaagtgctaggattacaggcatgagccacagcacccagccaagagcccttaatcctgtcctttgaggaagacaaataattttgatggcttaggaggtaatagtgttaacatgattgctacttctcatgttgtctgaaccactgaaaattgtttatagatttaatgtgactatgcctcattgcataatctttctccacctacatatcttgttacctgtcacatgaaattttcatgtcagtgagtaaatctacttattttgttatgtatgagttgctccttgccacctttgggcttttgcctcacctagaacagtatatgtcctcttttaaaataattcatatgtctaatactcttccatccctagagaggtgagactacttctcccattacctctctctaatccaaacacctctcttcacatctgtgctctagccgtcttgaagtacttagttttgcatgaccacacaaggcatctcaaagcctttaccttttcccaccagacagtaccactcccccactttagcagtttcttcagctttcagggtccgaccaaatgtcctctcctttaagaatactctatctactcttcagtgtgaattagtgcatctgttctgtttgctctgctaatgtgctatatcaatctctaatatggagtatttgtcttgctgacatatataagtatctcttcccctccctcaaacctaccaccctcctccccaaacttaacttctctagggcaggatattttaaacatccagccaagtactcagtactatgcacacttctcagtgcttagtgaatgaaatgaatgtatgtatgcattaatgaatttttaaaatattactcattaaaaaaaatttgttccaaatgttaatttacttcagaaagccttctgtctgcagtcctgacattctgatcactccttaactgtgacattctagcattatttgatctattaatcctgtattgatatctctttatctactttcatttttcagttttatctgagacaacatggtatagtagaaataatatcagtctaggaggcaagaggcctggattctcattctgacttactgttcgtttttgctatataactctgggaaagttaattaaccccttcaatttttttttctcaaatggtttttaaatatttgccttaccacagatgtaaaattttttttttttttttgagatggagtctcactctgttgcccaggctggagtgcagtggcacaatttccactcactgcaaggtccgcctcctgggttcatgccattctcctgcctcagcctcccgagtagctgggactacaggcgcccaccaccatgcctggctaattttttgtatttttagtagagacagggtttcacagtgttagccaggatggtctcgatctcctgaccttgtgatccacccacctcagcctcccaaagtgctgggattataggcgtgagcaccgcacctggcccagatgtaaaatttttaaaaatcttttactggccaggtgtggtggctcacacctgtaataccagtgctttgggaggccaagacgggtgtattgcttgagcccaggagtttgagaccagcctggacaacataatgaaaccccatctctctcaaaaaaaaaaaaaaaaaaaaattagttggatatggtggtgtgtgcctgtagtctcagctacttgggaggctgaggtgggaggatcacttgagcccaggaaacggagattgcagtgaactgagatcacaccaatgtgctccagcctgggcaatagagcaagaccctatctcaaaagaaaaaaaaagaaagaaaatcgtttactaataacccccaactaaaactaaaactcctgaattaggggaaccattctgtttcttttggttctctccctaatattcagtactttgtagccctcatgttatatagactgacagcaacctctggccttttccattctaagctctaaaactagacttctggatctggggagtggcagatctagtgcctgacttggaggcttctgactgtatgtttatccattgttgcttttcagatccctagatttgtttccatcagtatcactaatggaccagtattctgtggcgtggttggagcagtagcaagacacgaatatacaggtagaataggacattggactgttatctttgtgacttaagggaggaaggtggaagacatggcccaaaaattctccacctgtctttctgacacagttattggcccaaaagtgagtcttgcggccagaatgataactgcttatccaggtttggtgtcctgtgatgaggtaacatatctaagatccatgctacctgcttacaacttcaagaaactcccagagaaaatgatgaaaaacatctccaacccagggaagatatatgaatatcttggccacagaagatgtatgtgagtatcattgtgtgatagtttcattctcatctcttacagaacaataagtttttgattacatgaaattggaaaaaaagatgctgctagtactggcatgctggaataagacacacaaaaggagtgtttagtgtctgagagatttagcttttatgtttagctcttagctagttcttcaatgaacatccttttctcctacaggaagagaatagcaataggtcactaacccagatcttctttgttctttttttctttgtgtacttcaccattcatttacttccccgagcctggaacaatcaataatattccctctttactccctctcccccaaaatttttagtttttaaaaacctttttattcagaactctgtacctccttaattatctgaaagtatttgcttatgaagacagctgttcctaatctatttttaacagatacatttcactttgttctttttcccagaatgtttggaaaaagacatttggcaagaaagagaaacaaaaatcaccctttgttaggtatgttttcttttgtaacttaaatcatatttgtttcagttatagacagctaaatgtgatttaaaaaacaaaacagtgcaagactaaatgctcttaagctttattaaaaaatagagagcaaccttcttagtgaaattatatttattttgaagaggatttactatttcttttccatgtcaaatattcaaatttcaggtgaagtcctataactgcctgagaaacaccaacatttagtaataatctttgtaagtcagagtttacctattgagatcggaacagcttattgtggatcatctttagagaaaaattcataatccttagaatagtgaaaatagcaccaagactgttgtcacccacgctatatattccctatctttgtatttattttagtctatacttattagtccattacttttacatagtagtgacagattttgaagactaaattgttattaagaaaatttttacaaaaagctaagagacacccgtgtccacaaggtgcctaatttttctgaatgttactacttaggctctggaataagccctcaagaccagcatatattagctcagaattgattttttggaaagagatatgaagccccatcaatgaatgagattcttctgggaattctggaggaaaaaagccattctgagagttagatttgcaaattgattcaaatcaatagagtatctaccaaaaagcctgcaacaatcaataatgttgattattgttatccaggagtgttaggtgctccctgtctctctacagactkggagaragaattggaagccttccaaatggcacagcaagggtgyttgcaccagaagaagggacaagcagttctgtatgaaggtggaaaaggctatggaaaaagccagctgttggctgaaataaactttctggmacagaaagaagggcataggtaaaaactcctgctttctgacttagtcagagcctacttctcttggggcctctttctcttgttagtgagactcttgtgtcattagattcagcattcttggaccggtgaagttagtaacctatgtgtcgtacaggggactcctgatgaccatagtcatattcaccagggtgttgccattgatgctgaaggaagcagattccaagcagtgcttctatgccatccagaccctcatggccatcttctttgagattgatacatgcccagcctattaccggcaagagtgcctacaaagacagctttgtgggatagtggaagaacaacttcackgcctttttagtgacctcttatttgtgaaggtaatgaaggcagtggctttctgaattgggttactgttatattttgtggatagtcagacctaggattgttttctaatctaataacctgaggatatacatatacatatatggtaggaccaagatgtgaaattctttcaacaccaaaactcaggctttctccttttgaggagagtgaattctagtattgaacctgacacttagtagttttatgtcctagagcaaatcacttagcctctctgagtcatagctttttcacctgtgaaataacaattatattactgtatgtttttatgtgaattttaaaggagatggtatatgagagattgcattgtatattttaaagtactaaatacattaaggtggccctcaccagtggcatatccccaggaattatatccacgtgttcttgagttggttccaatttctttatttttttaaccctaccttcctgttcccttaccacagaatatatcatttgaaaccagcatctggatctcaaaagccttcagaggtctagggtttatggggtttccagtagtgaacaagctaaaaattcactggtccacaatttgttttatttatcctctgtcacttctcctaatctacccaccctgcagagtattttggaatggaacactaagatctgtctaatccctcaacatatccctctcttaagataggccttgcttgggactctaaacccttgcctacgtagattagcagtcatctcactttggctctcaggttcctgatagttcatgtgcctcagcctagcacaggaaacaatgttatgtgatgtgtgttgcatcttgttctgacaagtctcatgtacagattcatcctggtatacttggaataactggggtactggagctgcccaaactgtcattgctaagttcaacctgtcatttactccttagtcataaccctttaagggttttactagagtctggtatggaaaggagatagatatctgtctctaacccttcatgaatttcgaggttggctcccctaaagtggtcatctctaatgtgcaatcccttacttacctccctgcagctacccttcacaggtgctttggaaacccactttattgtgaggtcctatgccaggaccttctctcwaaggacgtgttgctctttcakgtcctacaaaaggaggaagaggaaaacagcaagtgggaaamcctctcaggtaagcttagcttcccagagttctaccctggtccagctgctgaagctcattctccaacatgacattacttggcctttaygaggtacataccttttccttgctaacattgtgggccacactaggccttcccagataagcacactgtacaaatcttatacaagtagggtgaaaatactcaagatttgcttcagataacttaatccaatcaatctacaatagttscttttataagcagcccaagaggtagggctaggaaattacgatttataaacatgaaagtccagaaaaaagaattgtacactattgatgagaaggatgacttgaggatttggatgggggatgggagaagggaggaaattaggagaggaataaagggtagaagtatgtataaaagcagaaggcatcccagagctgtgatgtaatagaagcaagagctgttataaggtgaacaggaatagtgattagttgtaagataccgattggtacagagaatgttgttagtttataagagaaaattagagaacaggcagacaggtggggtaaaacactttaaaccatggtacactccagtcatcttcatcctttaggtttttttttttttttgactaaattattatatttttgtgcctttaaaactacagtcactgagaatggtgctttcctcagtcatagcctgttttctttatagccaatgccatgaaatccataatgtatagtatttctcctgccaactctgaggaaggccaggaactttatgtctgcacagtcaaggatgatgtgaacttggatacagtacttctcctaccctttttgaaaggtaagtcccttgaagacttcaagtgaaccaattacagatatcattgcaattagtgatttggtgagtagttgagtataggtctctcattatcattctrgcttcatttcttctaaaaaagaaatccaccttctagaaataagttctggcattgcctgaagagctctttgaagacttgtaatgctacttgagtaaggttttacttaagcgagcttattgttctctttggggctgactgatgacctggaaaagttttccaattatttaatacaaaatargtcgtgagtttccctttgtgcatattcttgttccagagtagacagtaagcaaagaagatgatgttgctaagatttaagaaaatccatggtgttagtgaagatacaatgttatgcacatagcaagagtttaataaaaaaagagtgcaaagtagaatgactgatgccataaagaataatgaaactatcagaatcrggtaggcatagttggagaggggatgttcttcttagaaatgaatttttcttattttaatatttaattcaagtgtttggtgggcaaggtactaatactaagccttcttgaggaatattgtaatgaacagcataccttcaagtaaagtatggtcttgttgagaaaataagacacacacatgaaacagcagttcaggacaccatggtagttaagggccagggctctagagtcagaaaaccctgggcaccatgggctcctgcactaaccaactatggaactttgaataagttagtcaacttctcactcatcagtcaaatgaggataataatagtccctacctcttggggctagttgaggattaaattaaataaattatggcacataataaatattccatgactgttagctattatattataagctttttactctgaaggttttaggttcaactagacagtttacactgatagaactatgatagaccatacttaacaatggcttttcttactcagaaggaaatacaggatgctaacaggacaacagcaggtacttttcttcagtgagagtttttacaggagtttacatagcactccaggggctattctctggaacctcaagtaatagctcagctgtgaggaatgaaaccatgactcatgggtgcttagaggcctcatggaccaactgaaggccatatctcttataatggcccgaacaggcatcactttcaggctctgcaagaggcatgaccttttacaagaattattatacccaaggaagcccaaatctgtggcttgccaccagttcattcagttttcccagtccaaattcagtttcccaagcagaggttgttcttagcataagcaaagaagtttggctaagtggagaagggaggattgaggtgggagcagtagacaggggtagatgaaaagttttcatctttatttaaaaaaaaaactgtacacattttcaacatgatatattctagatttgtagaaatcttgttyactgctgattgactgattgattgattttggcagaaatagcagtaagccaactggatcaactgagcccagaggaacagttgctggtcaagtgtgctgcaatcattggtcactccttccatatagatttgctgcagcacctcctgcctggctgggataaaaataagctacttcaggtcttgagagctcttgtggatatacatgtgctctgctggtctgacaagagccaagagcttcctgctgagcccatattaatgccttcctctatcgacatcattgatggaaccaaagagaagaagacaaagttaggtaaggaagggctgttccctttttctcaggtctgaacaaagagtccctgtgggggtatctgtgttcagaaaggccatcaatatcatatatcaaggggttctctcattcgtttgtttaaagatggagttttgttatgttgcccaggctgtaactcctgggctcagtgggcgcataccaccacacccagtttgagggtctctctctcaaagcctatggctaagaaacagagagaaaattatcatttaaaccatgaaagagccatggatagtgaaaaaatatcctgtattttcagacttgtcttcatttcaggaattctagcgcctttttaacccaggtgttggtatttgtgttttgatttttggttctgaaaatattgacataatcttttattggcttctaggtgcaaagaatgagataaaaggataaaccatccccaattttagaaactcacaaggaagacaaacacatgtggcattgaaacagacatgaacaaagcaagatataaatagcttgcaatctcgaattatccacatgaaagaataagatggtagcatggactacccaaagcacatagaattcacaaatactttccctttgagtttgaaatatgtttgggccctatatttgaacagagaatttcctatgatttgacatttgtaataatttgaagtaaaacctcaatttaggagaaacaattaagaaatcagtggtaatcccagcactttgggaggccgaggcgggcggatcacgaggtcaggagatcgagaccatcccggctaaaacggtgaaaccccgtctctactaaaaaatacaaaaaattagccgggcgtagtggcgggcgcctgtagtcccagctacttgggaggctgaggcaggagaatggcgtgaacccgggaggcggagcttgcagtgagccgagatcccgccactgcactccagcctgggcgacagagcgagactccgtctcaaaaaaaaaaaaaagaaatcagtggtatagaagtacaggatttttttgtaccactgatcatttcttctctgttgtactttatacaagatatggtcagtatcactcttagaatggtgcaaaattttttatacaaaggaggcagtaatattagcttagagttgtaaatagaattttcttacacactagcagccatgtgcttgggagtttgccatattgaagcacaaaggattataaaggaaaatctcacttagattttcctaaatttcagatggtgggtcagcctctcttctcaggctacaagaagaattatccctaccacaaactgaggtgttggaatttggagtgcctctgctacgggcagctgcttgggagctctggcccaaggaacaacagatagctctgcaccttgaatgtgcctgctttctccaagttttggcctgccgctgtgggagctgccatggaggagactttgtcccctttcatcattttgcagtttgttctactaagaattccaaggggacctctcgattctgtacttacagagatactggctcagtgctaacacaagtgatcacagaaaaattgcagctgccttctccccaaggtaaacccaggaggcagaaagaatacatgggtattcgtgtacttggagttcttcatcaaaaagttgaaatcagattaaaggagaaaagtaggtagaaagaaccacttatttattcctgaagtactagagattaaaaaaaaatgtaatctcagagttaaaaactaccttagagatcatatttgttttgattggcaatcttgggcaagttacttaacctcaatcaattggggacataataataccaacttcatgggctgggtgcagtggcttacacctgtaatcccagcattttgagaggcttaggtgggtggatcacttgaggtcaggagatcaagaccagcctggccaacatggtgaaaccccctctctactacaaatacaaaaattagccaggcatggtggcaggcgcctgtaaacccagatacttgggggtctgaggcaggagaatcgcttgagcctgggagccagaggttgcagtgagccgagactgcgccactgcactccagcctaggtgacagagtgagactctgtctcgaaataaataaattaattaataaataataatatcaactttactgggtcattgtggggattaaattagttaaaatatatagtgtgctctgaacagtgccagacatgtggtgattgctcaataccctttagctattgttttgattattactattatttttcagctcagtacacacacattgagtccttatgtgtatcagattctatactaaggaatatggtgtgaataagccttggtctttgcactcttgaagctatctgttttgggggttactatagacatatagatagagaattctagtatggcatggtaaaagcaatgaaaatgagaaggggccattaactcagccagggaaatatgtcagtgaagattctcctttgaagtagatcatgtcagaattgcatctagagggataagcaggagttagctacctgaagaaggttttattagttaatagatattcaccatatcctgttaaactgcatcccagatgagttcattcatctttgtttagccttttcagttagcttacattacagaacagctcattgtctccagctgtcagaaagtttcttctttcatcaggatgtaagctgcctcgttgtagtttcccccatttttcatagttatattctcttccatacttgaagatagctatcaagacccaaccaagtcctctttccctactttgataaaagaggagttggtttggtattgggggtggggtggatggtatgtggaaaatgatagatagttgttggcaaaaggctaaaatgagggatttggtgtatgatacaattcctcttctagctatagcatcatgactatgaaggtggaccaatgacttggagcaattagtcattggttgatgagctctatgtgcatttgcacctgttgtgctttccaaagtctggtattgtgaagaaattgtgctattgttcatatttcctgtgtgacttttttgcttttaagaggtcagttttggccaggtacagtggttcacacctgtaatcccagcactttgggaggccaaggcaggcagataacaaggtcaggaaatcgagaccattctggctaacacggtgaaaccccatcactactaaaaatacaaaaaattagccgagcgtggtggcaggcacctgtagtcccagctactcgggaggctgaggcaggagaatggtgtgaacctgggaggcagagtttacagtaagccaagatcgcgcctctgcactccatcctgggctacagagcaagactctgtctcaaaaaaattaataaataaataaataaaaagaggtcagttttgtttatttatttatttatttattttgctttggattagacagcctggtccatctatagtaaaaaggctcaagaccttctcagcccagcagaaccttaaggaggcttcccagacccaaggcctttgtgcattgccattgcagaccaggcactgcctgattccagagggtactgttacagaggctatgatatgatggtgcctcttggagttatgtactgcagtagagctgccaatatcctcagttatcttagctgtgatttaacattattatcatcagcaagccagtccttttacttaacccaaatcctccctaaaacagtcctcttagactccttatcaatcccaccatccatgctgtgagttccaatgggtaacatctgaacatcattcctaatatttgctgttgtgatctattagaaggcagctttagaagaagagtcaaatctttaggataaaggctaattaaaagcctgctaggtaaagctggaaagctctcttggtcactgactagggaactgtggtatcttatactgtcacaattttcttcacttggttttagcctttacacttcactccgatctggtcatgaaattgatccatatgtattcaaggatttccactattagtgatagccagcaaaccaggatagacacattctttatttttccttcattttgaaactactgagcacctccttcaaaatcagaactagtttaaaggtttgggaatgaagagagttattatttgaatcacaagtagttgtgaaggaatttacaaactaccatcctaattttgtgttgtaaactgcagaagaaaggtagtcaggaatttaaaatgtcctcagttcatccaaacatggagaattaatcatatttttttctccctacagatagttttcagttccagacaaaaccatccagaactcaggaggccttctcaagtgaatgctgcaggtagacagagatgctgagggtgaacatggagggaccaaaagtgacagaaagatgaccattaaactgagccacttatgtcacttgcagatgaggagtggtgactcttgtactcagtattaaggttaacagagaagatttggaaaggcaatttttgattctctatagggaaattatttctttttttttctttcttttttttttttttttttgagatggagtctctctctgttgcccaggctggagtgcaatggcatgatcttggctcactgcaacctccgcctcccggattcaagtgattcccctgcctcagcctcctgagtagctgggattacaggcatgtgccaccacactttgctaatttttgtatttttagtagagatggggtttcaccgtgttagctaggatggtctccatctcctgacctcatgatcagcccacctcagcctcccaaagtgctgggattgcaggcatgagccaccacacccggcgggaaattatttctttttattttattttattttattttattttattattattgtactttaagttttagggtacacgtgcacaatgtgcaggttagttacatatgtatacatgtgccatgctggcgtgctgcacccattaactcgtcatttagcattaggtatatctcctaaagctatccctcccccctcccccctccccccaccccacaacagtccccagagtgtgatgttccccttcctgtgtccatgtgttctcattgttcaattcccacctataagtgagaatatgcggtgtttggttttttgttcttgcagtagtctactgagaatgatgatttccaatttcatccatgtccctacaaaggacattaactcatcatttttatggctgcatagtattccatggtgtatatgtgccacattttctttttttttttttatttttttttatttttttattttttttaatttttttttttattatactctaagttttagtgtacatgtgcacattgtgcaggttagttacatatgtatacatgtgccatgctggtgcgctgcacccactaacgtgtcatctagcattaggtatatctcccaatgctatccctcccccctcccccgaccccaccacagtccccagagtgtgatattccccttcctgtgtccaagtgatctcattgttcaattcccacctatgagtgagaatatgcggtgtttggttttttgttcttgcgatagtttactgagaatgatggtttccaatttcatccatgtccctacaaaggacatgaactcatcattttttatggctgcatagtattccatggtgtatatgtgccacattttcttaatccagtctatcattgttggacatttgggttagttccaagtctttgctattgtgaatagtgccacaataaacatacatgtgcatgtgtctttatagcagcatgatttatagtcctttgggtatatacccagtaatgggatggctgggtcaaatggtatttctagttctagatccctgaggaatcgccacactgacttccacaatggttgaactagtttacagtcccaccaacagtgtaaaatgttcctatttctccacatcctctccagcacctgttgtttcctgactttttaatgattgccattctaactggtgtgagatggtatctcattgtggttttgatttgcatttctctgatggccagtgatggtaagcattttttcatgtgttttttgg

SEQ ID NO: 97590 - DNA, 15186 bp, Homo sapiens
gatttcaaacttgcatggggcctgtagctcctttgttttggccaatttctcccatcttgaatggctgtatttacccaatgcctgtatccctgagtgtatgtaggaagtaactaagttgcttttaattttacaggctcataggcggaagggacttcccttgtcccagatgagactttggactgtggacttttgagttaatgctgaaataagttaagactttggggactgttgagaaggcatgattggttttgaaatgtgaagacatgagatttgggaggggctaggggcagaatgatatggtttggctctgtgtcctcacccaaatctcaccttgtagctcccataattcccatgtgttgtaagagagaatcagtgagataactgaatcatgggatcacgggggtgggtctttcccctgctgtttgcatgacagtgaatatgtctcacaagatatgatgaagtgttttgttcattcgtttgtttgttttgagacagagtcttgctctgttaccaggctggagtgcagtggtgctatcctggctcactgcaatccccgcctcccaggttcaagccattctcctgcctcagcctccctagtagctgggattacaggcacatgccaccacacccagctaatttttgtatttttagtagagatggggtttcaccatgttggccaggatggtctcaatctcctgacctcgtgatctgcctgccttggccttccaaagtgctaggattacaggcatgagccaccatgcctggccgatgatgaggttttaaaaacaggagttttccctgtacaagctctctctttgcctgctgccatccatgtaagatgtgacttgcccctccttgccttccaccatgagggtgaggcctccccaccctcgtggaactgtaagtccattaaacctcttttttttataaattgcccagtcttggatatgtctttatcagcagcaggaaagtggattaatacaccttacaatattccccatgaaaatatctgcatatatatttgagattctttttaatgacatgttatacagcatagtgattacagagttgatgtttaaaagagtgatcctgcatgacttttatccttaaaactcttttaaaaacacttaaaaaaaaactttttagaaatgaaaaatgactgcctacataggatattgattagtacagagacaaatactatttttggagatactctccattagtattagtaagcaattatcaatgtgctgtagtcaaacaaaaagtgaaatgtgaaaaggagcactctcacctgatgtattcctctttattttcttctgttacaagaatattgccaccattaggtttcagatcatgactcttaatttcacctagaatttctttgtcaacggagaagtacatttccaaatcacattcctcaatattgttttccctgcacaaatgaaattagcactatttgttatatccaccaattcaatcataatttataagtttttaacgaaaggcccatgttcttaaataattaatattaagctataacatcaaaataagaagaaataagattctgttctaaggtcatattattgccgaagatcttgggtgtatttttgtaaaatttatcatattgaataaaaagacaggtttgatatatagatcatttaaatacaataaaccaattatgtgcctacagtttggataagttatcaatactacacggaatgcatataactatattttaataaattacatggaaaaagaaacttacttaacccagatgagagaattgtaaaattctggatcaatagattctaaatccttgagtccaactggtttgttcaagatacgcttatagaatggtaaagaaaaacccgtgtctatgaatttcccatggaacagagcctatgaaaaaaggaaacaagaccgcttaaaataactgtacaataatcattttatttcaatatattagatgtactcttcatttaaaaacacttccctgggtcaggcatggtggctcacgcctgtaatcccagcaatctgggaggccgaggtgggtggatcacctgaggtcaggagttcgagaccagactgaccaacatggagaaaccccatctctactaaaaacacaaaaattagccggacatggtggcacatgcttgtttgtaatcccagctactcgggaggctgaggcaggagaattgctcgaacctgggaggcagaggttgtggtgggccgagatcacgccattgcactctagcctgggcaacaaaagtgaaactttgtctcaaaaaaacacttccctggctgggcacggtgacttatacctgtaatcccagcactttggaaggctgaggcaggtggattacctgaggtcaggagttcaagaccagcctggccaacacagcaaaaccccttctctactaaaaatacaaaaattagccaggcatggtggcgcacacctgtaatcctagctacttgggaggctgaggcgggagaactgactgagtccaggaagcagaggttgcagtgagccaagatcgtgtcactgtactccagcctgggtgacagagcaagactctgtctcaaaaataaaaaacaaaacaaaacaaaaaaccacttccctttctctcatatgatctgttatggcacctaagagaaaatttagtattgctgaataagcaaagtaaacataattcttgacctgcacttaccatggcaataaatctgccaataaaacgaaaatatttcaggtgatctggattgatgtaagaagcggggtttatctgcaagcagtagttatccttccctgcatattcaaacaggcaatacattgggttcaacacttcatgtgacaaaagaaagaaccattctctgaaatcaaaagaaaatttacgatgaaaaatcttgtaggttaccaagaaatcaaagaacagtgctataaagttctcagggatctatacccctcagctagtgatagttttctaatctcatgttgatttttattgcttctgttcaaactcacatctgtttcacagagttggtagtatacaccatctttggtagatggtaatatatacattattacatttcaaaaaatctaagacaacattgcacctttatttgatgaacgactaaattgtattttccaattttacctgagatacatcgtaatttcagagatattataaaatgaaaatattagtcttagaatcaatgaaatactattcataggcaaatttaaaattcactatttacccatgtgagtaaagtggctgaaatcaatctaatattccatctattactaagtcccataataatccccatcaagtgccactactccctacacgttaaatcaatatgaaaattcttccaatttcacagaggcagtaaagttcttaattccagccactcacatattagaaaaatgctgagactctaagtcaaatattgtgaaaatatgaaccaatattaacataagattatggttactaaaactacgtaacatgggtgatctggggtaatacatgtggcataagcctgtaatctggatctcttttcctgttagttcatggcctcttgtgataagtgtatctcatgacacactttaatattgctagtttattttcttattaggaatgaatgattgctctcctcttcaattgcctttaacttatacaaaattacatgtttctactcatatttgttatttatctatgattatatcatatattttgaaataattttatttaaactcagaaacataatataaataagaactactaaaatgtagccaccaattagcgtgcacacaaagacacaggctctgaactaggtcattaataaacaatatttctactcttcacaataatcctagaaatgtagatattaatattcttattttacagatgaaaatatttgcccaacatcacactattgggagcagaaaaagattcaaatcccgtcttgaccccaaagtccttgtctttgcacaatgccagctctacgcaaatttttaacctggtgtgatatattatcatggaataagcaaagcaattctcattagagactatcttctagggtccaatattaagctccaatatgaagaaagcagaattaagactttcaactcctattttgtacaaccttctatattttcatgacaaatatactaatctcagttggaaactgagtaactattacctgtatcagtaatctgtggtggggaaaatgacctgatcactataaggccttgtgttttctgtggaacagatataagaggtggtagacttaacactggctactggttaaatgatacaaagcttgcatccaggctctacaatttattatgtgccttaggtgagtctctaagcctcttcatcatcctataaaattctgtatcacaaggttaccctgaagattaaatgagtgatgtgggtgaaatcaatcagctgtacatgacatagaaagtgctgaattaaatgttttttgaaattctgtagctacagcataataaaggtataataatttgacatatttcattttcctaaaatataagattgagaaaataatacttgcaagcgaagtgcaatggtacctttggaggaaaggaactaagttctgagtattcatattatcactaccttgctacacctccataatctaaaccttcttctcctggaaaaatcacccacaaacgtcttcgcagatcttggggactgaagctcattatctaaaaaaaaataaagtaaaataattggtgaaaaaagctattgaaacactgtctaccacttctaggtttgacatctccttcgttataggtaactgaaatctcccatgacacagaaaggtgttcatggtctagtcaaaaccacacatacagaaaatacattatagtaacgtttaataatattttattatatacatctatatttttatataccttatacacgtgattttatttatttatttacttttagacagtctctccctcgttgcccaggctggagtgcaatggcacaatcttggcttaccacacctccacctcccaggttcaagcgattctcttgccttagcctcccaagtagctggaactacaggtgtgcgccaccacgcccggctaattttgtatttttagtagagacggggttttgccatgttggccaggctggtctcaaactcctgacctcaggtgatccaccggccttggcctcccaaagtgctgggattacagacgtgagccatcatgcccggccgtgattttatttttaatgatgctactattgacttataatgttgcctgtatcaattacttagaacatagatgggcatggtcagaggttgggtggggtttttgtggtttggttattaggtttggttttgactcatagccaaaggtacacgtaacagctaactggctaaccgagaaatgaaaaccagtagctgcagagagacccagttaactttggaaactcattctcagcggcaaccgataactacctacaaaaactactcaaattttgtgtcccactataggtggttaataggatcatcttcatatttgaaggacagtacattactgagctacaatcaataggtcatttggtttcctgccacgtaaaacaaattatttgaccaaaattgtgtgtgtatagcactgcatatatcaattactcttacaaaaaaatacagaagaacatggaaagggagaagttgatataatgcctatactttattgagtgataagaatgaattaccacacttaaatatccagagaggatcagtaagtatacctgtttatgccaagttctctcagttcccccacaaaaccatcacatttatgaattcacatcccactcaagccagaaaatcccagatgtaacaaaaaacttcaatgcttatgacatatgtacgtttatgccaagtattctacaaatagtataggctaggtatacagcaacgcaaatgagaaatgtcacaaggttaaaactatctttaaataattccttttgagttcccgaccgcgggcgatggctgccgctgggggcgcccggctgctgcgcgccgcttctgcggtcctcggcgacccggccggccggtggctgcaccacgccgggtcccgcgctggagccagcggcctgctgaggagccggggaccgggccggagcgcggaggcgagccggccgctgagcgtgtcggcaggggcgcggagcagctcagaagataaagtgacagtccactttataaactgwgatggtgaaacattaacaaccaaaggaaaagttggtgattctctgctagacgttgtggttgaaaataatccagatattgatggytttggtgcatgtgagggaactctggcttgtttaacctgtcatctcatctttgaagatcacatatatgagaagttagatgcaatcactgatgaggagaatcacatgctcgatctggcatatggactaacagatcacagttgggckgccaaatctgtttgacaaaatctatggacaatatgactgttcgagtgcctgaaacagtggctgatgccagacaatccattgatgtgggcaagacctcctgaactagaacaaataggaatattttcatggaattttacctatttttataattattatttaagtgataaaatgagtacatggatgagtggattctgtattatgactagctttactattttaattcaccttgtataactactaaattttgtcattcttgaaagtatgcagctctgcctctgcctctgcctgcctctgcctgcccctgcccctgcccctgcccctgcccctgcctctgcctctcccgtctccctctccccacggtctcgctctccctctctttccacggtctccctctgatgccgagccgaagctggactgtactgctgccatctcggctcactgcaacctccctgcctgattctcctgcctcagcctgcccagtgcctacgattgcaggcacgcgccgccacgcctgactggttttcgtatttttttggtggagacgggrtttcgatgtgttggccgggccggtctccagctcctaaccgcgagtgatccgccagccttggcctcccgaggtgccgggattgcagacggagtctcgttcactcagtgctcaatggtgcccaggctggagtgcagtggcgtgatctcggctagctacaacctccacctcccagccgcctgccttggcctcccaaagtgccgagattgcagcctctgcccggccgccaccacgtctgggaagtgaggagcatctctgcctggccgcccatcgtctgggatgtgaggagcccctctgcctggctgcccagtctggaaagtgaggagcgtctctgcccggccgccatcccatctaggagtgaggagcgcctcttcccggccgccatcacatctaggaagtgaggagcgtctctgcccggccgcccatsgtctgggatgtggggagcgcctctgccccgccgccccgtctgggatgtgaggagcgcctctgcccagccgcgaccccgtctgggaggtgaggagcatctctgcccagccaccccgtctgagaagtgaggagaccctctgcctggcaaccgccccgtctgagaagtgaggagcccctccgcccggcagccgccccgtctgggaagtgaggagcgtctccacccggcagccaccctgtccgggagggaggtgggggggtcagccccccgcccggccagccgccctgtcctggaggtgcggggtgcctctgcccggccgcccctactgggaagtgaggagcccctctgccaggccaccaccccgtctgggaggtgtacccaacagctcattgagaacgggccatgatgacaatggcggttttgtggaatagaaaggggggaagggtgggtaaaggattgagaaatcggatggttgccgtgtctgtgcagaaagaagtatacatgggagacttttcattttgttctgtactaagaataattcttctgccttgggatcctgttgatctgtgaccttacccccaaccctgtgctctctgaaacatgtgctgcgtccactcatggttaaatggattaagggcggtgcaagatgtgctttgttaaacagatgcttgaagacagcatgctcgttaagagtcatcaccactccctaatctcaagtacccagggacacaaacactgcggaaggccgcagggtcctctgcctaggagaactagggacctttgttcacttgtttatctgctgaccttccctccactattgtcctatgaccctgccaaatccccctctgcgagaaacacccaagaatgatcaataaaagaaaaaaaaaagaaagtatgcaatttttattttggttatattacaaaaatgtcagtcagatattaaaaaatagttaatgtgatagaaaaaccttacatattttttcttatgtttgtttagcgactttagcaaaatgttttcatataatctcatctgtttacctagaagataggttaaggaaatatattattattcctgtttgatgtaggtgaaggcagagatctaacctggcttgtttagggccataccactaattggaaaatctgtactagaacctgtgtcttattactataagctattatgttcagactgaaactggagaaattacgacaatttatagcagtagttaaatctgaatgtgtatggacaaaaatatttaattgctcagtaaactgcttaacttcaaagatagttattaacctcataaatatttcaaaattttgattctgaagtctaagtctgaacacagacataacactatcaaagaagtttgatctctgttttgactcaactagaggaaaaatgattggatgggtttattcttttctaagcagaatggtttaactttgtactctttgaaaaacaatgctgatttctaaatctctgcctataacagaatggaaaccttatgaatgaattgtgtttctctgtcctgagctggagaagggaatgagcaggctgacaggtcgcacagccccaggtggcgccattctctcatgcaaggatggggctccagggtgagcagcgtgggctgcagtgtgtcagtcccaggagggagggagtggcgagcaccacarwttaccacatatgtgtggaagacatttgtatccttatctttactataaataaatccataaaagttaaaaaaaaattccttttaacaaatgtctaatatgaaggaaaaaaaattgttttctcctgtactttcccccataaccagttgtgctgtgttaacagaagaaacactatcccagagcaattttatccaacaactatccaaagaaaatctgatgctaattttgcaattagttttgttacctttaagcaatcaaattgttctcttatatttttattaaccagttatttgatggatgtcaaatctagggtgacagctttaaaaactgttttagaaccatctagtcagttattttgcaaaagactttaggtttcaaagtcaaaagataaaggaacagtttaatcatgttttgcatctttccaggactggtaagaggtaagcaagttgcttcaagaaactcgtccaacagagtgataaaagggtggttatgaacataaaattagaaatgggcaaggactagggtggggaatggcctgtgacacttacatcagatcaaggggatgactcataattctctaaatggcctcagtaaagctccacttcccactaaaaagttttctgctcctacatagcaggatgccaactggctttttcctttaatgtcaataactgacgttccattaggaaatgaaaaaaactgattctgaaagcaagtagccagctaccaccaactgtctcaacctcttttccctttgcattcaattccgtacttcttgaagctgtagttgctacaataccactggtgcttgaaaataatcacttccacatctggctataaaacaaggactaaccagatgttttcattttaagacattttttcactagttattttaatcttctacataacacaatcattttaacatttagttgcagtaggttattagtaatatctgcaagataaaggcgaatagtagactaactcaagttcttttttcttttttttttttttttttaaattgagatggagttttgctcttattgcccaggctggaatgcaatggcacgatctcgggtcactgcaacctccacctcccaggttcaggtgactcccctgagtagctttacaggattacaggcatcagccaccaggcccagctaatttttatatttttaatagagacaaggtttcaccatcttggccaggctggtctcaaactcctgacctcaggtgatgtacccgcctcagcctcccaaagtgctgggattacaggcatgagccaccgtgcccagcgagtaaattaactcaagttctgaagacaagtgaaaaaatctgctgactacttctgaaaactcatatatatctttttttagatactgtcaccaatgaccactttttttcctgttaagagtaacatacgcttattgtaaaaatccaagtaatactgaagtgttaaaacaagtcttcccctctcctttctacaatctgataatgttcatatgggtatttccagacctttggctaccaaaaacctattatcttacctatgcatttatttcaaatcataccagtttagaaatggaaacctgaaacacacacacacacacacacacacacaaacctattatcttacctatgcatttatttcaaatcataccagtttagaaatggaaacctgaaacacacacacacacacacacacacacacacacacacacaccccttaagccctaaggtggctggcaatgagatcgcacttgaaaaattcaaggacttcaactcaagaagttccaaaccattcagattaaactgacagcaccaaaagcgggtcctaagctagcagccaggggggaaattattgagagaatgaaacagtacctgttgaaaggaatcctcaaacaatgtttttcttgtcactgtaatctttatgtgctgtggcatggccagttgctgaaatagaagaatgacttaagtcaactctcatcattaaaatagcctatcaaaaaaatcaaaaggggaaagttttatttacttttatctttccttacagaaacaagtagactatgaatataaatttatattcaataatgtttaccaatgcatctgtgagtattcatgctaattacagattaatatatgcaaacagaagaaccacaagattgatctcatatgcacactgcttacttaataatgtgtcaaataaatctttacttaatcttattttccaacagttaatccagattcttcttgcttccatgggtccagttaattacaagagtttcaagtgtaaaaatattcatcacagtaactttgactagggcattcatttgatttagaacccataaaaaatcattaattccagtaaatatctatacataagaaatagttgatcacatctgaaaaaaacactgaatataacatctatgtatggacatgttcatgtatgtatgaacatgtatttatctatcaaagtcagttatatcaaacgatagatataaaaatggctggtgtccgggcatgctggtttatgcctgtaatcccagcacttggggaagatgaggcaggaggataatttgaatccaggagttcaaaaccagcctgggcaacataaggggaccctgtctctactaaaaattagccaggtgtggtgaagtgcatctgtagtgtcagctagcgagaaggctgaggcaagaggatcacttgagcccaggaggtcaaggctgcagtaagccatgatggcaccactgcactccagcctgggtgacagagtgagatcctgtctcagaaaaaataacacataaaaataaagtagctggttaaaattatatcagaaaatgcttttacttacatttgaagattcctgcaatctgaaagtaatggctactgaggaaaaagtgacaatgtttgcttattcagatggtttcaagtttaattttcttctttaaaaaaaagaaatatatatatatatatatatttacagaggtaaggcctcaatatgttgcccagactggtcctgaactcctgagctcaagtgatctgcccacctcggcctccccaagtgctgggattacatgaggtttaattttctgaataaccaaagtcacaaatgatctaattgataaatctatttatttgctctaaaaatagatgaaagagattctaatgcttcccattttacctgtttttctgtgagttaagtattttcacaatcactgtgtaatataagcaacacaacaaagttaaggcagtacagagatacagttccaatactaacctgacaccagaaccggaaatactgaacctttgctttgaagtcccgaacataggctatctgaggtccattgtctctgaggaagaacaagggttaacaggacatatatagctgcttgtaaaagataatgctgaaggaaagcaaaatatcccaccctctctcagcacttactaaccaaattcaaaaatatagcatattcctaacaaaaccattctttgctttttgagagatatttccccaagaatacttttaagtaacagaaaaaacaaacaaaaaactttgattttgttgaaactactgttgtgggattttcttttctatgctgccaaatctaagagggctaagtaaaggggtttctatctgagaatgctgtctatcccaacatcaattccctcctttatctttaagtaaaacccttgctatttaactaagtagaatgctacatataataaagactacatttctctatatggccatgtgacttaagtctctaagtgaaagtggcatatgaaacgttcaagaaggatctttttggccaggtgcagtggttcacacctataaatcccagcactttgggaggctgaggcgggtggatcatctgaggtcaggagtttgagaccagcctgaccaacatgttgaaactctgtctctactaaaaattataaaaattagccgggtgtggtggcaggtgcctctaatcccatctacttgggaggctgaggcaggagaatcacttgaacctcagaggtcaaggctgcagtgagctgagattgcaccactgcactccagcaagggtgacaaagctagactccgtctaaaaaaaaaaaggaaggattttctaaaagacagctaaaatagctaaaaagtgtgtgagtgtgtgtgtgtgtgtgtgtgtgtttataatttgcccttcctccaaattccagcctggagtgtgaccctgatagcttaagtttcagcagctgtcacagaccatgaggtcactttgaagaatgagaccatactctaggatggtagaaaagacagaagaattttagatcactatgacaccatggggtttctcagctagccttggacttaataccactgcattatctccctcttaaaaattcaatgtatatcagtgtagaaatacaactgattttgtacattgactttatattctgttacgctgttaaattcacttactagttctagtaattttttctagattcttcatgattttctgtatacaaacgttatttgtgtgaggggaaaagagacagttttacttcttcctttccaatttatacatcttatatttcttttcttttctttcttttttttttttgagatggagtcttgctctgtctcccaggctggagtgcagtggcgcaatctctgctcactgtaacctctgacccagaggttcaagcgattctcctgcctccgcctcctgagtagctgggattacaggtgcccaccaccatgactgactaatttttgtatttttagtagagacggggtttagccatgttggccaggctggtctcaaactcctggcctcaagtgatctgcctgcctgggcctcccaaagtgctgggattacaggcgtgagccaccatgcccggcctgtatttctttttctcatctcactgcactgggtaggaatactgacacaatgttgaatgaagtaatgacagtagatatccttgtcttactcttgatgttctacggtatttcatcattaattgtgatgttggctgtaagcttttgttacattttttttttccaataaaaatgtttccggcagggcgcagcagctcacgcctgtaatcccagcactttgggaggccaaggcaggtggatcatgaggtcaggagattgagaacatcctggctaacacagtgaaaccccgtctctactaaaaatacaaaaaattagccaggtgtggtggcgggcgtctgtagtcccagctactcaggaggctaaggcaagagaatggcgtgaacccgggaggcagagcttgcagtgagctgagattgtgccactgcactccagcctgggcgacaaagtgagactccgtctcaaaaaaaaaaaaaaaaaagtttccaaggtagctgagagtttctcataaatttgcattgtattatgtcacaagcttttcctgaaattatcgtatgatttttctcctttaaccaattttgtttgttttgacatggaatgtcactctgtcacccagggtggaatgcagtggcctgaaacctcatctctactaaaaatacaaaattagccaggcatggtggcgcatgcctataatcccagctaatcaggaggctgaggcaggagaattgcttgaaccagggaggccgaggttgcggtgagccgagattgggctattgcactccagcctgggcaacaagagtgaaactccgtctcaaaaaaaaaaaaaaaaaaaaatgaaaaagaaaacatttccatcacttgtattttatgaatgaatttgaataggactgattaatttataacttataagtttgatgaaccttaccagtgacaccatctaggccagaattttcttcatgagaaatcttttttttctttttttttttttttgagacagggtcacactctgccacccaggctcaagtacagtggcgcgatctcggttcaccacagcttcctgggctcaagcaatcttcccatctcaccctcctaagtaactgggactacaggcatgcaccaccacacccagctaatattttgtattttttgtagacatgggtttcaccatgttgcctaggctggtcttgaactcttgagc

SEQ ID NO: 97591 - DNA, 13527 bp, Homo sapiens
actaactcctattactgctcttaggagattaagtcctatagtagtttccaagtgtcctagaaattaattccaagatccttaccttacctctgtttccaggtctttaataaggtgccccagattacccctcctcccttatcttcttcatcatcctccctctgcctgttttaaatgcccttcacctgacagctttgtttccagtcagggacttcttccatgctgcctacatggctagaatgcctccttgccctcagggcaaccgactggtcatcttcctctcaccatttaaacttcactctccaagaagtcttgtcagatactctgttaggagatactacttttactaaaataatggatcacaaccctggctataccctggaatcactaatgtgtgacaagttaagcttcatcagtatgttaggtgccttaaagtaaaatactgatacctagactacataccagacagaatctctaggcaaaggaaccagatattggctgtggtgggttgcttttttttttttttttttttttggtctgtttttttccacagccccacaggtgatctattgagcagccagagttataaaccaccacaggctgagcattctttaatccaaaatgctccaaaatctgaaactttttgagcaccaacatgacaccatagtggaaaattccacacacgaccctgtgatgggttgcggtcaaaatgcgggcataaggccgggtgtagtggctcacacctataatcccaacactttgggaggctgaggcaggtggatcacttgaggtcaggagtttaagaccagcctggccaacatggtgaaaccctgtctctactaaaaatacaaaaattagctggggatggtggcacgtgcctataatctcagctactggggaggctgaggcaggagaatcacttgaacccaggaggcggaggttgcagcgagccaagatcgtgccactgcactacagcctgggtgacagagtgagactccatcttaaaaaaaaaaaaaaaaaaaaaacagttcattctcagcacagtatagacactcagcaaattttaccacaagtttgttccctgctgatcttgtccttcctttaggtaaaatgtggtcaaaattaatgccaaaacctacaaaaacctggagaaaaagtcttcaaaagtaaataaaacatagcccagggaggaacctgattcttacagttcccgggccataatgtgtaaggagtttatatccaaattacacataaccaccagtagctgcatccactgctgtttcccatgctctgcttccttggtctctgtttgtttgttttgagacagtgacttgttctgtcacccaggctggagtacagtggcatgatcatagctcactgcagcctccaactcctgggctcaaccagtcctcccacttcatcctcctgagtagctggggctacagtcacatgctaccaggcctggctaattttattttttgtagaaatagagcctcatcatgttgcccaggctggtatccaactcctggcttcaagcaatcctcctgcctaggcctcccaaagtgctgggattacaggcatgagacaccacaccgagccagtctctatttacaagtacccaaacccaggatatctagagagaaacctgctgtcaggtgctggtctgccaaaaactttaaattgaataaatttgaccaggtatggtggctcacacctgtaatcccagtactttgggaggccaaagagggagaattgcttgaggccaggagttcaagaccagcctagtcaacatagcaagaccccatctctacaaacaatacaaaaattagctaggcatggttgtgcatacctgtagtcctagctacttgggaagttaaggtgagaggattgcttgagtccaggacttggaggctgcagtgagctatgatcatgccactgcactccagcctgggtgacagagcaaaaccctaaaaaaaaattccttttgataccaaaacaatttaaaagttataaacttataactcaaataggtactagagtataggaaataggctaataatgacaatgccaatttcaattggcagactagggctattagggctgataatgctgtattaagaactctgaggctggccgggcgcagtggctcaagcctgtaatcccagcactttgggaggctgaggtgggtggaccacgagctcaggagttcaagaccagcctggccaacatggtgaaaccccatctctactaaaaatacaaaaaaattagccgggcatgttggcgcatgcctataatcccagctacttaggaggctgaggcaggagaatcgcttgaacccaagaggcagaggttgcagtgagccgagatcacgccactgcactccagcctgagcaacaagagcgagactccctctcaaaaaaaactctgaggctaaattcatcaggaatgctatgagggatcacggatattggtcatagaggaggagagatggcatatatgacatgtattttccatccaaaaggtccataacttcaagagtctaacaaaaaagcctaatcttcaaaaggaaggtagtaataatgtacacacaaaatggcatatttctatcagtactaatcacactatagatgaatcacttatttacttgtttgtgagggcaggaactatttttgctttattcattttttgtatctccaacacctatcagaatgcctgatatatagcaggctgttaatagaagtatattcaatgaaatctgcaataaaaaaaaaagaaacataagaccacattattttgatatgtcataatcacttaaggtctatactccaaaatatcacacaccctagtgaatgaccatctgaacttcgtgttttattgtagtgggtaatgatatcatagtgcactataacctcaaactcataggctcaagcaattctcctgctttggcctccaaagtgctggaattacaggcatgaactaccatgctcagcctagaagcatgacttttaaaaggaacacttccctcactcatattactcttgggagatagtttaatatggtgaaattctaatgtctcttttcacttagcactataaaaccactaatattgctttatctaaaagagctggaagacaacttaacctgtatttgttctacaactgaaccagaagaataaaaattagttttatccaaggtttaaaacttgtatctattcttaagaatcgtaatctcaaaacaaacaaacaaataaacaaacaccttaaaattattttaggttacaaaacagatgtgttaaaattaaagcagatggctgaatccaagaattaaactttgcaaaagattaatgtcatattaatcacaactatacttctgactagaaagaacggggtctagatgatctctcagggaatcttgttctggattttccacactcttgccccttgtcttatttgagcagacacagatttaactggctctttgctgttttctctagcattttaacaatcatgacacataaaacaagttgacacatagcctttccccagagtttcaaaatctttgtcataagaatcaagtggctaggcaatgaatacagattcctggctttctgtggtacttttggaagcaataagtgcctattttaagtttttttgagcttctttggtagtagtggaaagaattttactacaggggtttgtatgtctcagaaagaaatactaaagtatacaacttcacaccataatcagcaaacatctgtcagcagcacttagagagctgggagtgaagggattcgggctttggcccaggctatgctccttattaaccatgtgatcttggcaaataatccaacctcagattcttcacctataaaccaataatctgccacctttctaccctgcttacctcatagagttcctgtgaagatccaattagctaacatgtcttgaagcacttggaaaactattaagccctaacaaatccatatacagaaacattatcgtcctagtcctcagggaaaagggaactattaggtcacaaatgcccctattccatcccacccccataatcaatcacataattgtacctaaagaacaactgtattgccacatggttcatctttattacttaaatttacacatgctattctccagaagcctatatagtgacgtgtaaagatgaactagcagaagaaaaatgtggcaaagcatataaagaattaggccatttaaaatcttttctaaagattttctttgcctgccctgaactccaaaattcctgatgggtcctttgaaatcttcaattgcctcttgatttcagatgttaaaaggaactctttacaccaacacttaactaagaaacaagaatactttcctcccacaattttaggtttggtgaacttgtagtaacatagcacttcttaccagggatcattctaatcaagctctgtaacactgctcgctggtgcctttctccgaagtaagaagcaatttcctacatcttgactgggctgtaaaaagcggtatacggttccaaaataacagagaattcctcctttactgtcatagttcttgatagtctgatttctatgctaagcatgtcaggttcctggctgccattgacaagttgtatgaatctagataagtcacttatggtgatctgggactcaagtttccacatttataaaaatgaaaactagtttatctccaaaaacctttctggtggaaatattctaagattctcttcagattacatgtatcaatacagtcacagtactgtgactaagagacccgcccccaaagaacaatcccatattagctgcagcttccaaatgttcaacatttcccatttcttccccagtccccaaagggtagtcacagctactacagaactgttaacagcacagctaaaagaaaaaaaaaaccaaactagctacacgacagaaagattgtaggtttttttaagagtcagtgggttttaaaaagggaaaggaattgaatcagaaaaataggaagacacatgtaagaaaacacaccagtccaatttcataccaggttatctcctgtggcagagaataatcttagcagtccaagcctaacccctgtcactgataaccttagaaaaccagaaaagtcagattaaccttagcagatcactcaatttcaattaacgctgtagttcctgactaacaggccagcgggaagtagagggccagagtagggaggtagcagtacagaggagcatagatggaaggtttcacttccagctaagatgtcattctaatgattaattaaaatgtttgaaaacaaaaaatccaataatgtatgatttattcaaaaacgatgtgcaaggaattttgctagacatcccagtagtgggggtgggaatgggggtaatgacacagatgcattcagggaatttaagagtcattagaggctgggcacagtggttcacacctgtaatcccagtactttgggaggctgaggtgggtggatcacttgaggccaggagttcgagaccagcctggccaacgtggcaaaaacctgtcactactaaaaatacaaaaattagccgggcatggtggcacacacctgtagtcccagctacttgggaggctgaggcataagaatcgcttgaacctgggaggcagaggttgtagtgagcggagatcgcaccactgacagagcgagactctgtctcaaaaaaaaaaaaaaaaagaattattagttattagtaagtcccattaccccatgcagtttaaaaacatagtattaagaatatgtacccataggtatgagctgagaggagtggaaaaaaaaaagttacagacccaaacattaatacttaaggaaatatgctgtctcatgaataatacagaatgatttaggaattcagatgctgactggccatctggttttagtaatcagtgaagactcattaggatagttttcatcatggtcttgaaagataggaataagctcattttagtgtacctgtttgcccttgggatatgtttattagtgtaagagtatcactgatgggaaaagygtggtctgaaatagggacatggatcgccatcagcaagccaaaagaaaaacatcaagtcaccagttaataatggtctgaagcagcccttctttactcatgtcatttctactgtctcagatattagtgttcctccaactgcaaagtttatttttgttataataaccactagtgttttatccaatatagacgttatggaagtgagaggaagcaaacaagcttctttaaagtgaaaaagggaaagcttgaggggcattctcccagacatcaatttctattgtgaaacactactgtccaatgcaaatgatccttctgttctttcgaagttctctactaatctcctgccttccaccaactccatcatgcatctgaggcacataaaaagatacatgaccataggttaggataataacacactgtgatgacttccctaatttcttataggcaaaccgcttttgaaatgtggctttaggttagtagcacttatgtaagaacacaaagctcttktatgtctgggaacttctggtataggctgaaggtgaaggctgaaaagaacgaaaattgcttcaagttcaataaatttaaataaaatatgctccgtagaaattaaaatgtataaatcaaatatcatatactttttctgatacgatttcaaagttaacacctatactcatacttatgagtgtaaagaatttacacattttattgcaccctaattttttaaaaaataaatttcattgtgcaactgaggtttacaacatgatgctatggaatatagacagcaaaatggtgaagcagattaatatagctatcatttcacataattactttaacaagagctgctaaaatccacttatttaacaaaaatctctaatacaattttactaacattggtccccctgtatctctaaacttgttcatcctacatatctgctattttgtatccttgacctatatctccccatttcctctccttccccaccaccagtagtaaccactgtttcgttctgtgtattttagctccttaaaaaaatattctacatatgagtgagattatgcaatattttccttggtgtctggcttatctcatttaacataacgtccttcaggtccatctrtgttgtggtaaacagtaggatctccttttttaaggctgaataatgttccattgtacattgtctatacacacacataaacgtatacacacacacataatttctttagccattcctcacccatcgatggacatttaggttgcttccctatcttggctactgtgaataatgctgcaatgaacgcgagagtgcagatatcttcacaaggtggtgatttcctctcccttgggtgtataccagggacaggtgttgctktgcacccagaatcttcaaaataatatgtaaatcctacttttgctggtatactgtgaactcgtatttacctaaaaaaatgacattaacagcactctttcaagaaagtaatctgaagagaaaatataaaagaaacctcaacccaagtaaagaaggtatctctttcccattagtgttattggtaatttctaaagctctaagcggtataatttatcttttcatatacaggataacgatggtttcagttgttaccacaaattacttcaaatataacggaggaaaaaatcattagctatatagggtcttccaatatatcatacacacaacatgaaaatcaatctagcttcacgtaacttggtcaaacctggcagaatccaaggggcacgtggacgtgacagccaagttactactgactaggctaggctaaaggttaataaataaggcactcataaaaggaatcgaggccaggcgcgatggctcacgcctgtaatcccagcacattgggaggccgaggcaggtggatcacttgaggtcaggagttcgagaccagccttgtcaacatggtgaaaccccgtctctactaaaaatacaaaaaattagctgggtgtggtgacaacgcctgtaatcccagctactcaggaggctgaggcacaagaatagcttcaacacgggaggcggaggttgcagtgggccgagatcgcaccactgcactccagcctgggtgaaaatccgtctcaaaaaaaaaaaaaaaggaatcggtatgagagatggagtcaggaacactgctcaactcgagattatcacacatctctcgttctttcaatattggtaccgaaagaaaataattttacttatctccctccgtgcatttattcctttacaatatgaattatttccagtctggctggcgtatctcactccacaccccaagctagtgtcataaaccattttccccaagagaaacctagagaaagatacataagcctaaggctcttaaaaaaaaaaatgaagcatgtgtcttcacctcgccttacacttttctcagttacctctcccgagggtgtgaaaatatcaacatccggtcgcccacccccactctctcagcagtgcctcgcattgactctgcccatcccctatcattccctttacagtctcatcaccttggagaagcccatcgaatatttcttcccattgctcccccacccttattcatggctcagcgcgatattctccacatttttctcccaaggaagtggcaaaaaagaaagcagcatggtcgacgacgaaaccggggaggcctgacaaccagacggcagtttaaggcgacggaactggctctttccccccatctcggcctccgaccagcagtcggttctctaaatgtgaaatcgctggtcttcccgctcccccacccccatccccatccccgtcagaggccaagccggtaaaatgcaaagaccaaggggaagcgcgaggcagggtcatccctaacgaagcccgctccctcccgggctggtgtccccgggggggggctggagattgcggggggaggagcgagcggccctcgcccagagacccccggagacgcgaccctcgacacccgggccctttccccacccggcttccctcccccgcggcccgatccggagaactgcagcagcgcccgggcggaccccaagccggcctcactggcacacacgccacacacaaaagcgccgcggccgccgccttcccacccccacagcccggcgaagcaatcaatgaggcggccggcgcccgcgtcccctccgtgcacacccgaacacggggccgagcgggccagcggggctggcagcgcggctcaccatcgctgcgcttgatctccacgtaaatcccgatctggatcttgccgaagttggccgttgccatcacctcatctggagcagcagcagcgggccgagggagggggaccggagggcggaaaaggcggggagggggcggggtaggtgtgggagggggagcggttgcccgcggccgcgccggcccgggcgacagcgtgaacgcaagcggggccgcaaggagcagctgtggggaagcaggcggaggccccgggcctgcaggccggcaggaggacgcgcacgccgggtagtcggggtgaagctagggccggggccgtgagacggcgcggggtagagtgggagggcccgcaccgcccgccggggagccgacgctggggaggcggggcgccgcgcgcctgcgcagagcgcgcctccggcgtctcttcttccttttcggctggcctctccccgctgcctccaggcggccccgcccagctctgcagcggggtgggcggcggccgcggcttacccagccgctggagcgttgagcgctcggcccggcccacagctagccggcgtcgcgtttgatttcagcgcgcggcctagaagacgcgggaagcgtcgcgccgagctttcttgccctctcgcttccgggaattggcgctgttgccggaatgggttaaaggccacgtggtttcaggggctttctagcgggctgagggatgtgaattcaagggccctccgttgacagtacgggatccgggttttcatcggaaggtggcaccccctatttccacttacaggtagctgacccaagcagccctcccaagcacacttggtgtaggtttcccatccagttacgctggaagggaagaaacacccttgaggtgtcacctaccctaaatcgaaatgaagatccacccctttacagtcttgccttatagtttatcacactcagaaagaagctctgtggtggggcgtccttaactgttcaggttatgaggcatccgatgctggtgccctgtttctgctgagggttcaagacttacttgccttggcctgtaaagccaacaactgtgactcaagggaagaaggcagacacataaggttgactagggaatgtgtctttttgcaataatttaattagtctgaccacatcagcaatgtggaaagcaagactctccatcctggcagagcaggaaggccacgtgtaccggggccctggaaactgtatttatagcaccgtgtgaaaacctccaaacgtctaactcctgcttgtagtactggcaattgataggttggaaacaacacttttcatggcctactttccctagtcattgttttttgttgttgttgttttgttttgtttgtttttgagggggagtcttgctctgtcgctcaggctggagtgcagtggcgcgatctccgctcactgcaatctctgcctcctgtgttcaagcgattctcacgcctcagccttccgagtaggtgggattacaggcccgcgccaccacgcctggctaatttttgtatttttagtagagatggggtttcaccatgttggccaggctggtctcaaactcctgacctcaggtaatccacccgcctccaccacccagagtgctgagattacaggcatgagccactgcgcccggccttccctagtcattgataatctccctgtaacaataactacaaatatacaatttaaaattttaaaattggaaactggatatatacatcaatgcttatgtggatatatgtgtgcctagagttttctatctaatgtaagtaatcatgtaggtccttaaaaaactgttaaaagactggcttcatctgtagcttgaacatattgaaggtatacctgtcaaaagaacaattctattgaatccattctaaagtgcatataatttctatggaaaaaaaaccacactggatagacaatgtggaaaataacttcttttacattccagaaatgacacacttgagtacccctgtttcaagtgaaatttgaccaaatcagggtttagtttttattttttctataattttgggagttttatctgaactcttcaagctcctgtctagaattcattttctgatgtctctgcaactgaggtataaaacatctatttatattttatttatactttataaagaatgcaaagaaatcaagctatacagctcaaagttaacattgtttcataaaatattattattattattattagagacgaagtctaactctgtcgtgcctaggctagagtgcagtggcatgatctcagctcactgccacctccacctcccaggttcaagttattctcctgcctcagcctcccaagtagttgggactacaggcgtgtgccactacgcccagctaattttttgtatttttaaaatagagacgaggtttcaccgtgttagccaggatggtctcgatctcctgacctcatgatcctcccgcctcagcctcccaaagtgttgagattacgtgagccaacacgtccagccaataaaatattattttgtatcgtggttgctgacacataccttacactctgtggtttatatggttaatcttaacctttaatccatataaaaggtatttttaaaatatgtacattgttttgctccataaaaatgtatgacataacacttaacaaacacaaaacctttcctttataagacatacccaaaaggcttactttttttggtacacatcagcatatgtatttaccaagactttcattatgggctttgtatgctagtggcttcctaaagagcagccataaatacatgcaatgtggctatgtttccatcaacatcctggatcaaatattctaactctggctgagacattaacaagatatataatcctaactagaactactactaataagatcctgaattagtaactactaattaatcactaagatatataccctactaagaactactgtttttattaggattatatagtctgcactcagacatttgttcaatgagttaacttcttaaactgctcagtatctcagttacctctttgatcaacctggaataataacttacattctctcaatcacagaaagtttttgtgaggacaaatgaaataaaatgtgatagtgccttgatatttataattttttttttttgagatggaatctcactctgtcgcccaggctggagtgcaatggtgcaatctcggctcactgcaacctctgcctcccgggttcaagcaattctcctgcctcagcctcccgagtagctgggattacaggcacctgccactacacccggctaatttctgtatttttagtagagatggggtttcaccatgttggtcaggctggtctcaaacttccgaccccagatgatccacccgcctcagccccccagagcactgggattacaggcgtgagccaacgcgcctggcctgtaatttgttttataaaagtaaaccatcctataaaatataacccaggccaggtgctgtggctcatgcctgtaatcccagcattttgggaggcctagataggaagatccgttgagctcaggagtttcaaaccagacatttgtattcacattcagctaagtgaaaataccaggtgaaaggctgctgatcacttagatcatgcaaaagagataatatcatttttttcttaatacctatcgctggcttcccagaataaaatctgaattctttacaaaactgtacgcgatctagctctggcttcctcggcagcctcgtctggtgctgctctcctctcactctgctccattttcgcagaactcctttctgtcccttaaatcagtcaagatctctgatcaggatggctgctcttgctcatcttttcatgtgactgattcatcttccaggtctcagtcaaaaatcactcctggaaaaagcctttccttgtccctcaccttacccccacttttctcaatctgtctttcctccccaactctaaagtaacctcctcaagggtagaaatcttgcctaaaattcttcactctatctttggcacatagaagggtacctggaacacagctgctcagcaaatatttgttgaatgaatgaaggaaaagtttaataatttgttatatgttgccaaatttatagccttaggtagtcttttctctctgtttgtttgttttttttctttttttgagatggagcctcactgtcgcccaggctggagtgcggtggcatgatctcggctcactgcaacctctgccttctaggtttaagcaattcacaagaatcgagattctcacgcctcagccatctgagtagctgggattgc

SEQ ID NO: 97592 - DNA, 13990 bp, Homo sapiens; identical to SEQ ID NO: 96801

SEQ ID NO: 97593 - DNA, 13768 bp, Homo sapiens
gaaaagcaagaggaaagggcacgaatatacaaatattaagtattctctagcggaccagacgagtggagatcagagccctctcccgccttgtactccaacgccaccctgtgcagagtaagtagtgctgaaggaaattctttttacctggtcatggtggtttaaaaaggtttaaaaaacaaaaacaaaaacaaaacacaagtttgtagcacatgcctttcactggtgcacgttcctgttgccctactgttagtgtatctgtgactggtgatatctattgattgtgttaatgctatctcaaccacgttttaattttcctaagctggccaggcacggtggctaacgcctgtaatcccagtgctttgggaggccgaggttcatggattactttgaagtcaggagttcgagaccagcctggccaacatggtgaaaccctgtctctactaaaaatacaaaaattagccgggcatggtggcgcatgcctgtaatcccagctactcaggaggctgaggcaggagaatcgcttgaacccaggaaacggatgttgcagtgagccgagatcatgccactgcactccagcctgggcgatagagtgagcctctgtctaaaaataaaataaaataaaataaattcctaaactgaaggctgactgctatgctagctaggattatatgggattttaagtatatcaagtggtggttctccaagaagaatctaatttttcttttgatgggctggggattgtaacaaaggaaggtcatatgtcttaatgatgtgttaaggctctttgcaaaatcaaagtaaataaattgaccactaatgtgtcagcccagccatgttctgctcatttgccaccagtcaacagaaatctactttgggtgtttaaaccaggagtcagcaaactacagctcacaaggccagatgtgggccatggcctgttactgtatggcctgttaatggttttaaagggttgtaaaacaaaagaacacaaaacaaagacccaataacaaaacaaagcccgaagaataatatgcgacagagaccatgtatggcatatagagcctaaaatactgactctcaagcccttcccagaaatccttcccgactccttgttgaaaacacggtaggaaagcatttgtcaaattgaggatatgaatagcaattgtaagttattatttttctatatattcgaaagtcacttgctagtataacatttaccttttatttttccctaagaatcttctctctgtttgctttcgacatggatttttaaacccctgcagattttaatattctatataaatgttttaggtggcatatatgaggtttgtattaacatttgctttctatttaacattgaaatgaaattatacagcagaggtattttctcgtccaagttgccacttctttctatcttttttcttttctttcccagtggactgcctgggaaaattgatattttaaattgctctctgcaataatttgcaatggaactggaatgccagggttctgagtccttgccagacagctcgtccctcctgttggcatgactgagtcagctgtcatgattccctcagtaccagtggcatgcctgtgacagacagcctgtctgcctttcattcccgtcgtctcccttgtagggttcagatccaggatacactggtcctggagcccctctcagcctggcacccacagctgctgggttccttactctcctggactgctctgatgtcatctccctgctcagcagaaagaagtctgggatcttgatgctttggccctctgtcctaggccctaaaccacccattgcccttcacataacctgagctggggctaaatagatctctcatcactgcctgcctgctcctgtattttcccttcttggagcttttgcctgttcagatccctctactggaaattaataggatttcattctatgtgtgcatttccaacctttcttcacagtgcgatccaaatgcctcatcctacaggcctccttaaaacaacctgctttctgccagaccccagggagcaccaggacttgaggcttttattgcacttctgttgtttttttgagatggagtctcgctctgtcgcccaggctggagtgcagtggcacgatctctgctcactgcaacctccatctcccgagttcaagagattcttctgcctcagcctctcaagcagctgggactacaggcatgtgccatgacacccggataatttttgtatttttagtagagacggggttcaccatattggccaggctggtctcaaactcctgacctcgtgatccacccacctgggcctcccaaagttctgggattacaggcgtgagccaccatgcccagcgttatttcacttctgcctctgtaattatattgctgtatggctatctcttctctccctgggaatgtcaggtcctaggcacaggaactgtgtctgtaccatatctggtgcccaaagaatgtagtatgtgttttatagatatcatgtaagcttaaacagcgtggtctacatttttgtaaatgtctttctttttcttttctctccagaatgagagaagacagtgctagagtctatgaaaacgtgggcctgatgcaacagcagaaaagtttcagatgagaaaacctgccaaaacttcagcacagaaataggtatttaaatgcaagtgctctattggttaattgtttatataattggcagtatttttaagcaggcaagcaatttgggaatgttttagcaaagtgtaccataattgagttttacaaaccaggctcctttttcctctccctgtacttctttttccaagatggttttagtttagagttcattaaacattaaaatcaaacacagaattaattctgcatgaggcaaggctagcacttattccagagaaatggctgatactggtggtagagtgcaggtatcactgttcctgcaatttttattagagttggttagcccaggctgtgctgggggatgatctgtagggatctgggaagcatcgggactcagcactgggtggttgggagtcaggaagcctgagttctcatttcagtcagtctctgaccaactgtgtggcatggggtgctagaccacttggctgccgactgggtcaccgacatcccttccagctctgctgctggaaattcatctctcccatatgttgcctccccatcaattacgttttttaagtgtgacccaagtatatgatgtatgttttcatgataaattagaaacttatctgggcatggtggctcatacctgtaatcccagcactttgggaggctgaggtgggcggatcacctgaggtcaggagttcgagaccagcctgaccaactaaaatagtagagaccaacccgtctctactaaaaatagaaaattagctgagcatggtggtgcatgcctataatcccagctactcaggaggctgaggcaggagaggcagcggttgcagtgtgccaagatcgcgccattgcactccacctgggccacaagagtgaaactccatctcaaaaaaaaaaaaaaaaaaaaaaaaactcagtgtcagtatttcatgtcgaaattccacttcaatgggtagtgtagttaaaagctctaagtctaccttaaaatcacctaatgctttgttaagcttttagatatatgttccttaaaaactcttaacttatttcttccccagatgtggactttcaccctctccctaaaaagatcaagaacagacgcaagaaagtttatgtgaagacagaatttggatttggaaggcttgcaatgtggttgactaccttttgataagcaaaatttgaaaccatttaaagaccactgtattttaactcaacaatacctgcttcccaattactcatttcctcagataagaagaaatcatctctacaatgtagacaacattatattttatagaatttgtttgaaattgaggaagcagttaaattgtgcgctgtattttgcagattatggggattcaaattctagtaataggcttttttatttttatttttatacccttaaccagtttaattttttttttcctcattgttggggatgatgagaagaaatgatttgggaaaattaagtaacaacgacctagaaaagtgagaacaatctcatttaccatcatgtatccagtagtggataattcattttgatggcttctatttttggccaaatgagaattaagccagtgcctgagactgtcagaagttgacctttgcactggcattaaagagtcatagaaaaagaatcatggatatttatgaattaaggtaagaggtgtggcttttttttttttcttttttccagccgttgaccaattatagttcggctgttgactgagaagtttgtggtgggaaaacgtttgccatattttctttgcatttgaataattgtcttgtacttagaaaaaaggcgtctatgaatgaccagtgtttttggtcgccaaatgttgctgacaaacttatcccaaaactttagtggcttaaaaaaacctgcccccaactgttagtcaatctgagctgggctcagctgggctgttcttctgccagcctgcaggtggccactcatgtggtcagcaggtcggcggagagactgggatggctgggcttctctctctgcctgcagtcctgagtctctccttcttcgtgtagtctctttcagtggcctggctggcagggtagctagacctctcacatgcagctcagagctcccaagagctcaaaagcagaaatggccaggccttctgaaaacttaagtccagaattgtcacagtgtcccttctacttccctctattgatgatgatgatgatgatgatgatgatgatgatgatgatgatgatggttttttctaatcagaagaaagctggggtatgccctctacttactaaacaagtcacaagcccagctcagattcaagaaaagggtgtgaagtagaggtgcagttaagtggggggccactagtctaacagacggtcacaaccagtgccatggaaaaccaaggatattagcaaaagcagaagttgctagtgaccttgggaagccgaagctgcttacagtagctgggacaagctgaaagtcagactaagaaataaagagagggccttcaagaagcttcctgaatgatttctgctagccctgagcctatttttggaaccagcacttggggaaactgatcttgtgaggatggatgtgtttagggacacagggcttttgagagcagcaccaccccactggggcatccccagacttgggaaacgtgactctttcttaatgccactgggttttagtcaggccacagtgagaaggaacagccctaacaggcctccagccaggttgaatgagctcatttttgttgtagccaaccagtaagatttgctaatgttctacattaagtgccttctccaaagacatccctctttgcctcatatgttgaatcatccagtgcggatatttcaatgaaaatatcattggttgacttttgtgatggtaataatgctatggcatctttgccatgaagttgtggcctccttggattcttctgactttggcttctgaaaggaaggcctagatccagccctggtggtagttcctttctgaggtctctcagtcccttgagactttggggtagtttggctgccattctcactgacaaaatgtatatcagcccccacctccaccccccaatattccttgaactttgaattgcttcagaacacaggtgtggcctgaaggtattcccttattagggaagtgtcactgctgtcttctagtcaaacttgtaaagaaaaagattccagttcagtatttgcagcaagaagcttgaatgctgttctttttatcgcattgttacatcgactcattctccattttgctttggttttgtcttgacttgacttgactttgggggtaaagtctttcaccagcacacaagagtttgattgtacaaatatatcttctgcattaacatctctgcctgttgcttaagatcagttgcttttatactcagaatggaaatacctgatcttggctagttttgttataagatattgatttcatttagatttccctccacgaggtcagcaaactatcatgttcttatgtaaacttaggccaaggccagagttatcatagtccctaggttgctacggcttatcatgtgcttggtaaaaggtgatcgcaggttctcagacgagtttactttacatgagatggaatcaggcagagaggctgggatgatggagaaagctcgaggtgaagttttaaaaaaaaagttgtggaaaggaaagttccaaagaggtggtttctgaggaagtcagagcgcccagggccagagcagtcagtaatgggtgaatgaggttgtttggaaagtcggtgtgacagacacatggatgccatctacttctaggttgctggtgggtattaaatatgcacaatattccatagctcactgaggattttaaaattataagcataggattttatattttggggtgaaagaattatctggcacattaggtattggagtttaaaaaaaaagccaaatttcacagtcttaataactttttttaaaaaaaactaaaaggcgcttcatgtccagtgtgtggcccttctgaaacttatggtcatctctcccactgaaaccaaggtcttttcaaatgtggctaaatggggatgaggagacacgggtaggactttcttggtgtgtgtgcattctttaaagagccaagttgcttcggggaaacagccaggaaaatggtcaagattatttttagaggttattttattggggattttaagaactaataacatcttgagttatttttaattcagggggatgtggaaaggtttgcaattgtcaagtgttttgttgtagcttagtatccataagggaaacttagactatagacataactacaaagccagtgcagcttttgttttctgtatgttgttgggggatcaactttcacacatagcaagcacatggcctccctgatgtcaggatgcctttgttaggatctgtatttgcccttaattttgttgaaatcttttttccttcttcctcttgaaaagttccaaaatatagtttattgtatctttcatcactaaaaatttgttcctttttcactatgggcagttcacacaaggcaaaaactattgaacagttggttttagtgtgttgtataactttgctgtatatcaaactaattttgacaagttttcatcctaagcctcaaatcatgtaattaataatttgcctgtttatttatgacctaattgtgattcttttattaataaaagctaatgggaaaaggatccctgattaagctgatgactagacctacaattaattttcctgcagtatatgaagtattgtaccagagtattaaaagatatgtaatattttattgataaatctatcctttaaaaggaatacgttttaggatgtcatcattttgatgtgaatcatgtraatgttgataatatgctgtttattatacatttagtgtttcaagagattcacttaattgcctttttgcccacgtatattatgtagtctatttgcaactgttcttaaaaaaatgacattaaaagaatagtttatgtagagaaacattagtggatgttaattgtctccccacctatatttatgggtgttagcgcaactgctttgctagttgcaaagctgtattatcagagtaaaagtgtatttgtaaactgtatgggaactaaaaattaggaataaaaccattttcttatatgatggcatttgtcgtttgcttcatcagaaatgtccaggaaaaaaatgggattattggtcactccacctctcacactggcaaaatactgacatttagcagctcttatctagaagtgacttggaacatagaataaaggcatgagttcctgaagaattcattgagtgtttcctgtagaaatagctttaggagatagggagttctatctgggagaacatatgagtaactcaagagtaaaaagtatagtctgtgtaaactatagaagaaatgctgggcatggtggcgcgcccctgtaatctcagctacttggaggctgagacgggaggattccttgaacccaggagcccaggagttttagaccagtctgggtaacatagtgagaccctttctcacctactctcactgcatgccccccaaaaatatatatgtgcgcgcacgcgcgcgcacacacacatacacacacacacacacacacacacacacagaggaaattgttagaaaacacacagaactgaatgtaaatagtattaggtgggaataagaagtaaagggatggtaaggaggcttggaggaggagtaaattatctgctatgggacatcagctcttcctttagagtaggtttaggtcacataccaacagggccactttgttctgacaacagtgtgcactgacatgggcagaaagaaaccattttatagatagcaaaacaggtggttattctttattagaaatataaggaatgatttggattacttatttacactgtaaaatactatgacccccctctcagtctcatttgaattgtttaatgcatctaatcaaatctagctggtttagtttgttagtcctgtcacctgtccattcagaaatacagagcatgggccaggcacagtgactcatgcctgtaatcccagcactttgggaagccaagacgggcggatcacttgaggccaggggttcgataccagcctggccgacatggcgaaaccccgcctctattaaagatactaaaattagttggccatggtggcgcatgcttgtaatcccagctactcgggaggctgaggcatgagacttgcttgagcccaggaggtggaggttgcagtgagccaaaattgcgccactgcactctagccctctagcctaggcgacagagtgagactctctctcaaaagaataaataaataaaaataacagagcaccttcaaaatactaggcactacacctgtgccctggggaggaacgctgcccgaaacaacctgatagggtgcctgtctaccagggagctaggccttgcaccgtcagaaggcagttcctgaagctgcccagagccaagacaaaagacagaagtgagacgactagttccaaacaagataagagccatgaagaggggctaagagtgtgtatcgcaccggaggattactacggggttttcaaaccatggtactgtttggtgattacccttgggtttcagaagaggtgctgtacacaatattgcttggagacacctcattccacataatccttcttgaggtcctggattgcatgttagagggcagtgacaatatcttgtccttggccatgccatgaaatgaccttctgtttgtgtagttcctactcacaagaagagttcccaagaaaatgagtacattaaaggcagagccggaatccctgcaataaatcctgcggacagagatgaggaattattcaacgtggtcaccttgtgaatgaaaaagcttctggtgtgagggtctactgttggctcatatgacatgtatgctttcatccacctcttctcttcgcctctacgagggggtagcaaaaaggggactgtgatctcaagtgaatggtttgattttgcaggtgctgttatttttcccctaggaactagctaagtttccaaacactgaatttgcaaatgggatgagccagaaatagagatttgctattttgtcagtggtgacagttaccagtgagctggtaatattcaagtcactggaggtcagatcatttaaatcctcaaataccatcatgatagaaaatatagctactgaaataagggttacaagaaagcaataccatactgccaagatctgtgagcagtttacggacaaaggaattgtatgtgatgcgcagacatgatgtcatttctacctgttacactgaactaaacagagtttgtttgggatccaaattttccatttggcaaagattaaatccccaataacagttaggcatcgggaagcagatgaataaaatagttcatgcatctgaggagctatgcatggagtcatagtcagggagacatatatattcaaatatttgtcatttgactagaatagacaatgataagattattaacttaaattgatggttgcatagaggagtgaattatagtgaggttagaattcagagaaggggtcacctgagcttactctgtcccccaggctggaatgcagtggtgagatctcagctcactgcaacctctgcctcccaggttcaagtgattctcctgcctcagcctcctgagtagctggaattacaggcatgtaccaccacatcaggctaatttttgtatttttattagagattgggtttcaccatgttggccaggctggtctcgaactcctgacctcaggtgatccacccacctcagccacccaaagtgctgggattacaggcgcgaaccagtgagccactgcgcccagctccctgtctcttttttttttttttttttttgacacaaggtctcactgtgttgcccaggctggagtgtagtggcacaatcttggctctgcaacctctccctcccaggttcaagcaattttcatgcctcagcctcccgagtagctgagattgcaggcgcaaaccaccacgtctggctattttttgtatattttgtagaggggagggttttgccatgctggacaggctggtctcgaacttctgagctcaagtgatctgcccaccttggcctcccaaagtgttgggattatagacgtgagtcactgcacccagcagcatttctctttaaagtgaggctgagcgtctttccatgtggttttcatgtgattttctgggaattcttcatgtctcttggcatttttgcctattgaattctggttctgtcttgctttgagtttaggaataaagatattttattattattattattatttcagacagggtctcactccgttgcttaggctggaatgcagtggtgtgatcttggctcactgcaacctctatttgccaggctcaagtgatcctcccacttcagcctcctgagtagctgggactataggcatgcgcgaccaaacccagctaatttttttaaattttttgtgtagatggtgtcccactatattctccaggctggttttgcactcctgggctcaaacaaacctcctgtcttggttcatcaaagtgctgggattacaagtgtgagtcactgtgcccagccaagatatttaattctttacaacggactgccatgactggagttattgaatcagtaggatcaatttcaatcaaatgcctttttataggtgcatgtgggatagctacccctatgtgtgagttgcagttttggccttgctgtgattataattctcagtgcggatggggagaacagcctgggaaatgcattctcagcactcccaagatggtgaaaccttgtctcagctgccatgtgagaccagtcttaattatcctggtgagtgagttgagaattatttcagattttctttcatattcaaaaccaccaagcagtatgcatgcatgcacccattcaagcactttttaatgagtacaatgaaccaggcattgggctaggtgctttggggaatacaaaataaatacttgtcttaatccctgtctgaacggactttatggcaatggcccatttagggagaggagacacacacaggctgaatacaagatggaaaacaaaacagctatggagggagcctggatcaagaccttaagatgaaggattgaaggaaatgataattcctttaatttactgacaattaggtgccaaacactgtcagcgggtttatataatgatatggtttggctctgtgtccccacccaaatctcatcttgacttgtaatccccacacgctgagagaatgacctggtgggaggtgattggatcaagggggcagtttccttcatgctgttttcatgatagtgagtaagttctcctgagatcagatggtttaaaagtgtggcactggccaggcgcagtggctcacgcctgcaatcccagcactttgggaggccaaggtggttggatcacctgaggtcaggagttcgagaccagcctgaccaatatggcgaaaccccgtctctactaaaaatatgaaaattagctgggcgtggtggcaggcacctgtaatcccagctacttgggaggctgaggcaggaggattgcttgaaccagggagatggaggttgcagtgagccaagattgcgccactgcactccaacctgggtgacagagcgagactctgtctcaaaacaaaaacaaaaacaaaaacaaaaaacacagaggttggccttgactccttccttcccgctcccattccagaccctgcttgttcagcccccagccacttctgctcatggtccttccaaaatatatatccacggtttgtcgcctctccctagctctgctaccaccacaatggggagcctctgttatctctgaaagacaagaaggtagggcaccagtcttcctggaacctggttagatttttttctcccccactggagacatggtcttgctctgtcacccaggctggagtgcagtggccccatcataactcactgcagcctcctacccctggattcaagggatccccccaacctcagcctctttaatagctgggactacaggcgcaggccaccataccggctaagttttttaattttttaatttattattattattttttgagacagagtctcactctgtcacccaggctgcagtgcagtggcatgatctccactcactgcagcctccgcccccccaggtttaagcaattttcatgcctcagcctcttgaatagctgagattacagctgtgcgccaccatgaccggctaattttttaatatttttagcagagacggggttttacaatgttggccaggctggtctcaaactcctggcctcaagtgaccttcctgccttggcctcctgcatcgctgggattacaggtgtgagccactgcacccagctccgatctgctaagatcttatgtggcctccccatctccactcagaccccacttctgccattctccccacagagccatctgttaaacatgcacatgggattctgctgccctcctgttccccagtggcctcccatcacattcagaataaaagccaaattctttactggccttttggagtgggcagaactttactgcatcagactctctggtatattttaggattttttgcttcctgggcctccacccagtaaatgtcaatagtgttcatagttactgtgacaaccacacacgtcccacacattaccaaattcccccggaggcccttagtgtttcccctgatggagaagcattgcgtgattctgtggcctcttccatgcctcctacctcaccatgccatcattcacccaacaatatatatcaaacactttttttttttgtgagatagagtctcactctgtagcccaggctggagtgcagtggcaggatctcagctcactgcagcctgcctcctgggttcaagtgattctcatgcctcagcctcctgagtagctgagaccagaggcacacgccaccacgcccggctaatttttgtatttttagtagagatgggcagggctggtctcgaactcctgacctcaagagatccacccgcctcagcctccccatgtgccgggattacaggcatgagccaccacgcacggcctattctgctctttttatttgttgatgggttgtctgtcttctccatgagaatgcc

SEQ ID NO: 97594 - DNA, 16626 bp, Homo sapiens
atttctgctctgcaaagacactgttaggaaaacaaagacaagccacagactgggaaaacattagcaaaagacatccgataaagcactgttatccaaaaatatacaaagagcttttaacactcaataaataaaaaaaaaacctgattccacaatgggtcaaaggcagacacctcaccagagaagctatacaggtggcaaataagcatctgaaaagttaacctaggttgggtgcagtggctcacacctggaatcccatcacatgcggcggccaaggcaggaggatctcttgaggctagttaattcaagaccagcctggacagcatagtaagaccccatctgtatttttttcaaaaagatatccacatcatatgttgtcaggaaaacgcaaatttaaacagtgagctaccactgcatacctgtaagaatggccaaaatccagaaaattggccaaacaccaaatgctgatgaggacgtggagcaaccagaactctcattcagtgctgttgggaataacaaacggtacagccactttggaagacagtttggcagtttcccaaaacataatgcctatttcttccatgtgatccagcactctgattccttaagatttactcaacctgcaaacagatgtttatagctgtaaaccaaagataaaactccaagcccggcagctgactgaatggaacgccctcttggccagggaaacccaaagggacctgaaggttcaggccatgatgggcagtaggggtcggacatgcctcatcatactctcttccctttggaattcaggcacagctgaccagctttaaaacagagatcttaagactgacagaacagactctgtagaaataagatataaaattccaacctgactgaagtatagcatcacatgacagatagcaggtcatgaaacaaattgaaatattttaccccaaaatgtatttctttgacgtattttggaatggccctgcacagctgtctcttgtggaggaaatttgcattctgtagagaatctccttcccttaccaggtcatttctgaagagtccagcaccctttagaggtctgagaggaaacatttgccatctattgtctctaagggaagccatctatgagatttcatctacataacaaaaatcttggaccaggcacggtggctcatgcctgcaatcccagcactttgggaggccgaggtgggcagatcacctgaggtcgggagtttgagaccagcctgacgaacatggagaaacccaaactctactaaaaatacaaaaatttagctgggcgtggtggcgcatgcctgtaatcccagctattcagagggtggaggtaggagaattgcttgaacctgggaggtggagattgcagtgagcagagatcatgccattgcactccagcctgagcaacaagagtgaaactctgtctcaaaaaaaaaaaaaaaaaaaagaaagagaaagagagaaagaaaagaaaagaaagaaagaaagagaaccttggtcttcacaactttttaacttaaccaagatcctcctttgtattgattccagggtttttgataataactctttcaaccaattgctaattagaaaatctttgaattcacctgtgatttttaagccatcccaaaccctctcacattactgatttatgtcttatgtccccctgaaatgtataaaaccaagctgtaactcaactgcctggggcacatgttctcaggaactcttgacaccatgcctctggttacagtcaatcatatttggctcaggataaatctcgtcaaatattttacagtttgggttttttggtcaacatagcagatgtttatagtagctttatccatcattgccacaacctggaggtaaccaagaagtccttcagcaggtgaatggatacaatacatccagacaatggaatctttttcaggtctaatgttgcgggacgcagaggactagagagaccagtacaggtgaatacaggaggatatttattttaaggtatgcaccagctcagtggattcacatccaaaaaggtgagccttgaacaaagacagagtggggtttttataagcaggcttacaaaagaaaaacaaaggcagtcaatcatagagtgtataacttgtggtcttgcctagctggtggccttgtagctgtgtcaaaagaaaaacaagaactggctaaatacaaatatttgcaagacatagtcatgcttaagaggccagggaaaggagtaacagtaaaggaatttgtctttctctctttttttcctcagccttgctctggaggtggggggctgtctggagctcattcctttggccttggctttttggacagcgttatcttataactgtcctcgaagtgagctgctaagcagaggaaaacttgtttctttttctttttaaccctcactacatttttccccacttcaagtccttttataaaagaagtttaatagaaggcctcactattacttaattctgcgtcaagagacaagttttcttctttgggcaaaggttgatatttatgcagagccgtcagctgagtggtagtttgcctagctactattgcctctatagctgattgaatgcttctagcaaggagaggtaagagacaaaggagtattaggcaacttcctagtacagccagaactactgctattaaagtcttgaaccctctgaaaaatgaaaaccagtctccaaagagagaatctggagaccaccctttccaagtttgaactggaacatgggcgaattttctcattcttgcagttattcctataattgcctttccattgtcatcaatttccaggcagcaattagttcgattgaactttccacatcctcctccttcctgggcgaggaggcagtctaaagctaatctattttgatagatagcattcctcatttttgtagattgctgggctaatagatctaaagcccttgctgtttaattagtgatgatctcaagcactatctataacctcatgatgcagttaagcatgtaaataggagaccagtaaccccatgagccatcgtcccccaccaggtagctggcccatagtagtgaattattctctcagggggccattcatcatctttccagtcccctatggctgtgtctttctttacgctccttctatatctttctctcttctcatcatagacaggatactctaaggcttctccttgtcttagagggattaagaagaaagacggcctaattgttccaagtacacaggcccctgtccatttggctggtagctgtcggtaggcccgtggcccacagatccgatagagaccagagggtgcttgccaggtatttggagcttcaagctgataccaggtgtggtttagagcagagaaacgggagaatggatttggatgaggtggtttgggactatctttgccgcgccataaagtttttcctaattttttaacatgtttctgttccaaacatgttaattcccctactgggtctgtagaagtttttccctagcaagcaatacagtatttcccgataatagaagtttttaagagccagacgcttgaacttgtgggagtcagtttgcaggaagggtcagtcagagtaaagttattttgaggcattaactcttttgcttcccaaggccattggtctcccatgtttgtccctccacaaacataacatgaggagatgcctaggctgccagcaatgttttcagccatctgagcaaataggtttttggctaaagggggaggctcggcaacttttgatttatgtgctcatagaatgacttaaagactcggaattgctgctgggatgacttcttggtttgagtcctctttatgatatataaatttactttagctttttgactgctgctttgtaatgccatggagtaacctgtagtccatataggtagatccggctctaagatagtaagatttacaggattgcaagtgcttgtcttacagtccggttttgctggcgctttgatgagcaagattggctttagcctcagtgatgatcggtcagtgaactgtgttgtgcggttccagcaagctattgctagggccttggaggggcaaacagggtatgcacatacaattttgtactggcagtttgtacagtaccctgtaggaccagagattgtgagataggttgggttcacggatgttaactgacaaatatcaaagtatatggctatagccccccctggggggtagaggcttggctttgatttataagacttcctttctttgactcagtatgaacctcaaaccaagtcctaggtaaagacttagaaggtcatagcatatataaggctggccatttcctgggtcacaaattgaataggtgatccgattgtaagtacaagttcctaggtgagtccctgtacactcctaataagtatagaataatagagtcctagttatactgtttcctgaccctgtagtgtgtgtacaatggggacactttctaagggtacttattttaacatggtcaaggggggtgataacagcaaaacaatgtacagcgtattcatatccagcaaggacagaagagggccttgcctgggggaggagattgagcacagcaacggaacaatagtaaaacagttagtattataaggaagactactagtcctaagatttctaaccacatttacttgcttgacgagtcctcaagcttcggccgtgcgtagactagtcagcttcgggtgtgtgactagagcggggcttgtctccttaagcttcagccgtgcgttgactggtcagcctcacgagtgaccagagcagggtgatcgtcctcagcagcagcttgttgtcttctcaggatcagctgggttggatgatctgtgtcctgctggctggtccactcgtcctgagctgccggtttcagccgactgtggtggatccaagacataacacctgcaactttaacagcaacgggagtggacaagatgacagtacagggcccaccccatatgggtcctagagaagttggattccactttttaacccaaacagagtctccagatttaaaggggcacactggtctatcaggcttacaggcatcctttcttgtacccagccatggacctcttgcatggctattcctaaagcctgcatttgctttcttaaggttaattcctctagttcctggagatcacctttaatttgacctatgatttggggttggccaactgaacaaaacctcatagggtaaatactcagtttgtttggtgggggtgcacctgtctcggaggaggaccataggcaaaacctgaacttatctcagatgagcttcctggcaatatttcttcagtagctgcttgagtgtccacttcatgcgttccacttttcctcaactatgcagccaataggctgtgtgtaacttccattttatttttaacagtcttgttaaatctcgtactatttcagctacaaatgccggcccattgtctgactgtaaagatagaggcagtccaaacctggggataatatcttttaacagtactttagtcatttgtcgtgctttttctgtcctggtggggaaagcttcaacctatcctgaaaaagatgcaaataaacactagaatataccgatagcttctggcacggggcatttcgtttaagtctataaggaagttttcacaaggcatggctccttctcctgttctgtttcccagaggaggggttccttttctcctctttttgtaacttcatataatagctcagccatcagcgagaaatctggaatccagatacggcagaatcctgctgccttcaacttctaatgtgaccacagactcctggaggcccagtgagaaggagcccggtctgtcctagtcctcacatccttcagctcctgccagcccaatcagattagtatctggttcctctaaggtatggcagcccttggccaatggcctctttgtctcacggccttggccatttccctcattgccttctggacattcatccttccagtgcccccttttttttttttttttttttttttttrcatctctcacattgatccctctctagccttggtcagctcttaaatccttgtctaacttgacctcttccacgtccacatctgcgtccacatcctctcacatggctaatttctctttctataagggctgctgccaacagatccgcctttttcttaagcctttcatctgcttccttttcccttccttagttctcctgctcctgcagtcggctggcagggctgggcaaggacaaacctgaatataaaattcagtgtgtctgctgcccaccagtcctttatgcttggagaagagagagatgtttctctttttcytctcttctatctattaaacctccgctcctaaagtcctcgtgtttgtccctgtcctaaattttcctggtgcatgacracaaaccccgggtatgtagaccagacaatgtagccgcttcaagggatttgagtgaggaaggaatgaatcaatggagcccaggggggttttagagcattcaaactattcaggatgatactatggggaccaagggagagctttccccttctccctctgaaggaccactgaaaaatcactgacagattgtctcataggagaaaagcatacatatttgtttaatgcgtatacacgggagcctttgaaatggagacccaacttctcaacagagtacagagcttagataccatcttgaggttccacaaagaatgtgggctcagagcatggccaaaactaggttaggggctgggcgcagtggctcacaactgtcatcccagcactttgggaggctgaggcgggcagatcacttgagctcaggagttcgagaccagcctggccaacatggcgaaactccctctctactaaaaatacaaaaattagccgggtgtgatggcgggcgcctgtaatcccagctacttgagaggctaaagcaggaggatcccttgagcccaggagttcaagactgcagtgagctgttattgtgccactgccctctagcctgggtgatagtgagaccctgtctcaaaacaaacaaaaaaacccctaaatctgtggactctgggtgattatgacatgtcaatgtaggttcataaagtataacagctgtaccccctggtggggsatgttgataatgggggagactgggttggggcgaggacatacggraamtctctgtaaccttcttctaattttgctgtgaacctaaatctgctctaaaaatgtatatatataaaaagtggggccttcctttccctctcccctgccccagccctctcccccacctccttcctctccctgctgcctcccctctgccytcccctttcctccttagccactgtaaatgacactgcagtgaatatcctggagcacaragggcatgtctcccagttcagaattacctcctttatttagggcaggttctcagaactagagtagccgggcaaaggtctgaggcaaatgcctttgccctggggcgccccagccacctgcaggccccttatttcctgtggccgagctcctcctcccaccctccmgkcctttccccagcctccctcgcccactaggcctcctgaattgctggcaccggctgtggtcgacagacagagggacagacgtggctctgcaggtccactcggtccctggcaccggcckcaggggtggcagaacgggagtgtggttggtgtgggaagcacaggcyccagtgtctcctgggggactgttgggtgggaaggctctggctgccctcaccctgttcccatcactgcagagggctgtgcggtggctggagctgccaccgagcgtctcggtgagggtgacctcacrctggctgagcttamaggccccatctkaagactttgttcgtggtgttctttcacttctcagagcctttcctggctccaggattaatacctgttcacagaaaatacgagtsgcctcctcttcctccacaacctcacasgaccttctcccttccctcccgctggcctccttttctctcctgtcactctgcctgggcatgccccagggccttggctgtgtcctttctttcctcagggaagaccacaagtttgggctagatgcctccgcacccccccacccacaccccctgagcctctagtcctccctcccaggatgcatcaggctggatggtgacatctccccacccttgaatgagacggctttrtgctgctctgggacccgcacccagcttggactgcttgctccatggccccaggaaaagctcgtacagataaggtmmgccacttgggtggggggcccacagcatgtcaccctctctgtcccagaagtcacgtgcttggtcccctgtgaagcccctytggggacctaggggacaggcagggcatggagacaaagtatgcccttttctctgacagtgacaccaagcccygtgaacaaaccagaaggcagggcactgtgcaccctgcccggccccaccatcccccttaccacccgccaccttgccacctgcctctgctcccaggtaagtggtaacctgcacaggtgcactgtgggtttkgggaaaactggatctccctgcacctgagggtgtagaggggagggagtgcctgagagctcatgaacaagcatgtgaccttggatccagctccataaatacccgaggcccagggggagggccacccagaggctgatgctcaccatggggcgcctgcaactggttgtgttgggcctcacctgctgctgggcagtggcgagtgcygcgaaggtaagagcccagcagaggggcaggtcctgctgctctctcgctcaatcagatctggaaacttcgggccaggctgagaaagagcccagcacagccccgcagcagatcccgggcactcacgctcatttctatggggacaggtgccaggtagaacacaggatgcccaattccatttgaatttcagataaactgccaagaactgctgtgtaagtatgtcccatgcaatatttgaaacaaatttctatgggccgggcgcagtggctcacacctgcaatcccaccagtttgggaggccgaggtgggtggatcacttgaggtcaggagttggagaccagcctggccaacatggtgaaaccccgtctctactaaaaatacaaatattaatcgggcgtggtggtgggtgcctgtaatcccagctactcgggaggctgaggcaggagaaccgcttgaagctgggaggtggagattgcggtgagctgagatcacgctactgcactccagcctgggtgacagggcgagactctgtctcaaaaaatagaaaaagaaaaaaatgaaacatactaaaaaacaattcactgtttacctgaaattcaaatgtaactgggcctcttgaatttacatttgctaatcctggtgattccacctaccaacctctctgttgttcccattttacagaaggggaaacgggcccaggggcagggagtgtggagagcaggcagacggstggagagaagcaggcaggcagtttgcccagcatggcacagctgctgcctcctattcctgtgcaggaagctgaaagccgagctactccacacccgggtccgggtccctccagaaagagagccggcaggcaggagctctctcgaggcatccataaattctaccctctctgcctgtgaaggagaagccacagaaaccccaagccccacaggaagccggtgtcggtgcccggcccagtccctgcccccagcaggagtcacacaggggaccccagatcccaaccacgctgttctgccgcctgcggtgtctcaggccctggggactcctgtctccacctctgctgcctgctctccacactccctggccctgggaccgggaggtttgggcagtggtcctgggctcctgactcaaaggasaggtcaccttcttcttgggcgagctcttcttggggtgctgagaggccttcggcaggtcatcacgacccctccccatttccccaccctgaggccctcaggatggacaagcccaaacaaagcaacccccacggccccgctagaagcaaarcctgctgtgctgggcccagtgacagccaggccccgcctgcctcagcagccactgggtcctctaggggcccgtccagggstctggagtacaatgcagacctcscaccatttttggctgatggactggaacccagccctgagagagggagctccttctccatcagttccctcagtggcttctaagtttcctccttcctgcttcaggcccagcaaagagagagaggagagggaggggctgccgctgaagaggacagatctggccctagacagtggctctcagcctggggacgtgtggcagggcctggagacatctgtgattgtcacagctggggagggggtgctcctggcacctcgtgggtcgaggccggggatgctctaaacatcctacagggcacaggatgcccctgatggtgcagaatcaaccctgccccaagtgtccatagatcagagaagggaggacatagccaattccagccctgagaggcaaggggcggctcaggggaaactgggaggtacaagaacctgctaacctgctggctctcccacccagaccccatgctgcactatgtgggcttcgtccctgtcattgatggagacttcatccccgctgacccgatcaacctgtacgccaacgccgccgacatcgactatatagcaggcaccaacaacatggacggccacatcttcgccagcatcgacatgcctgccatcaacaagggcaacaagaaagtcacggagtaagcagggggcacaggactcaggggcgacccgtgcgggagggccgccgggaaagcactggcgagggggccagcctggaggaggaaggcattgagtggaggactgggagtgaggaagttagcaccggtcggggtgagtatgcacacaccttcctgttggcacaggctgagtgtcagtgcctacttgattcccccagggaggacttctacaagctggtcagtgagttcacaatcaccaaggggctcagaggcgccaagacgacctttgatgtctacaccgagtcctgggcccaggacccatcccaggagaataagaagaagactgtggtggactttgagaccgatgtcctcttcctggtgcccaccgagattgccctagcccagcacagagccaatgccaagtgaggatctgggcagcgggtggctcctgggggccttcctggggtgctgcaccttccagccgaggcctcgctgtgggtggctctcaggtgtctgggttgtctgggaaagtggtgcttgagtccccacctgtgcctgcctgatccactttgctgaggcctggcaagacttgagggcctctttttacctcccagcctacagggctttacaaaccctatgatcctctgccctgctcagccctgcaccccatggtccttcccactggagagttcttgagctaccttccatcccccatgctgtgtgcactgagagaacactggacaatggtttctatccactgactctcatgggcctcaactttgccaccttacaaaataatttcagcccaaggcctcattaaagaccttcatgtaataatagccaattagaaggaaaaataaggccgagtgcagtggctcgcccttgtaatcccagcacattgggaggtcaaggtgggaggatcacttgaggtcaggagtctgagactagtctggccaacatggcaaaaccccatctctactaaaaatacaaaaattatccaggcatggtggtgcacacctgtgatcccagctactcaggaggctgaggcagcagaatcagttgaacccaggaggtggaggttgcagtgagcagagattacgccactgcactccagcaggggcaacagagtgagactgtgtctcgaataaataagtaaataaataaataataaaaattaaaaataaattagcaatctgaaaaagataggaagataaaagtatacctagaagtctaggatgaaagctttgcagcaactaagcagtacatttagctgtgagcctcctttcagtcaaggcaaaaagggaaacagttgagggcctataccttgtccaatctaattgaagaatgcacattcacttggagagcaaaatatttcttgatactgaattctagaaggaaggtgcctcacaatgttttgtggaggtgaagtataaattcagctgaaattgtggaacccatgaatccatgaatttggttctcagctttcccttccctgggtgtaagaagccccatctcttcatgtgaattccccagacacttccctgcccactgcccgggacctccctccaagtccggtctctgggctgatcggtccccagtgagcaccctgcctacttgggtggtctctcccctccaggagtgccaagacctacgcctacctgttttcccatccctctcggatgcccgtctaccccaaatgggtgggggccgaccatagagatgagatccagtacatctttggggagccctttgccaccccactccgggctaccggccccaagacaggacagtctctaaggccatgaccgcctactggaccaactttgccaaaacagggtaagacgtgggttgagtgcagggcggagggccacagccgagaagggcctcccaccacgaggccttgttccctcacttgccagtggagggactttgggcaagtcacttaacctccccctgcatcggaatccatgtgtgtttgaggatgagagttactggcagagccccaatcccgtgcacgtgcacagccagtgcccagtatgcagtgaggggcatggtgcccagggccagctcagagggcggggatggctcaggcgtgcaggtgcagagcagggcttcagccccctgggagtccccagcccctgcacagcctcttctcactctgcagggaccccaacatgggccactcggctgtgcccacacactgggaaccctacactacggaaaacagcggctacctggagatcaccaagaagatgggcagcagctccatgaagcggagcctgagaaccaacttcctgcgctactggaccctcacctatctggcgctgcccacagtgaccgaccaggaggccagttccatgccctccacaggggactctgaggccactcccgtctcccccgacaggcaactccgagtctgcccccgtccctgcaacgggtgactctcaggatgcccctgtgcccctcacaagtgactctgaggctgcccccgtgcccccctcaggtgactctgaggctcccccgtaccccctacgggtgactctgaggcccgtgcccaccttgggtgacactgaggctgccccatccccgctacgggtgactctgaggccgcccctgtgtcccccacagatgactccgaggaagctcagatgctgcagtcattagtttctagtgtcccatcagccttggtctcaagaggccgagagggtgcaaccccaggggctcccctcccatcttgagctcttcctgaataaaacctcattcccctgtctggcgtctttgctctcaaggctaagctgcaggaaggagtggacctcagttacccttacagcaccaggtgggggcccaacctgtgaccccatcacctggcacaatccccaggctctggggcgttgatggtgccatcctcactttcgagtggaggaggtgggcccagggaagttgattggcaggcccaggagtgggagtcaggcacaggtcactccagagcctgcccttccctgaatggaaccaggctgctggctcccaggggctagattctgtcccagatggtgggaggggctggtggcagctgcagtcagagagggagctggggtctggcaggctgtggctgcctctggactaggggatcccagccacacccacatcctctgggtgcagggagtgaagtctgtgttctaactggggtctggggaacccgcctgggaaaagaaagggattctgctcctccagccggatgcaagtggaagaaagaataacacatcacaccagaaggttggaagcagaggatggggagggtgctgggcagtaggcgctgggtggtgggcctctggggggtgcccaatggctctggcagagttgacggggcaggggcagagggcagaaggcagagtcaggagtactcctgcctctgctgggtctaagcccaggcacatcactgagcacttgaccagcctgacctcaccatggccttgtgaggtgggtatggtgtacaccctccttttagacgtttatagatatttagaggaaaatgaggccctgacagggcatcacgtgcccaaggtcactcagagcaaggatttgaacccaggtccctgactccaaagccagtgcttggaacaacgttgggggtcttcttccccactcctcacctaccttctaaacaggcactgtggggcagggtggggcttagatgagagaaaattctggaatcctgagcaactttgcctggggggctccgcggtggagggcagaagcacccaaggaccagctagccactctctctgcccctccagcctacaggtgggaggataaggctcagggccgacaagtcctgtggcctcatgcagcagagctgagccgggacgaaccctgtcccctggagaagcaggggacaccctggctggctgtgaccactttggccaccctgggcttcctgggttggtcaaggggtctctggtgtaaaaaggggactccctgtcaaagactgagtgagatggagctgcccggcaatgtgggcctctcccagtgactgtccctgttctcttgggcaacggaagcccgaggatacaatgatgtgtcccttccttggccacactggtacccacagggattattgtgtttctacctgtggagtcagctctcaggcgcctccagcactgtgggagaaacccctgggaccccagtgcctcttcccaacccttgggactggcacccgtctcttgttgagagaaagcacagtcatgtctgtcattcagaaaatcacatccctggatggccaagccacgtcagaagggatgggctgtggggatccaagcgtgttctacctctgggctgcacccgccatccctctgcttcggtttgaatgcttgtccccgccaaaactcatgctgaaatttaatccccaatgtggcagtattgagaggtgctgcctttaagaggtgactggatcatgaggccctgtccccgtagatggattcatccattcatggattcatgggttagtgggttatcatgggagggtaactggtggctttgtaagaggaagagagacttgagctagcatgtgagcaggctcagcatcctcaccacgtgatgcccagtaccgtctcgggacaccagagtccccaccagcaagaaggccttcacctgctgcagcctctctgaggcaggaggagagggaattagggaagccaagggttggggcataagcaaaggaacagcaggtacagcccgttcacataagccagagaacagcaggtgcagcccgttctcataagccagagaacagcaggtgcagccagttctaggcaggattggggagcacacaggccacatcctcactgctgtgataacaagtcaggagcttccacttcaacctctgattgaccctgggccaatcctccacttcagcctctgattggtcccaggctaatccttcatagggtgtaaccaattggaggcctctaaagggcatctggggtgttctttataaaaaccctgagaagcattgcaattgggaggtccttgagccgtttgcttgggcccgctcccacccggtgggttgcacgttcgcttcaatcaatctgtgcctttggtaagctgttttcttgttgctttgtctttttttttttttttttttttagtggagtttcactctcattgcccaggctagagtgcaatggcacagtctgggctcactccaaactctgcctcctgggttcaagcgattctcctgcctctgcctcccaagtagctgggattacaggtaccggccaccacgcccagctaatttttttgtatttttagtagagacggggtttcaccatgttggcaaggctggtctcaggtacctcggcctcccaaagtgctgggattacgggcgtgagccactgcgactggcctgttttgtctgtcattgtttcattcttttgttactttgtgagttttgttcacttctttgttcaatacaccaagaacctggacaactcagtcaggaccttccatcctataacacctcaacctcggacttctcagccttcataactgtgagaaattccttttctttataaattacccggttttaggtattctgttataagcaacagaaaatctactttaaaagcctccatggcacaggtgagccctgcagtgtgtctgggtgatgcctgcagctgtcgagaaggaggagacagctcagagtcacctgcaatctggctcttgccattacagactccagatgatgaagttgaaaatactgacaggctggaggccatctggggtcctgctggctcccagttccaggaagcctggaagagcactggggtgagctcgggccagcgcatgtttactgtcacaggggacatgtttcagcactttcattgtaaggctgtggccttctgtgctt

SEQ ID NO: 97595 - DNA, 1980090 bp, Homo sapiens
  misc_feature (1)...(1980090): n = A,T,C or G
tcatatttaataggaaatgaaacaaggtcctattaaatatgattaagtatagttgtgaggcaagagcaccaaaaaaactcagagacctcctcaaatagcacaagtatgtactccaagccttcagaaaactacattcagctttcaaatctgactgtgaaaaattgtgaagactgaagaccaaggagccaattacagtgaacatttcctgttcacctctgtatctcctagttaacattttactagttcacatacaataattacttgacagattaataagtatctagcatatcccaaagcaaacggagttataagttgggcagatacagaagtaaataatctctagaaaccaacagtgtgggcatcgttgctgaaatggttggtaatggtatcgtgccatggaagtttgacactgggatggagaatatccagaaggagctggaaggattcttcatgcagattcatatgccacggatcataattgtgatcatgcctcaaccacactacccataagatcattcctaaatatgttactcaaccagacttggtaaggtatgaggaggacggaagattaaaacataaatggaagaacaaagagagaaaaaggaggaagcacaaagtcaatcacacttgcaaactactcaggtgtgggaaagtaaaactacaagcaactaagggaagcttgtgctatcccaaatattttcacaatcatattgaagaaaaatattcaagttatttcaatacttaacaagaagccaggcacaacggctcacatctgtaagcccagcactttgcgaggccaaggtgggcagatcacctgaggtcaggagttcaagaccagcttggccaacatggtgaaaccccatctgtacaaaaaatacaaaacattagccaggtgtggtggcatacaactgtagtttcagctattcaggacgatgaggcgtgacaattgctttaatctgggagacggaggctgcagtgaaagccgagatcgtggcactccacttcagcctgggcaacagagtgagactctgtctcattaaaaaacacaatcacattgaagaaaaatatttaagttatttcaatacttaccaacaacttactgatgctatcaagaaaatgtataaccagaaacaaaagcattaaatcaaaagtacaacaatacgataaaaaagaaaataaaggtcaaagacttaatactaatcagatcctatgaaagatggatataaactctgttgaatcactgttgtcacagggcattaatttgatattttttttctaaacagaactccaaattagatatggagaaatttactagcctaagtgcttcacaaattcaggaagccatttactatcctgtctgagcaaacctaatagatgactcgagtgaatgagcaaaggcagaggcaacctctgctgccatctgttttgtcgtctcctaccaatctacaaacagctgcaccacaaaagttccaagtgatagaaagccctgggcttctgtcatcccattattccttctttggtttaccacaatcatttctacaatgcatccagattatgcctttcattgttcacaactcttaaagagcatctggttctattttgaggaggggagtgtgtggaaggggactctttctctacacttagtagtgtataagacaagctttattttaaaaaaaatacaccgttcactggtaagatcaagatgtataaacacattcacactttcctgtcacacacaaactttgacacaaccaatggtgctggagagtgttactctgttggcaaggaacttaaaatgacttctgtccatctgtgaaatacaccatttaaaatttcttccaatggtgcttactttggcagcacatatactaaaatcggaatgacagagagaatacaaggatgacatgcaaattcgtgaagtgttccatattaaaataaaacttcaacaaactgatatcaagagaggctctttatatggaaaggttttcttgctacctccttccagatcttcaaggtttttttttttttgagacggagtctcactctagtcacctaggctggagtgcagtgcataatctcagctcactacaacttctgccttctgggttcaagcgattctcctgtctcagcctcctgagtagctgggattacaggcacccaccaccacgcccggctaatttttgtacttttagtagagaaagggtttcgccatgttggccaggatggtcctgaactccttacctcaggtgatccgcctgccttggcctcccaaagtgctggaattacaggcatgagccacgcacctggccagatcttcatttttcaagtagtaaacaattacttttcaccaactcataaccttaagccaagagtgtcttttcagtactgttaaagaaaaacagctcacagattacagtggattaatgacagccacaacttctgccactacccccactaagagatggggtctatttctccacctccttgaatctgagctaggtatatgattgctttgtccagcagaaaagaccagaaattccactgtatgccaaatgcgagcttaatctttaagaggccaggcaccttcttttatgtttttttaattagaaacaggttctcactgctacccaggctggcctcaagtgatccatccacttcagcttcctgagtagctggtattacaggcacatagccctgcacctagctagaggcatggcaacttctgcttcctgctttttggaatctagctgccacattgtgagaaggtcaaagcagaacatgcatcagaaagggctgcgtggaggagaattaaggtcccagttgacaattccaactaaaacctcaggtggtaggaccaactcgacagtcatataattaaggtatcttggaaataaatctaatcgagctgtcagcacacagatcagagatgtgccattcctaccaaactctggccaaattgcaagaccatgcgtgagaaaatacttgtttttaagccattaaattttgaaattattaattatgcaacaatagataaccaaaacaaaatttggtatcagaaaggaggctctgctataacaaaaactcaaaatatgtacggtttgggtccaggtggtagacaacagctagaagactgctggtaaagatttgaaaaacagtatagaaatgttactggtggctgaagaaatggagacctaagaaaaagcagcagacccgtttcatacagtaacatggagaacagaaagggtacctaatgaactcatgcacccaactaaggagaattccaagaagaatgtcaaaagtgccaactggcttgtttttagctgcctacaataaaatataggagtagtgacatgaatttaaaaaggaactgtttggttcctttttaagcagaattcagaggaaatataaagaagttggacttcatgggttaaaaaataaaacaattcctcttttcagtaactaagcttaaaaccactcaaaataagaaatggccttagggcaaagatcaaatccagtgctagcagtaaagtagagcctctaggatgtggtggtaagatccttttttgagacctcatgaagatgttaggtggttgctcatggactttctcttagaccagtggttctaaaacttcgtatgcatcagactcacccggagattttattaaaacctagatttctgggctggatcatcacagtttttcatctagaaagtctgggatggagacttcaactgtaagttcccaggtgatacaaatgctgctggtacagacacccgtgcttttggaatcacataactagaccaaaaggctttaaagaatcttaagtgggtgctttgagtaccaactaaaccagacagtagagcttttgacaataaaaggttattttcacatgacagtctgatacaaaggcatccaaggtaaagaaagccctatcttaaaacgatttgtgggagtattttttacctaatgttgtgaacccctaagacatctatggtaaaacccaaaaggcatttcagagaaatataccagtggaaacaccatcagcttggactaatagagccagttaaaaatgaaaaatactagcaccctactcggacaggaagacgccaaaaaacacaggccatttcttgtggaaaagaatcagaagacagccaagagcctaggggatggagatgagggccaaagagaggcacccaggtagtgaactagttcctcaacaaggatatagatcgagctaaatgtcagaaatgctatgcaccagtgaaggtcatgtgcctcccagtcacatctgctgcttttttctgtttaaataagtttacaatggcaaggtttttactatattcacagatacatatacccgccatcaattttagaccttttcatcacaccaaaaataaatttgtttttaatttggagatagggtctggctttgtcacccaggctggagtacaggggtgcaatcacggctcaccgcagcctcaacctcctgggctcaagcgatcctcttgcctcagcctccgagtagctgggactacaggcacacgacaccatgcctggcaaatttttgtattttttgtagaaatttcgccatgttgtccaggctattctcaaactcctggattcaagcaatcaacccaccttggcctcccaaggtgctgggattacaggcatgagccacctctcccaacccaaaaagaaccgtataccttttagctatcaccttcccccattccagccctcccagcctaagcaacgctaatctttctgtctatagatttggctctttgggacatttcatatacatggaagcatacaacacatggtcttttgtgactggattctttcacttagtacatttttaagattcatccatgttgtaggtaggagtactttattctttcgtacagccaaaagaatgccagtatacaggcatatcactttttatttacctattcatcagctggacatttgagttgtttccaccttttggctattatattgcaactataaacattcatgtacaaggttttctgtggaactatggtttcattgcttttgagtatatgtctaggtacagaattgctgggtcatatggcaactctatgtttaaccttcaaagaactacccagactgttttccaaagcaactgtaccattttacatttctaccagcagtgtgtcagggctctgatttctccacagccccgaatactttttgttttttttttttgagacagagtctcgcactgtcacccaggctggagtgcagtggcgcgctctcagctcactgcaacctctgcctcctgggttcacgccgttctcctgcctcagcctcccgagtagctgggactacaggcgcccaccaccatgctcggctaagtttttgtattttttagtagagacagggtttcaccatgttagccatgatggtctcgatctcctgacctcgttatctgcccgcctcagcctcccaaagtgctgggattacaggcatgagccaccgcgcccggtccacagctcctaatatctttttgaagaggaatatctgatgtaattttcctgtccctgccttaccattatatgttggggtggaaagtggggaagaacggaaaataacgtgtgcttttaattcataggtcttcagtttgagatgagctgcacccaggtgtgtccggaattggtgggttcttggtctgacttcaagaatgaagccgcagaccctcgcggtgagtgttacagctcttaaggtggcgcgtctggagtctgtcccttctgatgttcagatgtgttcggagtttcttccttctggtgggttcgtggtctcgctggctcaggagtgaagctgcagacctttgcggtgagtgttacagcttttaaggcggcgcgtctggagttgttccttccccccagtgggctcctgggctcgctggactcaggagtgaagctgcagatcttcgcggtgagtgttacagctcataaaagcagcatggacccaaagagtgagcagtagcaagagttattgcaaagagcaaaagaacaaagcttccacagtgtggaaggggacacgagcaggttgccaatgctggctcgggcagcctgcttttattctcttatctggccccacccacatcctgctgattggtagagcccagtggcctgttttgtcagggtgctgattggtgcgtttacaatccctgagctagatacaaaggttctccacgtccccatcagattagttagatacagagtttggacacacaggttctccaaggccccaccagagcagctagatacagagtgtcgattggtgcatttacaaaccttgagctaaacacagggtgctgattggtgtgtttacaaaccttgagctagatacagagtgccgattggtatatttacaatccttgagctacacataaaggttctccacgtcctcaccagagcagctagatacagtgtcgattggtgcactcacaaaccttgagctaaacacgggatgctgattggtgtatttacaatccctgagctagatataaagactctccacgtccccaccagactcaggagcccagctggcttcacctagtggatcccgcaccggggctgcaggtggagctgcctgccagtcctgcgccccgcactcgcattcctcagcccttgggtgatcgatgggactgggcgccgtggagcagggggtggtgctcgtccgggaggcttgggccacacaggagcccatggagtgggtgggaggctcaggcatggcgggctgcaggtcccgagccctgccccgtggaaaggcagccaaggcccagcgagaaattgagcgcagcaccggtgggccagcactgctgggggacccagtacaccctccgcagccactggcccgggtgctaagtcccccattgcccggggccagcagggctggctggctgctccgagtgcggggcccaccaagcccacgcccacccggaactccagctggcccgcaagcgccacacgcagccctggttcccgctcgtgcctctccctccacacctccctgcaagctgagggagtgggctccggccttggccagcccagaaaggggctcccacagtgcagtggggggctgaagggctcctcaaatgccaccaaagtgggagcccaggcaggggaggtgccgagagcaagcgagggctctgaggactgccagcacactgtcacctctcacagggagcctcacctggacctgatgtagaggatgagatcctagacctgtcaagctgatgtagtaatggagtgagtgagacttgtatgggctgctctatcgtgcatgtgtgaagggccagagagcacactctggtcagtggttattttggtgatcatccccaatgaaccacatgtctaggtgtttacatttttgtttagtcacttcccacactgatgtaggctgggcctattactgccttgaccattaacacatggcagaaatgatgctgtgctggttctgggcctagtccttaactgtgtgggtagcatccactgcctccctgttggaatccagataccactccacaagtgacccaagcagccaccgggtcccagctgagcacccatccaagtctcagaggaacacagccattccagcacctagccaacaccacatgaaccagaagaacagcttggtcagcccactgaatcatgagacataataaatcactaattgaagctactaagctttagagtagtttattacactgcaataaatagccaaaacagatatcccctttgggtaggcttctgaagagatgtaatgtggaataaaccttttctttcttctgaaaaatctaatgcattatacctatgatcaattcaacaacatttaaacaaaggaaacatagcgtctaagtctcaggaggcttttctacagtacatattagtcagggttctccagagacacataacaaataggatatagatcagatagagagagatacggatggatgagagggaattcactagggaaattggctcatgtgattatggaggcccagaagtcccataactggccatctgcaagctggaggcccagggatgccagtgcctggctcagttgaagcccaaaagcctcagaaccaaggaaggcaatgatgtaattctcagtctgaggccaaagacctgagagcttggtgtgggggttggggggaaggttggcaggcccctaattagtccaaaggccaaagaacctggggttccgatgtccaaggacaggagaagaatggaaagacagagaaagagaaacatctaaaattaaccatcacagggtctaagccattaataacaaatatttcaagtttccattttcaacagaaaacaacaaacagctatggaggccatcaagaaagaacacccaaggatgggacatgtcagcattagctgacatctcttgatggcagaccagaatacagcccaatctaaggcaaagccctgtgtatcaagtaaattcacaagagaatgtggaagtcagcaaggactacacaggcaccaaacaattggtgggaagagacaaggaaaccttcaaagcaggccgggcgcagcggctcacgcctgtaatcccagcactttgggaggctgaggaggccggattacctgaggtcaggagttcgagaccagcatggccaacatggaaaaaccctctctctaccaaaaatacaaaaattacccaggtgtagtggtgtgcacctgtgctcccagctactagggaggctgaagcagaagaatcgcttgaacccaggagcaatgagccaagatcatgccactgcactccagcctaggcaacagagcaagactgcaactcaaaaaaaaaaaaaaaaaagaaaaagaaaaaagaaaacttcgaagcagtcagaaggattaagaaagcagttcttctgaaacctgtcatggcaacgagagaatacttcggcatcaatacttccagcaaaaacttgtaagctctgcttttttgtactgaggcagctgctgccttatgcctgctcctttggatttaggagtcctcacatgtctgatccaatcaccctgtcttttggtccatcttatggagggtcgagatggcatatatggaacttggaggctttctgaaactctggaagaggtatagcaactccctcataaggttgtagaattattctaattcgcacaggataattcttagaaaactgccagacacatagtaaaatgtgaatatattatactattaaattactacatatttgttcaatgacaagtgtatctgctctaaaaatggtgactttcaggaaaaaaaaagtttttaaataaaatattatcaacccacaagtctattaatagaaaattggttaggccaggcacagtggctcatgcttgtaatcccagcactttgggaggccgaggcgggaagatcatctgaagttgggagttcaagaccagcctgaccaacatggagaaaccccatatctactaaaaatacaaaattagccaggcatggtgccgcatgcctgtaatcccagctactcgggaggctaaagcaggagaattgcttgaacctgggaggcagaggttgcgatgagtcgagattatgccattgcactccagcctgggcaacaagagcaaaactccgtctcaaaaaaaaaacaaagaagaaaaagaaaattggtttaaacaaactgtagtctaggtatagagtgaaatactatgttgtctttaaaaagatagcaaatggccggacgtggtggctcacgcctgtaatcccagcactttgggaggctgaggcgggtagactgcctgaggtcaggagtttgagaccagcctggctaacatggtgaaatcctgtttctactaaaaatacaaaaaaattatccaggcatggtggcacacacctgtagtcccagctacttgggaggctgaggcaggagaattccttgaacccaggaggcagaggttgcagtgagccgagattgcgccactgcactccagcctgggcgacagagcaagactctgtctcaataaataaataaaagataacaaattagggaattttaaaagatttctgtggaaaatttctagtatatataaataaaaaaacaagttgaataaatagtataattccatttaaacaataagtatatactgtttgcgtatgtattttaaaaatccgatagaaaccaccagaataggccgggcgcaatggctcatgcctataaccccagcattttgggaggctgataagggtggatcatctgaggtcaggagttcgagaccagcctggccaacatggtgaaaccccgtctctactaaaaatacaaaaatttgctaggtgtggtggcaggcgcctgtaatcccagctactcgggaggctgaggcaggaaaatcgcttgaactcggaggcggaggttgcagtgagctgagatcgtgccattgcactccagcctgggtgacagagtgagactccgtctcaaaaaaacaacaaaaaaagaaaccaccagaataaataaatgctataacttgggtgagaacttcactttctacaaaatacatggttacaatatcttttcttcctttgacagggtctcattctgttgctcaggctgcagtacagttgggcgatcatagctcactgcagcctcaacctcctggactcaagccatctgcctgcctcagcctcccaaagtgctgggtttacaggcatgagccactgcgcccaggcctataatatctttttaacagtaagcacacgacttttataatcagaaaaaatattaacgtaaaggcacacagatccttcttagaacacaccatacttttacctgaatttgtttgcaatgttttcaatattcatgcttctctagcactcgagagctcaagtctgtttttagaacaacatcataagctgctacatgagctgtttcctgtgtcggtcagctatttttaattaatgaacatttgctgtaagagatcactgagaaagaaaaacaccaactcttttgcaagttacactacagaaaggtttcctctctagaattaaaaaaaaaaaaaatacagcattcatcatacagtagacaatgattgaggataaaatcagagttaagcagtggctgggcatagtgaggcacacctgtagttcccagctactggaaggctgaggtgggagnnnnnnnnnnnnnnnnnnnnnnnnnnnnnnnnnnnnnnnnnnnnnnnnnnnnnnnnnnnnnnnnnnnnnnnnnnnnnnnnnnnnnnnnnnnnnnnnnnnnnnnnnnnnnnnnnnnnnnnnnnnnnnnnnnnnnnnnnnnnnnnnnnnnnnnnnnnnnnnnnnnnnnnnnnnnnnnnnnnnnnnnnnnnnnnnnnnnnnnnnnnnnnnnnnnnnnnnnnnnnnnnnnnnnnnnnnnnnnnnnnnnnnnnnnnnnnnnnnnnnnnnnnnnnnnnnnnnnnnnnnnnnnnnnnnccgccttggcctcccaaagtgctgggattacaggcgtgagccaccaagcccggccaaaagttaaaattaaagaagaccagtggaagggaagaaagaaaacaattaaaaaaatacaagattggttttaaatcaaatatttatattaagcacctatgtataaaacactgtcctacactgactagaagacttaaaattgtggttgctgtttctgtaagagcagtaatataactatgccctccactttattagctcctttcaaggtttatatgagacaatatggttaaacagtagctgctatatagactttaattacgttttatttatttattcttcaaccaacaagttatataccaccacaaggaattcttctgaagagttagcagcatccaaaagaggtaagacttgtccaatggttgggtagtagagccagggttcctaaggtcccacaagccactctcccttagaatggagacagaattttcctgtagatctaataaggcccttattgcaccrtgtatagtaacatacattccaggctcaaaatgaaaaaagggtttatttttcttttaccaaactgtaatcctcatgacaggtgacaatccacacaattataataaactctacccacatcctcttaactcaccactctcctaaattctttgcatttgtaactgtttcacaataggatgctttcttgcctatttttatttggttcaaataggttttagaatttttacttaataaaatatatttctacctaataaaatatatgtgcaataaaaatgtagctaaaaatgctgggcttggagagaagctctgggagtagggtggtgaaggcygatgccctctaaaaaggccttgcctgtaccacattccgtaggaggtgtaattgctaatttttttttttttttttttttttttgagacagactctcgctgtgttgcccaggctggagtgcagtgacgccatcttggctcactgcaacctcccaytcccatcttcaagtgattttcctgtttcagcctcccgagtatctgggattacaagcatgcgccaccacgcctggctgatttttgtatctttagtagagacagggttacgccatattggccaggctggtttcgaactcctggcctcaagcaatccacccacctcagcctcccaaagtgctagaatttcagctgtgagccaccgcgcccggccatgattgctaattttatatgtcaagttggaaggtattttggataacattaaatcagtgagctttgagcaaagcagactgccctccataaggtgagtggtcctcatccaatcagttaaaggcctgaacagaacagagaccagcctcccaagcaagagcaaattccccagcaaatggcctttggacttgttttgcatcattggctgtcctgggacttgagcctgccaaccccactgcagatttggacttgtcagcctccataatctcatgagttaattccttatgatacaattttttatatgtatatgtacaggcacactcagagatactgcaggttcagttccagaccaccaaaacaaagtgaatatctcaaagctagtcgcaaacttttttcatttcctagtacatataaaagttaaagttatgtttacaatacactgtagtttggcaaatgtgcaataccattatattttaaaaaacaatcgacatccttaattaaaatatactttaggctgggtacagtagctcacgcctataatcccaacactttgggaggccgaggtgggaggattgcttgaggccaggagttcaacaccagcctgagcaacatagcaagacaccatcactacaaaaatttaaaaagtagccacgcatggtggcgtatgactgtggtcccagctgcttgagaggctgaggcagaaggatcacttgagaccaggaagctaacgttgcagtgaccagtgactgcaccactgcattacagtttgggttacagagcaagatcctgtctcaaaaaacaaacaaatgcacaaatacacacacacacactttgttgctaaaaaatacaacgatcatctaagtcttcagtaagtaatactctttctgctaatggagggtctttctttgattttttttttttttaagacgttgtcttgctctgtcgccaggctggagcgcagtggcgcgatctcagctcactgcaacctctgcctcctgggttcaagcgattctcctgcctcagcctcccgagtagctgggactacaggtgtgcgccaccacgcccagctaatttttgtattttcagtagagacggggttttaccatgttggccgggatggtctccatctcttgacctcgtgatctgcccgcctcagcctcccaaagtgctgggattacaggtgtgagccaccgcacccagcctctttctttgatgttaatggcggctgactgatgagggtggtggctgttaaaggtgagggctgggggggctatggcaatttcttaagacaaggaagaaaacagtatattatatatatatataaaacatacaaaatatgtattaatcgactgtttatgttatcagtaaggcttctggtcaatagtaggctattagtaaattaaattttggggtagtcaaaagttatatgtgaattttcagctcaacaggggtcactgccccaaccccaaagctgttcaaaagtcaactgcattttttaacactttctattgtttttactcctcctgttcctctaatttccataatgtatcctagcctatagccactactcttctctggctttaatccctattacatcacaatttaatcacaaactggagttgtaggtagaacagcacagtttaggatgacgaaacaaaaaaagagattaagtgacttgtacaagctcgaactttaatgataaaattatgattaggacccattttctagtaactcttagtttaatgtctattataagggaccagcataacatagttcttagaagcacaggatgtaagtcacattacacttgctctatcatttatgaaactatgacccttaatattaacttgtattctttctgctttggtttcttcatctataaaaattggagtaattaatagcatctatcttcagacaagattttctgagataaaatgcataaaacaccttgaatactacctagtacatagaagctctcaataaattttatccattcttattcttctattattattcaatcagcctttcaatgagcatatactataaataccctatgtgcatttgtcctttttctttaatcccttgtggaatcaaacttcaggtggttggggccaaaaacaattataaaacatgactaggccgggcgcaatggctcacgtctgtaatcctagcactttgggagaccgaggtgggcggattgctggagctcaggagttcgagaccagcctgggcaacacggtgaaaccctgtctctactaaaacagaaaaaattagccgggcgaagtggtgcgcgcctgtagtcccagctacttgggaggctgaggcaggagaactgcttgacccaggaagagggaggttgcagcgagctgagattgcaccagtgcacactagccttggcgacagagtgagattctgtctcaaacaaacaaacaaaaaaacaaaaacatgactaatccagtatgtacatacataacgtttcactgggacacatgcaaataagtgcttagcaaacattaaaagaaacttggggcctaaaggaaatcagaattttaaagaatatttctacctactgagttgtctacttagtggctacgtgaaatcagtgtcttctaaatttagaattttactgaattctttcttcatgggatcactttatacaacactgacaaagtcttcacaaggctacattctaaatccaagtagcaaataaatagcaaataaatctycttctgccattttttatctcttgtctttaaccacaacatttcattttctgcccacatggactaatgcttcttcaaagaagtgggcagtggtcagaaagcctgagttctcatttcaattctcacacaaaagttaaaagaaacttggagcctaagtttcttggggcaacctcaggtttgccaataatggcaccacctgctccccctatttcacaggcttccaagaacaaaaacagtgaagacacatcataaaacagggacatttacccaggcttccatgttcattgcacagagttaaaaaatatatatttgtggggactgtatcaatgtttctccaaatgaaggcattttagatatctgaagctcaaagtcaagaagaatacgttatttacctttaaacaatgaaaactgaatgatactttattgcattatactgtaacctaatctgttgccccaaaagttggtattttaatccacaacaaaggtgactcttgacattcttaattacatagtgaaggggtttttgttttaagatcttcaatatgaaatccacatctgggttgaagttttactcttttctactagtcgcatgtgacttagaacaagctatctcagctcttggattttgtttgcttgtttttcggtaatggttattgttttgaataaagaagaaaattccatcttgtctcacagctacctatgaggaggcaagtgagatcatacacaccaagttataaacaagaaggcacctgttcaacactggttgcccagttcagtcagcatctgaggcagcagttttcattcaagagctcccacttgaatttctaaagttgtatcaagtgtattctctaagtgatgtgagttaacacaagcccactgatctaaaaattgcaagaaattagcttaaaatccccccacaaaagaaatacagggtgagcagaagttttagcaagaatatttgccatgatgtacagtacttacactgcattttcttgttgttctcactgcttttatattacggcaatggcacaagtaaatgtggggtgagctgatgaaaatttcactgccctgaaagcactattttaagcatcaaggtctaatcatccaaccttacatatttcaagaggtatataaccttytcactttgaatctggcccttggatattgccagcctggaaggtcttcagttaagacagaaaaataaacctaaaaagaaaatgtcttcttatctttttctctaaggcatgaggttttacaaactatggtctcatctcattagtggttctgataaaaaaaaatcagaatgtataagcacatgaaaaattttatttcaaacacacatacaagcacactcacacacatacacacagtgttacactgggctgtggttaaaaaatttgaaagtcggctgggcgcagtggctcacacctataatcccagcactttgggaggctgaggtgggcagattgcctgaggtcaggagtttgaggccagtctggccaacatgatgaaaccctgtctatactaaaaatacaaaaaaaaattagccaggcctggtagcatgcaccagaaatcccagctacttgggaggctgaagaaggggaattgcttgaaccagggaggtggaggttgcagtgagctgaggtcactgcaaaaaaaaggcaaaccacagaacaagctgtgatggcacttaaggctgccacatcaagaatggaaaagtaatcttcccaccaactttccaattacagatatacagtgtttacttgctataaaccacctgatattatgcagaaaccaaactaaatccataacttaaaaggtcatggttaaaactgttacaaaagccaggcgcggtggctcatgcctgtaatcctggcactttgggaggctgaggcgggtggatcacgaggtcagaagttcaagaccagcatggccaagatggtgaaagcccrtctctactaaaaacataaaaattagcctggcgtggtggcgggcacccgtaatcccagctactcgggaggctgaggcaggagaattgcttgaacccaggaggcagaggtagcagtaagctgagatcgcggcactgcactccagcctcggcgacagagcaagactccatctaaaaaacaaaaacaaacaaactgatgcaaagatgaaaagaaaggataacagtcacaaggcaaagggcataaactgtgggaacagagcacagcagagacttatatttttaaaatgtacaacattcttgaaattctccctggaagccttcttctgtttgctttaagggagctttcagtgctctgtgcaaatacgtggattcaaattccacttctgctaaattcacattaaataaactacctggcaaaaacatgtcaaaagaagtagaaaaaaagatgaataaatggaaatgttactactaatctcttcaggtaaaagcctcttaagcattgtggtatttttctataacatgtgagctcctaagactgaagaaatcatttcaatcaacacttctgttactagagcttggtgatatcatgaatcatacaggaccatgaaaactctcatctgaaaagggtgaaaaagaaaaatcagaaaattttgtatttataccagttttaattgcttaaatagttattatggttttttgtgcgttatcttaatttaaaatatgatattttcccaaaggaaaaataatttgtcataaccgaatattctgttataaaacacaaacttagaagaatcaatattaactttcaacatgatgaataagttatggaccacagatacaaccagcacacatcatatatgtataagatgtctcaagtagggttagtacaaatacatccttataaaaaattcaactagtaatctggagaatatcagttacttgtattctttatctcagctaatggcattttcaaatgcccagttaattcaatagaaacagtatgtagaaagagtttaggtagaagactgaggctgaaatacagaatctgcaatacagtgattgtgcgcatgggcaggttattacacttytctgagcctcagtcttgctgactataaaatggcaatatttatttcagaagattattgttaacatcatgtcacataacatatgcaaaggaaatcatataatcactggtacctactagaatctaaaccaatcctcaaatgaccaatctttctttgccttagttttccagcatctttctctaagttgtttcaagttttcatcatgcaatccattgactttttgactctccactccaggatatgtccacttataaattctatacatgtacyactctactattatattataaaatactcaaaaatagctttttcttcttctttttttttttttgagaccgggtctcactgtcgcccaggctggagtgcagtggtacgatcacagctcactgcagccttgtatcctccaacctcaagcatcagcctcccaagtagctggtgctacgggcacgcaccaccaccagtggctaattattttatttttgttagtaaagccaaagtctcactatgttgcccaggctggtctcgaactcctgggctcaagcaaacctcccgcctcgacttctcaaagtcctcggattacaggcgtgagccaccatgtctggccaaaaacagcacttttaataagatgacacaaagataaaatgaaaagtagttttaaatattggcttcacaatactagttaatatctcaaggcatgataaaatgtcaggtaaagttcatacataataacagtggatgtaaattcagacttcaaagaatctctgtgatacttctgattttatttgtgactgtaaaggcctcgtctccctaaataataataatcaagtaggctaagcatggtggctcatgcctataatcccaacactttgggaggctgaggtggggggatcacttgagtcaggaaattagagaccagcctgggaaacatgagaccacgtctctccaaaaacaaaaaaaaacaaaaaaaatcagccagatgcagtgccgtatgcctgtagtcctagctactgaggaggctgaggccagaggattgcttgagcccaggaaatggaggctgcagtgagctgtcatcatgccatgcactccagactggacaacagagtgaggccctgtctagaaatttagaaaaaaaaaaaagaaaatctacttgtaaacacttttagatttttaaatacatttctttttcaaatcttttttaagtttttattttatttgtatttttatttcaggaatagcacaaaagaatcaaatctttatttttgaaggagataaatccaaatgcagaagcatctttgagtgccttaaatttacattttatgatccttataaatagcagtgtctggccagacacagtagctcatgcctataatcccagcgctttgggaggtcaaggtggtggatcacttgaggccatgagttagagaccagcctggccaacatggcaagaccccatctctactaaaaatacaaaaattagccaggcgtggtggcgcacacctgtaaccccagctagttgggaggctgaggcatgagaatcgcttgaacctgggaggtggaggttgcagtgagcagagagtgtatcgatggattccagcctgggtgatagagcgagagactctgtctcaaaaaaaaaaaaaaaaaaaagcagtgtcaaacatcccaaataaacacaatttgccaaccaaattaataatctttgctggcccaactcttcctgctgtctaaatacttcaaaattattaattctaataagttgttgactcaagagatttctgaaggtatcatcactcctgttgataattttcctcctaccaatagccagttacatgaggaaaggattgataattccaatgaaaagacctggcttcttttctaactattggagaaactttagaaaaactttaggcaaatcctttaaactctatgagcctgtttcctctttggtaaaaatgaggattgtatccctacagaatgggtgaatgcttcctaaaacaaaaactccctccaaattcagttgtacccgtgaagtattgctgttaaatctagaacaatgaatgtaaagttataagccacagaatacaacctggaccctatcactaatttgtcaagtaaccttaagaaagtcaatctctctgggcctaattagtaaaagagattactggaccaaatcactagttccaataattgttatgggcgatggagcacttgaaattaacaaacgatgatctttgcataacacgtttcagtgggataaaataaaatattgatttaccagctaagttcagttctatcacacacaggggatatcttatgaatggaaaattcaaccatattatatatattagaaatttaaaaaatcagcctgggcacgttggctcaggcctgtaatctcagcactttgggaggccaaggcaggaggatcacttcagcccagttcaagagcagcctgggcaacatggcaaaatcctgtctctacaaaaaaaacacaaaagacacaaaaatgagcatggtggcgtacacttgtagtcccaattactcaggaggctgaggtgggaagatcacctgagcccagggaggtcaagactgcagtgagcaatgatcacagtactgaacttcagcctaggcaacagaatgagaccttgtctcaaataggaaaaaaaaaaagaaaaacaaagaaaaaatcacagctaccagcatacaaggctacaaaaaaaattggctgtttgaggtttccctcttaatctgtattcatttgtacctgttatttcactttgaattcaggctcgtactcccaagcagagaaatggtagaaaataatgaaaattaaaaaaaaaaagtgaaaaatcataaatgaggaaattatgttacctaattaaaagaaaacaatcctgtcattaattattaattatttaattatttaatttcagtagcagaactccacacccaagctccttagagcagagctagaagatcaaggcaccagatactctccaaggtccctttcagccctagggactctgtttctggtttccactgcaatttgcattctatttttatatgctacatactgttccaggcacaaataaccatgtaatatttttaatagtacctgataaactgatcattttagtaagagtccagtaaacatttatttacacatttacacacacccacaraaagcaatccttgtattctgagtccactgaagacatctcagaagctcaataaacactgttaacagtacatgttattccatactaatttaataaaccaaggacaaactgtcttttcttgcaaaagaccctagcaattagatattaaaattttccttgcacactgcagtgtatttgtgacatatacttgtggcatgcataagataagctagttccaaaataaacacagtggtaaatagtaaggaaaatctagtaactacagttcctcgtcttaagatcatgacatctttaggcattattatttcaagtgttacagtcctgaactaagttaatggacaaaaacaagccaaggcacacttatgytaaactataaaatgtctcacatatgtatctctgatttctagttaaaaaaaaaattataaacaatgttaaaatggaatacttaaaacttcactgtttttcttggtagaaattatgtatttgcttataagaaactttctaatgacataatgtagaaataaataaaaaactgaggatagaagccttattctgctttttaaaatctagaggttttcaaataactcaatcccttcatcaagtccactcctgctcattacagagcttagaataggatacaccagttcctgttctcgcattttcattttgtcccaaatatcatcctgtcaacacagaaacaatgcacattcaaataagcatttacagaaaaagcaaaagaagcccagctcattagctgactgaagacctttatgtttcaaatacaaaaggggagatggaagtcacagaccactcaaacaagaaaacggcaggttatttgttcctttaaaaaggactgcatctttttgtggaagaggatctactggaattatttagaaatatacagcagctctaatttttctaaacatttatcaattctttcagtatagcttttgactactttggtcaagtatttctagattaagtacattctagggcatgagggcatgacctgaactttataacattttgatcaaaacagatccaaaattaaattaatgataatatttggcagcatcaatctcattaataagattatggataaatcctcccacgagttactttgctttctgaacctatctttgagttttgagcagaataaattctcccaaagctggcaattccaacaaccaaggggtagtatccttttactacagtagtctcatgtgagccactaaatagaaattactcaggtgctawgaaaacagaaagaagtaaagaaaaatagattgactaaagggtaactgttcatccactgtccccttacaaatacatgcctagtctctgttcccctgcagccacaaattatggcaatagtcacatgggtacattctaatcacatagcaaaagtatacactattacagtgaaaaaatgggcacaaggtatctcctgaatttcaagcaattttagatagcttttagtaataactataggagagctataatatttgccaagattttattgaagttatctttaaataaacacttgacatactattttagcaaaaacatcagctagaaaaagatatcttcagctgttaatgacagtaatgcttgcagggttttacacaacagctgagaaggttggatggagactagtggtctgcaaactgaaagtgcactcgtccactgaaatgattactttttctattgttatgctactactacagcaatcacaataattccttttgctttttaagtattcacaaagaaaataacaggataacaatctagtctagaactctgtgactatctgctattatttaattcatttatagcataactttatgattcagaaggcaaatattttcatacatggaagttcttaaaatgacagaggactaagtttcctgattcaggatacagaaatcttagactagatcatgctgcctcctagaggccaaaggtacataaaaacacctctatttcacaaaaagtctttaattttaacaaaaatcacataccctcaaatttgagtcttcataaaagctgcacagaacatgtcctgcttattatcttaagggactctattttctagtttttgggtaaatacctttgtacgttaaaatactgaactgattagggaaagtctactgcaaatgatccaaccttgaggagataaaagaaatggcatagatattctgctatcacagaaatggaatataatattccaaaatctatactatatgtttaaatacaattatcctggtattttaaaataaactatctaaaaggaatatactactatacttcatgatacagccatatgtctaaaaaggctctaaatataaataaaaaattttatgtataagtataatctactgaacaaaatgcataaaggtgtttcaatagagcaaacatactgacaatgaacacacatgcaatcaactgttgctgctaaatcctcattcacaatgttattgtcaaagaaatttgtagaaaatactgagatgaataaacttcttaattcaaggaagtacaagaacaatgcaatcttcctcgtttcttcttggctgcctgctgcttcattgtgtttgtataataaaagatctggcaagttgcaagtctcaatgcattcacatgggcaattccatagcagagttaccttgggaataaacatgctctctggcacaaagaaccattctaagtaggtcaaagctcccccaaactgtatttagatcaccagatgtttcaaaaaacactttaaaattctgtcacttcacccagaaaggaagaaaaatttaaaaatcacaggatacactgtcagaacaagaacactgaggatgaaaaaaggcaacttaaaagaaaatgttctgagactctaaattgtactgcggtcaattcaagataccagcaaaatatttggtcaaaagcatgctttatgatcctattgaatttaatttttaaaagtaaaacaaaactactacaatcaaagacaaacaggaatcaaaacttacttaaaacaatcatttagtatgaaggaatcagcagctgggacctatcacattgacagtattttaaagcattagcgatttttaaaaaataaaagcttagaaaagactagtgattggccctaacctatgtgcctatgaaattaagaccaacaacaacaacaaaaagtttttaaccagtaacttggtttaaaaaattctctttgctataaaatcctcaactataggaaaatgtcttaagtgacagaagaaagaccacttctcttaaggaagagaggatgctgctcatttccactctgctttttgggcaactgagattttgcatttcaaagaacgaaaggctaatcccttaatgaaggtactagaaagagtaaaaacccttgcatgcggtacaaatgctcattccttcaagtcactcccatattactcatccagtgtgaatgttagagaaaagaacattgctctgctcctggaacacagagaacttgtctctcatgtctcgttatcagtgtgcctatttctcctcaatgctatcaggaatttaataactggctaccaggttaggaaataaacctttttttttttaatcatttcacattttatcttcagttggggctttttattaacagctaaacactcacagaaatcgagtccacaatctttccctggtggcaagagtccacttacaaagaaaaccgtggaattattcttgatgagaaggaaataaataacaccacctaaaatatttttagatgcaaatcagactcctaatataaagatagttttgatccattcattcaacaaatatttaatgaactctatacatcagttgttcagttaggtactgggtgtggattagtaaatacaacaggtgtgagccttccctcctcaatctaaagaatgagataaatgaaaatctaaaaaataaagtatgataataattatagaaaaaagtttttgaaagcctgaaacaatgagcccaagttaggcttcttctaagcaagttgggcaagttaattatctgtctgaacaccattttgcttctctgtaggatgagcacacaaaatttatcagccaaactggagttcttatccaggactaatgataaattaagagatcctaggctgggtgcagtggctcacacctgtaatcccagcactttgggatgccgaggcaggtggatcacttgaggccaggagttcgacaccagtctggccaacatggcaaaaccccatctctactaaaaatacaaaaattagtcaggcatgatggcgcatacctgtgatcccagctactcgggaggctgagacacaagaattgcttaaacccaggaggtggagtctgcagtgagccaagactgtgccactctgctccagcctgggcaacagagtgaggctctacatttaaaaaaaaaaaaaaatatayatatatatatatatatataatatatawataaaatatatatataatatagatatatatacacacacacgttttataaatctttattacataaaactatttggatgtgttaataattatcaaagctggatgatgggtaaatgggggtcatactagtctttactttgcataagtttgaaattttcyataatagaaagttcaataaaattgtgtatctagtgcattctcattttttgagacagaatctcactctgttgcccaggctggagtgcagtggcacaatcactgctcattgcaccctcgacctgctaggctcaagccatctcccacctcagcctgctgagtaactgggactagaggcatgcaccaccatgcccagctaattttttcatttcttgaagagacagagtatctgtatgttgcccaggctggtcttgaactcctgggctcactcacatgatcttcctgcttcggcctcccaaagtgctgggattacagacgtgagccactgcgccccacttattctttaccataatacactcttggctattaagagtcatagggttcaaaggacaacagtagactagaattcaaagcaaggagaatgctcaaataaaatcattcacctaccatgtgatcactgaagctttactttgtgtgtaaatctaaccaattcagccagttgtattactttgcagtgtaactgcatttacaaattgatatacctacactcagattaatcacttcttcagtagcttcctacttgtctaccaatatttaaatattgtctatcaaaaattcattcatagacaaatgaatgcattaacttgcttttggaggaacagttatctgcccactgatggctgcaacactgaccactagattcattacgattgagagatgatatctgaattctgtctggtacttactggcaatgagaattccacaaaaatttctatgtaccacaggcaaagacataaatttttttcctatacaactgtttcccaaatcactgaaaaataatagtgaaacaggatggcttccagaagagttacttcagtagaatagacttaacaaaaggaaatgtaaagaagaaaaagaactttaaagtcagcatgctttttaatcagtcagaaccttgggagtcattaaacaattgttcacagagtgtccacatttacgtagcttcctataaattagggtaagcgcatagaataaaaaacattcaggaagttctattgtccaacaaagtgacttgtttttgaagaaggatctccacgggaacatagctcgggcaggtaggaaactctgttattgttatctttagaatatcagcatgatcttaagtagtaacttacytttttttttttttttttttttttttttttgagatggagtttcgcttttgttgcccaggctggagtgcaatggagtgatctcagcactgccactatacccggctaattttttgtgtttttagtagagacggggtttcgccatgttggccaggctggtcttgaactcctgacctcgggtgatccacccgcctcggccttccaaatccctcctgggattacaggtgtgagccatcgagcccggccttaagtagtaactttcaaacctcatgcatttttcaaagaaaaaaaagacctttctaaggaataacaaacacaaaagaaactaaatcactaatggtgatctctttgatataattttaaaatcagagaatcataaattttgtgatagtctagttctattgggcactctgatatgattacagactccatgcaatccataatcatgaggatcacaggcagacacatgggacttttaagcagggtctaacatctttgcattttatgttgttgtagaaacatatggctttactacttataccttaaaaagtactacatataacatttatgtaacatatcacgagctgtctaataataatgtgcataaccattgatatgagaatcaatacccacaggtaaatatattcatcactatagtagttaaggacaaaacaaacaaaaagaaaattaattagatagaaggactgaccaaaaaaatgcaatttaaggttaaaggagataggcaagacctcaataagaacttttgctctttgcaaagcttcacccaaattataagcgaagtctagtccttgtagatgtgtcacacttaaaaagagaaccaagtgcaagccaagtgaggagggtgtgtccatgtggcagtcactgcagcacaggatgtcaggcagggcccaagtgtataggacatctgcacagagggagggagcagcagcaatgggagactggttacacagagcaggattgactaagtaagtaagttagggataaaggaaccaggtttctcattttcaggaaaagaagttacaaatggggcaagggagaaaactggaatgaatcctgtggtaagatcagaagtggatatgtcagtatgaacaattcatgacttttagagagagagacaacatgtaaatgtgtacgtgtgtatgaatatattccctacctttgttcaccaagaaagcctgaaaggagaaacaacctttgatcatacttagcagacagatcttggtttgtatacacccttttccactaagaaaccagggctcttggagaaatcgctgatkctagtamcagggtagggaagaacaagatgagcctagaacatcttgtgtcagctagacatgctcaaagaattataagaacttgtcaaaagagaacagaagccagcttgaaagggaagtaaaagattataatttattaggaaatggtgactacacactgatataaatgaataaacttaaagtgtgataaaaaaaataggtggcctggcatggtggctcatacctgtaatcccagcactttggaaggctaaggcaggaggatctcctaaatccgagagttcaagaccagcctgggcaacatggcaagacactgtctccacaaaaatttaaaaaataaaaataggccaggtgcagtggctcatgcctgtaatcccagcagtttgggaggctgaggcaggcagatcacgaggtcaggagatcgagaccagcctggccaatatggtgaaaccccgtcactactaaaaatacaaaaattagccaggcatggtagcacgtgcctgtaatcccagctacttgggaggctgaggcaaaagaatcgcttgaaccagggagacggaggttgcagtgagctgagatcgcaccattgcactccagcctgggtgacggagcaagactccatctcaaaaaaataaaataaataaaataaaaaaaaataaataaaaataaattagctgggcatagtggtacatgcctgtggaaccagctacttgggagactaaagtgagaagatcccttgagcccgggaggtcaaggcaggaagtaaggtgtgattgcaccactgcactttaggctgggcaacagagccagaccctgtctcaaaagaaaagaaaagaaatgaaacagttacatagtcttaaagttacttccccacaaaatattacaaagaagaaaagaaatttcacactggagaagccaggcagacaccaccttaatcaagtgatcaaagtaacagcatcaataatgggacaarcagaaatcataagtcacctgataagatgcaattagaacacagcatcagttctatgacagtcccatcaaagatgtctaacctgaattcaatcacaaggaaacctcagataaacccaagtttaaggacattctacaaaacatttggcctttcacctctgggtcataaaagtcaaggaaagactaaggatctgtcccaggctataggaacctaaatagacaggatactaaaagcaatgggtaatcctgaaattgatccttttgccatgaagggcattattggtgcaactggtgaaactttaaatgggatctgggaattacatggtaataatggatcaatgttaacttcctggttttgatagctatattacagctatgtaggtgcatgtccttgtttgttaagacaaaaaaacaaaggcactaaatatacagaaatgatggggcagtgggtaacttactatyaaatcaattaggaaaaaaaaatttctgtatatttgagatagtttttgaaattaaaaaataatatataggaaccacatctcgtgtaattacctgactttgatatctcagtttctcagtctataaatgttaatactgtctatctctccaagagcattatgaagatgattaagttacataaaaatacaacatttagttcacttagtggaacgaaggttttatttattatttaatgtattcatgttctaaccacactttggaaacagtctaatctgtctcaggagctgtctcatggtttctggttttccccagttttaccttgcactccctcccacacatcctctcctatactgcagcctacaggaagtgatgaggctgctcctgtgttaccggactgcttcccttctatcttctttccttccccctgctaaacacacattcctacctcaagtccaagctcaatcacccctttttcttttttttttttttgcgatggagtttcattatttgttgcccaggctggagtgccgtggcgcgatctcagctcactgcaacctctgcttcctgggttcaagcaattctcctgccttagcctcccaagtagctgggattacaggcatgtgccaccgcacctggctaattttgtatttttagtagacacagggtttcaccatgttggtcaggctgctctcgaactcctgacctcaggtgatccacycgcctcagcctcccaaagtgctaggattacaggggtgagctacccgcgcccagccaagcacccctttttctatgagtccatatgactctgctccatttgctcagacaaaaatgatggctcccttcccttctttgtactcccactgtactttctacatctatccatcctaatacctctaacaccatattgcactgtgatctgcttccagtcattttccctctaagatcatggcttacttgctggcatgaactcaagctcatcttatgaatcaatcaaagtgaatgaatgagcaagtgagggcatccaagaggccatggttaacatctgcagcatctgaagacttggggacagatcagacattcaaatctattcttgctgaacagttcgtcttgtaccaatgttctttccttctgtaatgggtaaaggttttagggtttgttccttccccaacacagacacaaaaacaaacagtgaaaatatacaccttctgcctctaataatgaccacagaaaaaataggtgtacttctctcttacatatatttcaaccaacaaatatttgagtgcctgctatgtgtgaagcactgtagtagatgctaaggactcaagtgaacaaatcagacacggtgtactgaagggagggacagcatttttgtttgtatgtttcaaaccttgccctatcacgtatttaaccaagttacacttctctaatttaggcaaataacaaagcaagtcattcagcataagtgatctgacctgtgtcactgagcgaatttggatggctcaggactagaatgctaaacctttcagttgtacatttaattctgagttgtatcaggttatctcatatattacaaatgggccatctcatttaatacaacatgatactgtaaatattataactgtgtcaccttaagtcgggaatctaatgtttaaaaagaatgacagtaaattttaactctggaaaggttaaaggttaaaagaataagtttagtagcctctatttgagtcaaccaaccacaccccataaactactcactgagaaatgtaaaaatggttctaaaacatgaaagtccagtgaaggaataacaaaatttaagggaycaaagatttaaatttgtccaatcctaagccaatatcctttttaaggtaaggggtacaagcaagggttttattttcagccyaatgactccccagataaaatgggtgactacctataaaatagtggcagctccactacacagaaaaattttctcaaaggagtcatcggtctggatgagctaggagacatgccttaaagaagctttctcacagctttgtattttcatagtttcctttaacctatatgatttattttggggggttttgtgtgtatatagggactcaaacaaaataaagggacagctttgccttatccttttgttacctggaacatttccacagcccaaggctgctaacacactgaactgtctgctgctcacaataactggactgtgcttccggctctgggcaggatgcatgcccctcattgcaccactgctaaatcctacctgtgctccaggaaccagatcaacatcacttcctgtacgcgctgttcctcagtgtccccactgcaggtctttggtatctctacgcgctctaggcattatcacttttaagcttgtagaacaaggtattgtgtcctgtttctcctcagaatcacgcgcatgctgttgatagggctcaggacatgctactccaaaatatggcacgctggcacttgaggaaacagcaaaagcaggaagtttgtttcctgtttccatgcctcttcttccctgaagcagaccataaaacctaactgacctttccctgatgtaggtcttaacagcctcatttcaggaactgttcctatacccggaggaaaggaatgtctttatctctgtagacacagggacacagaaaagaatctgaacaaacaggccttgctaagtacccctcgaccgtgtgtactgccattagacataacccccgtattcatcatactgaagcctccgcctcttagttactgttacattgggcttcaggtttcaacatataaatgttgagggggtgagggtgggggctgggcgacacaaacactcagaccctagcagtgcaccagccatgaaccttgtaatgagtggggttaaaaaaaagacattactttttctaccctaccttgtctaggccattcgaactagcccacaggcatgtttcccttggtccacaaaacaaagtaacattttatttttattttttgagacaaggtctcaccgcagttgcccaggctggagtgcagtcgcctgatctctggctcactacagccctgaccttctagggtcaggtgattctcccacctcagtctcctgagtagctgggactacacaccgggctaactttttgtatttttagtagagacggggtttctccagttgccaaggctggtctcgaagtcctggacttaaacaatctgcccaccttggcctcacaaagtgctgggattacaggtgtgagtcacagcacccagtccaaagtaacatttttaaattagctacaaatgaaggaattttaaataaaattccagtctttggacttttcttgcaaatttgttccataggtagaaggtccttacagttattttgaatctgtgtttaacaaagaaattttaggcccttggaaatagtgtgtatcttattcataacttgcagtatagcccaactcccagtcttgaattatgcttcattccacaaaatgactgcttatatgaccatttgaaatgtgtaaattcaatttcaaaatagccaatgcacagaggcccattgatgaaatgcaataaatatgttttccaactgccattttcagcattcacagaaacaacagattttattcaataatcctatcatgagatgtgttcttcagtcctcacccaaataaaaagccattgtcttacagacaatccccaatttgcaacctaatcattcctaagcaatggtccacgagtaaatcaaagtcaaatttcctaaaaacctattttataccacagaaatggcaaaataagatgaagagaggaaaatctcaatgaggactttttacaaatattaaacatataaaaatttattttaaaacagtcacattatgaatattgtattcctttcaaaggatttctttcttgtaaggactagccagactgagatttccctaaatactttactaggcacctacttctttctctagcaaatcttatgaaggcaagagtgggctgttctgtctctttaaggacctttgaactaccttcacacttcatttgtctcacattctttcacggttaattcatcacttttggcacacacccaaaagtctccatctggtaaatgttacaggaaggtacatatctgcatggaacttactcatcaatgacccttgctattctatctcgattttgctaaatgttggtaaatgatattctaataagtcaaacatatctattaataatatcaatcaccatttcaaatatattcattacacaatttggtagaaagcatttacattattacaaatttggaacggcgtgtctacttaaaggttggcaaatctttctgctgaattctgaagaaatacccacccatcctttatcttcacctcaggtctcaccttgccacaattaagcactttttgaaaggagaaaattcttgtcaaaaatcattgcttaggccatgcgcagtggctcacacctataatctcagcactttaggaagccggggcgggtgggtcacctgaggtcaggagttcgagactagcctggccaacatggtgaaacaccgtctctactaaaaatacaaaaattagctgggtgtggtgatgggcgcctgtaatcccagttactcgggaggctgaggcaggagaatcacttgaacccgggagacggagattgtggtgagccgagattgcaccactgcactccagcctgagcaacaagagcaaaaatccatctcaaaaacaaaaaacaaaacaaaaaaaaattgcttaattcagagttccatggaactgcattaaaacaagtcaaagttttctatcttgaaaatcagcctgttggctgggtgcagtgggtcacgcctgtaaccccagcactttgggaagccaaggtgggagatcacttgaacccaggagttcaagactagcctgggcaacatagtaagaccctgtctctataaaaaattttaaaatgtgccaggtgtggtggctcatgcctgtagttccagcttcttgggaggctgaggtggagcattgcgtgagcctgggaggtcgagactgcagtgagccatgatggcaccactgtactccagcttgggcaacagagtgagaccctgtctcaaaaaaaaaaaaaaaraaaagaaaacaaagtcagcctgtccactttacatgggtgaattgtataatatgtgaactacatctccatagaattgtttttcaaaataagtaaatctgtcgattttttaaaaatcacaacttattgcttgagtttggttttaggctctttgaaataaatatttttccttcttcaaaattgtcataataaaatacaaaacactgaacttgaaggctgcaccattcactttcattctggctttttttttttaaagagaaagacaacctgggcaacatagtgatatcccatctctataaaayatacaaaaaaattagggcttctccatgtttcgccaccactaggtgtggcgctgcattcctgtagtcccagatactccagaggatcacctgagcctgggagttcgaggctacagtgagctgtgatcgcaccactgcactccagcctgggtgacagagtaagaccctgcctcaaaaaaaaaaaaaaaaaaaaaacctaaaacacaagatctcagccaggcatggtagtggcatgcctgtagtcccagctgctcaggaggctgacgcaggaggactgcttgagcccaggaggtcaaggctacagtgagctatgattgcaccactgcactctagcccaggtgacagaatgagatcccatctctaaaaacaacaataaaccaaaaaaaccaggggtcttgttctgttgcccaggctagactcaaactcctgggctgaagtaatcttctcaagtagctggaactacaggcctagccaatttttctattcttgatgtcagattgtcagacataactcctgttactgkgcctatgtctaaaagcaccctactatggacttatatcaaactaaaaagcttctgcacagccaaggaaacaataagagcaaagagacaacctatggaatgggggaaatatctgctaaccatacatctggtaagaggttaaatccaaaatgcataaagaattcaactctaatagcaagaaaacaaccaaattaaaacatgggcaaaatacctgaatagacatctgtcaagacaacaaatggccaacagatatatgaaaaatgctcaacatcattaatcagagaaacacaaattaagaccacaatgagctatcatctcacacctgttagaatggctactataaaagatggaagcctggacacagtggctcatgcctgtaatcccaacactttggaaggcctaggcaggtggatcacctgggctcaggagttcgagaccagcatgggcaacatggtgaaactctgtccctacaaaaaatacaaaaaattagctgggtgtggtggtrtgcctgtaatcccagctactcgggaggctgagacaggagaattgcttgaacccgggaggcagaggttgcagtgagatcgcaccactgcgccccagccttggagacagagtgaaactccatctccaaaaaaaaaaaaaaaaaaaaggatgaaagatgggagaggcagagcaagatggcagaatagaaagctccatctatcaccccaccccaccacaaggacaccaagttaacaacaatctacacagaaaaaaacaccttcataagaaccaaaagtcaggtaagcactcacagtacctggttttaacttcatatcacagtgaaacatgcactgaagagacagaaaaaacagtcctggccgggcgcagtggctcacatctgtaatcccagcactttggggggctgaggtgggtggatcacaaggtcaggagatcaagaccatcatggctaacacggtgaaaccccgtctctactaaaaatacaaaaaattagccaggtgtggtggcacatgcctgttgtcccagctacttgggaggctgaggcaggagaatcacttgaacccaggaggcggaggttgcagtgagccgagattgcaccactgcactccagcctgggtgacacagygagactccgtctccaaaaaaaaaaccaaaaaaaaaaaaaacacaacaacactcctgaattgccagcaccacccttcccccaccctgagagcagcagcatggcgtgaagagcatctctggacactggaggagaagacaacaattttgaggcattgaactcagtgctgtcctgttagagcagaaaagaaaaccagaccaaactcagcagacccctgcccacagagggagcgtttaaaccagccctagccagaggggaatcgccaatcccagtgcccacaaacctagggccaaagtgcttttggtctctaagtaaacttgaaaggcagtctaggtcacaaggactgcaacttctaggtgagtcctagggctgaactaggcccagagacagtggactagggggacaagcaacatactaagatacaaactagtgcagccaagggagtgctggcattacccctcccctaattccaggttgcgcagcttgcagctccaaaagagacacctttcttctgcttgaggaggaaaaagcggggaggacgttatcttgcattttggacaccagcttagccatagcaggaaagggcaccgtagtcagagtcaccagtccagagtcaagaggcccctgttccaggccctagttcccagattacacttctagacacatcctgggtcacaagggaacccgctgccttgaaggaaaggacccagtcctggcagcattcatcaccagcaaagtgaagagactttagacgctgaataaccagcagagatacccaggtactacactgagggctttgggtagccactgagacttgctgacttcaggcaaggctcagcacattaccagatgtgacagctacagggcaaaactgctgcttgagaaaagcagagggaaaagtaaaggggacttcatcttgcaccttaggtaccaacactgccacaggagggtagagcatcaagcgagctcttggggtccctggttccagaccctgactcttggatggcatttctggacctgcccaggccagaggggagcccacttccctgaagggtgagtcccaggccaggcagcattcaccacaggctgacttaagagaccttgggccttaaaggaacatcagtagtagtctggcagtactctttgtggcaaggggtggcagtggctatgggatgaggctcttctgcctttggaaaagggagggaagagtaggaaggactgcatctggtggtttgagtgccagctcagctgcaatacactagattaccaggtagacttctaaggtttttgattctagttcctgacttctggctgtgggggaccttgccgccctgaagggaatggcacaggcctggctggtttagccacttgccaactgcagagacccagggccttgagcgaacataggcagcagccaggaagtagttatagcaaaccttgggcaagatccagtgctctcctggcttcaagtctgacgccgtgtagtcatagtggtagtggccacaggggttcagttatagtggtggtcacaggggtcactctacccccagctttatgtggctcagaacagagacagggactctgtatgtttgggagaaagtaagggaagacaacaggagtctctgcccggtgatccagataattttgccgaatcttgtccaagatcgtcaaggtggcattatacctctatgagtctgcaagaaccacagcattactgagcttggggtgccccctaaagcagaaacagcttagatcacaacagccacatcctttcaaatacctgaaaagccttcccaagaaggatgggcacaaacaagcccagacaaggaagactacaataaatacctaactcttcaatgcccagatactgaagaacatctacgagcatcagcggcatccagggaaacatgacctcaccaaatgaactaaataaagctccagggaccaatcctggaaaaacagaratatgtgacctttcagacagtgaattcacaatagccgtgttgaggaaactcaaagaaattcaaaataacatagagaaggaattgataattctatctgataaatttaacggagattgaaataattaaaaagaatcatgcagaagttctggrgctaaaaaatgtaattggcatcagggtcttttattagcaaaatagattaagcagaagaattagtgagcctgaagatargctatttgaaaacacacacaagagactaaagaaaaaaaaaatgaagcacacctacaggatctagaaactagcctcaaaagggcaaatctaaaagttattggccttaaagaggaggcagagagagcgataggagcagaaagtttattcagtgggataataacaaagaatgtctcaaacatggagaaagatatcaatatccaagtaaaaggttacagaacaccaagcagatttaacccaaagaagactacctcaaggcatgtaataaactcccaagggtcaaggacaaagagaaaaaggaaatcttgtacattgctgctagtaatgtaaattagtatagccattatgggaaacagtatgaaggttcttcaaaaaattataaatagaatggccatataatccagcaatctcactactgggtaactgggtatgtatccaaaggaaatgaaatcagtatgtcagagttatctgcatccccatgttcactgcagcactattcacaatagccaagatatggaatcaacctaagtgttcagcaacagctgaatagaaaatgtggcatagatacacaagggaatactattcggcctttaaaaataaagaaattatgtcatttgtaacaagatggatgaatctggacagcattatgttataagccagacacaaaatgacaaatactgcatgatctcaactatatgtggaatctrtaaaagttaaactcatagaagttsagagtagaatagtagttaccaggcactgggagttgggggtgcagttttggggaaatgtttggtcaaaggatacaaaatttcagttggataggaagaataagttcaatagatctattgtacaacatgatatctataataattattagtaaattataagtgaggtaatacatatgttaattagctcgatcaaaaaatgaagacactggtcaaatcgatcgaatcattccacaacgtattcatattttaaaacatgttgtagggccgggcgyagtggctcacgcctgtaatcccagcactttgggaggccaaggcaggcggatcacgaggtcaggagatcgagaccatcctggctaacatggtgaaaccccgtctctactaaaaaaaacacagaaaattagctgggcgtggtggcgggctcctatagtcccagctcctcaggaggctgaggcaggatattggcgtgaacccgggaggyggaggttgcagttgagatcgcgccactgcactccagcctgggtgacagagcgagactccatctcaaaaaaaaaamcacacacaaacaaacaaacaaaaaacatgttttaggtgactagtatataaaatttgacaattaaaaaaacaactaaaagcatcctcctgtgtccacttacttacagatacattcacatacctctcctaatttcaactgctcaaggcagttgaaacctaaaagcaagcttattgaagaatctgctaagagaaggctaacattttgaataaagtacagtaagtacagagttttcaactttatcttaacggyagatatttttacctttgtcatcttcagctgatgtcttaggagttaactgttatcccaagtccgctctatggaagtgcagtattgttagatgctatacctctccaaaccatttcaataaggcaagtgagaagtcagtattttctaagatgggaagaaatggttcaagaaccattcctggccagacgcggtggctcacgcctataatcccagcactttgggaggcccaggcagatggatcacttgaagtcaagagtttgagaccagactggccaacacagcgaaacccagtctctactaaaactatagaaattacccggacatgatggcgtatgcctgtagccccagctactcaggaggctgaggcagaagaatcgcttgaacccgagagtagagcctgcagtgagctgagattgcgccactgcactccagcctgggtgacagagcaagactctgtctcaaagaaaagatccattcctgcatagtcctacctacaacacaggagaccaataacaatgtaaaaaaataattttcccagtggccaagaatgttatcagtggtatatacaatgtatcagtggtattgtgtggtatgcagggtaagatgaaatagtattcaacatcaatagcaggattatgtctagaaaaaattttrcttttactaaaaatgaaaagacactggtcaaatgcaaaccatccaaagagtaacagggaattcatattacatgttaatataacattactttctaagactttaggaacaaataaaaacatctgcttatgtgaaatctgctggttttactcaatgaataccacggatatccgtgtagtgaagctctggtagttgctacatgagctttatcaaacatctttaaaaaggcctgggccaggctgcccagtaacacatctgggtgcggttggacacctcgcctcgctcatcgtatagggagcataaagagcctccgtgctcagccacgtgtagctgacatggatttcctgagcagagggcttttctttcttttatgggtgtcccagcttcttcaagaccttcactactctgcctcaatgaacagtcatttctgttttgaggtgtaaccttttgttttcataccttcagcttgaagtcatcctatgttttgtaatcagccgtctggccaaacgtctgacccgaaagagaatgtatttacattcctgctgcattgttcagcagccccttcatgttctgtgtgatttgttttctttttccctttttttttttttttgacatggagtcccactctgtcacccagactggggtgcagtggtgcaatctcggctcactgcaaacttcacctcccaggttcaagcaattctcctgccttagcctcccacatagctgggactacaggcrcccgccaccatgcctggctaattttagtagagacagggtttcaccatgttggccaggctggtctcgaactcctgatctcaagctatccacctgccttggcctcccaaattgctgggattacaggcatgagccaccatgcctggcccccattttttgttttttatatgcagggaagtaatggtactggtagtgtaggttcwctgtgtggttcaaacatgaatttccaacacaccaagctgctaatgagatagcagctttttttctgggacctagtgtcataaccaaattgatttaagaccagacccaagacacctttaacgataggattaaagggaaaagggatagggaaaaagcttattaagaaatttatcaacagtaaaagtaaagcgggagaagcacaaccaggcgtaacaccaaactggttcaagggagaaacaaggctttggcattctgctggctccagtgcttcctctgaaacctgaggcttgccaatgtgtggacactgtgyagtcttttattgcagccattcaatgcccacatgttttgccttcttgtttcagaaaagcacaaagtcacaacaaagtattttctttccttccaaagccttttgtctccttgtgccactttttatccttaggaaaagatacaggtgttcctgaaaagaaccataaatggaacaggggaggctggtcctgttgctgttgctgattaagttttaaacttttatttattatttatgtgtgctgtattttaaataaacattctctctccttccacttccagtcatagtgtgcctgtagcattccagtccaaccacataatttatttattctaataggagggctacactgtacatcacggtgtccagtgacaacttgttccagacatttacagaaggaaaatatcctaggtaaatgaaatcgtcattctgtgtcctcccccgacagcagatatgtccttccgttgagtgaggataaccttatgtccaccaaggrtactttgagaaagtccctaaggagcaagcttctgtcccactgtttcagagtatttattctttgaacacgaaagtattggttagttatgttctcagctctccttgctgttgcatttgggcactcactcactgcaagtaacttagatctttttatttgaatgaattttaaagcagtaagtagaattacaaaggaatatgaaaaccatggactagatggaccattttatgtaatcagaaagcggggccacccatcactgccagaaataccatgtaaaaattggcaattcagaggttgcagtayttagtacaataaataaataaatgatcaacattgtgtaatcactaacaaaaagtgtcataatgcaccaaaaaaatcaacaaaattatattcgctaatgagtatcaataaaataagttygaatgatggaaaccmcaaaaaaaaggccaattccaacttagtcatttaaaacacacacacacacacacacacacacacacttttttaattgtagctagmatttattgagtactgaatatgtaaatatatcattttatgagcattactctatttaatccttcataacttctgaaatgagacctttgattatcctgattttataaataaacagcctgagagaaactgactcacccaaatctgtgaattagcagaggcagcatttgaacccaggcctgtctaactcctgagctagatctctcaactagtttcatttcactttaaagaaatgaagtggccaggcacggtggctcacacctgtaatcaatcccagcactttgggaggccraggtgggcggatcacctgaagtcgggagttcgagaccagcctgacaaacatggagaaactccatctctattaaaaatacaaaattagccaggcgtggtggcgcatgcctgtaatcccagctactcgggaggctgagacaggagaatcacttgaacccgggaggcagaggtwgcggtgagccaagactgtgccactgcactccagcctgggcaaaaaaaagaaagaaaagaaaagaaaaaaaaaagaaaagaaggaaagaaaagaaatgaagcgaagstgctcctctcagaaaagaaatttgtatcattcaccactatatttgatttttttcatcttattcaatcctctgactcatatatagcacactgacaaaatctggtcaaaacatcatatggtgcctcaacacattgtgtagatttttgcatcagaataaatgtgtaccttgttaacaagttaaccatgttctaaatgtcaatatctacaaaagtttaaagcacattcccatttttctagcataaagcaatgagaaggcaattaagttaatgacattcatgaagaaatcacagagctactggaakcacaaaagtcataatttacatgaaggaaataaccttcctgaggaatacagtgtaattaaggctttcctctttgaaaaggcctaayatttctaaggagctaagaaatgaatttagcctacaaattcaaacttatttttcgtgtgtacaaaatttatccaacttgaagggagaaagaaactattttcaatattctagctgtaaaaaactgtatttaaaactattactgctcacctgagtcttcgttctccaatcacaggataatcaacttttctatgaattagaagcatctaatgcaaactcacacagaacaaattaccagtaagtctctcctccattttataagcagcgacaaagttttagaacatcataaaagagctaggaacagacagggtctgtgaggaacttagaaaatcaaggggaaggcccagcttgttgtgcaattcaggtttaaatatattatcaggccgggcacagtggttcatgcctgtaatcccagcactttgggaggctgaggcgggcggatcacgaggtcaggagatcaagaccatcctggctawcatggtgaaaccccatctctactaaaaatacaaaaattagctgggcgtggtggtgcatgcctgtagtcctagctactcsggaggctgaggcagaagaatcgcttgaacccagaaggcggaggtcgcagtgagccaagatcacgccactgcactccagcctggcgacagagcaagactccgtctcaaaaaawaataataataaataaataaataaataagtaaatatattatcaggtagtcaatccctttgctttacagaaggatgtttcattgcatcccatgatacaaaattttaaagatgtaactttgtctcaaagcaacaattaacrgtgatatggctaacttcaatagctagaattagaggatgcttcgttacataaaacatgtacttttgaaagctacattaaaaaaatgcacttttaggccaggtgcggtggctcatgcttataatcccagcactttgggaggccgaggtgggcggatcacctgaggtcaggagttcaagaccagcctggccaacatggtgaaaccccgtctctacaaaaatacaaaaatgatggcaggtgcctgtaatcccagctactcgggaggctgaggcaggagaatcgcttgaacctgggaggcagaggttgcagtgagccgaaactgagccactgaactccagcctgggtgaaagagcaagactccgactcaaaaagaaaaaaaaagaaaaatgtatttttaaagtgaatcagctgacaaggaaatttatgttaaagtatcttattccaggctgggcatggtggctcaatcccagcactttaggaagccgaggcaggtgagtaacttgaggccaggagttcgattccagcttggccaacatggggaaacccaatctctactaaaaatacaaaaattagcgaggtgtggtggtgcacacctgtagtcycagctttttcggaggctgaggcatgagaattgcttgaaccagggaggtggaggttgcagtgaggtaagattgtgccactgtactccagcctgggcgacagagtgagaccttgtctcaaaataaaaaaaaaaaaatcttattccagaaaaatatggaaaccaggcaaagaaaatattaaaggggcaagaaggtgataaagtttctatgtaaactaggtttttatatattgagctggcattaaaatatgtattttgaaaattagcactcaacaggatttcagtcactcactcattcaattaatttaacaaataatatgagccaggaactcttctaggtgttggagagacagcaaagaacaagacaggtatagtcactgctcttacaatgttaacatgaaggttcacgttcatgttaaagggattcaccaaatgactaaaaaagtgatgaagaacccttctctgtatataatgctctcaactttataaaatgaagggccaacccctattactaccttttttttttttttgagatggagtcttgctctgtcacccaggctggagtgcagtggcgcgatcttggctcactgcaacctccgcctcctgggttcaatctcagcctcctgagtagctgggattacaggagtgtgccatcatgcccagctaacttttgtattttcagtagaaatggggtttcaccatgttggccaggctggtctcgaaatcctgacctcaagtgatccacccgcctcggcgtcccaaaatgctaggattggtcgggcgcggtggctcacgcctgtaatcccagccctttgggaggccgaggcaggcggatcacgaggtcaggagatcaagaccatcctggctaacatggtgaaaccccatctttactaaaaaatacaaaaaattagctgggcatggtggtgggcgcctgtagtcccagctgctggggagactgaggcaggagaatggtgtgaacccaggaggcagagcttgcagtgagccaagatcaggccactacactccagcctgggcaacagagcgagactctgtctaaaaaaaaaaaaaaaatgctaggattacaggcatgagccactgtgcccaaccagggctcccaattttaaataaggtgcccagagacggccagaagatccgtttaagtaaaggctcaaaggagatgagctcaatactttttaaaacttaaaaggtttcaaatatctgaaacttcatattagtcacacctttcaggtttaccataaaattctatttgtgtaattgtatcaattaactcatgagcaaggagaaaatattagaagaaaaaaaggggaattattttctttttttttttttaagacagaatcttgctctgtcacgcaggctggagtgcagtggcacaatcttggctcactgcaacctccacctcccaggctcaagtgatctacccgcctcagcctcccaagtgccaggattacaggtgtgagccactgcgcccggcccagaaattattttcttaatgtatttgttggggacaggttgaggggagattagataaagaaaaacatgcagacataaactattaaacttttccaaaagtccacacaaagcctatcktctaaatatgccactacagcatttgcacgaactgagtgtaagcaactagctttgagactcaaaacaaggagtgagaataaaaaacccttttccaaacgaaaaaaagtataaattacactgggactcaggacctatgccagaaatggacaattgacaaaagatctgaaaaagtggatatcctgaaataagggcttttgcatgtatcagtgatacacgcaattgccgccaatataattttcccggaagtttacagaaaggggctataatcaagaggcagagaagcacctaacacatctgctgccagctaatcagagaggattcatgacattatatgatgacagctgctctctacaagtgggagttatatgatttttaattttctattccttttttcgacctctccaatgctcattttgtggctacagagaatctcccaggttaacgaaaacataccagttgttcattcagttccaaaacctggaaatggacattagctctcaatgaaaatcagcttagattgggcaccaaactgacttcagaacaatgactaccatcattggcagtttcctccttgcttcctccagaacccttctcctccttcccttcttttcaatgttttcataggcaatggcctgagtttaccattttctataaaaggactacagaggggctctaattagcaccctagtcagttcccagtcttgaagctagttcttctactttggacagtatctctgggtgtgaatactctcactcaattttttattatactaagatgttaaaagagtggggaaaggcttacctaattctcttagaaaaattctcttagaaaaacatataccagtaagatcatgatattgatatattaatattacttttacacacacgcaattatatatatccatccattacagtttttttaaatagagtaaargaggaatgaagttttacctgtttttgcagaacatataaaattcataagattcttgaaaataaagattattcatataacttcaaaatttagtaggtaactgtcaccctgctaatgatatacgatataatctagtcaaacaagttcctagaaagcaatagaggatttgagttaatcaagtattaccaaaagtacggttgcccagcaaagatcaggaaactatttcttgtttctacctccagaatctcttctttccttttttttttcttttttgagacagagtctcactttatcaccaaggctggagcacagtggyrcaatctcagctcactgcaacctgcccctcccaggttcaagcaattctcctgcctcagtctcccaagtagctggaattacagatgcctgctaccacacccggctaatttttgtatttttagtagaaacgggatttcaccatgttggccaggctagtcccaaactcctgacctcaggtgatctgcctgcctcagcctcccaaagtgctgggattacaggcatragccagcgcgcccagcccagaatcttttctaataatgtttctgtttctccttgaaaatgtccttttttttttttggcctcattaactacagtaaacctgataggaatttggcaggactygtttcaacaagatgcaggtcacaaagaccttgctgataaaacatggtaagaagcaggccaaaacccaccaaaaccaagatggcaacaaaagagacctctggttgtcctcactgctaattatagctaattataattatgtatgctaattagcatgctaaaagacactcccagcagccagactgcctctctagatttctcctatctgkacaaagcatctctgaaagaaaggcagcagccccagtcaggggtttaaactcccatctccctgggacagagcacctgggggaaagggcagctgtgggcaaagcttcagcaaacttaaaagttcctgcctgccagctctgaagagagcagcagatctcccagcaaagcgcttgagccctgctaagggacagactgcctcctcaaatgggtcccttacccccgtgcctcctgattgggagatacctcccagcaggggtcaacagacaccttgtacaggagagctctgtctggcatgtggagggtgcccctctgggacgaagcttccagaggaaggaagagggagcaatctttgctgttctgmagcctccactggtgatacccaggcaaacagggtctggaatggacctccagcaaactccagcagacctgcagcagaggaccctgactgttagaaggaaaactaacaaacagaaatgaatagcatcaacatcaacaaaaaagatgttcacatagaaaccccatccgaaggtcaccaacatcaaagaccaaaggtagataaattcatgaagatgaggaaaaaccagagcaaaaagactgaaaattccaaaaaccagaacacctcttctctgaaggatcacaactcctcaccagcaagggaataaaactggatggaaaataagtgtgatgaattgacagaagtaggcttcagaaggtgggtgataaaaaactcctctgagctaaaggaacatgttctaacccaawgcaaggaagctaagaaccttgaaaaaaggttagaggaattgctaactagaataactagtttagagaagaacataaatgacctgatggaggtgaaaaayacagcatgagaacttygtgaagcataacaagtatccatagctgaatcaatcacacggaagaaaggacatcagagattgaagacaacttaatgaaataaagcacaagacaagattaaagaaatatgggactattaaaaagaccaaagctacgtttgattgatgtacctgaaagtgatggggagaactgaaccaagttgaaaaacactcttcaggatattatccaggagaacttccccaacctagcaaggcaggccaacattcaaattcaggaaacacagagaacaccataaagatactcctcgagaagagcgaccccaagacacataattatcagattctccaaggttgaactgagggaaaaaatgttaagggcagacagaaagaaaggttgggttacccacaaaggaaagcccatcagactaatagcagatctctctgcagaaaccctacaagccagaagaagagtggggaccaacattcaacattcttaaagtaaagaattttcaactcagaatttcatatccagccaaactaagcttcataagcaaaggagaaataaaatcctttacagacaagcaaatgctgagagattttgtcaccaccaggcctgccttacaagagctcctgaaggaagcactaaatctggaaagcaacaactggtaccagccactgcaaaaacataccaaattgtaaagaccattgatactatgaagaaactgcatcaactaatgggcaaaataaccagccagcatcataatgacaggatcaaattcacacataacaatactaaccttaaatgtaaacaggctaaatgccccaattaaaagacacagactggcaaattagataaagagtcaagacccattggtgtgctgtattcaggagatccatctcacatgcaaagacacgcataggctcaaaataaagggatgcaggaatatttatcaaggaaatggaaagcaaaaaaaagcaggagttgcaatcctagtctctgataaaacagactttaaaccaacaaagatcaagagagacaaagaaggccattacataatggtaaagggatcaattcaacaagaagagctaactatcttaaatatatatgcacccaatacaggagcacccagattcataaagcaagttcttagcgacctacaaagagacttagactcctacacaataatagtgggagactttaacaccccactgtcaatattagacagatcaagacagaaaattaacaaggatattcaggacttgaactcagctctggaccaagcagacctaatagacatctacagaactctctaccccaaatcaacagaatatacattcttctcagcaccacatctcacttattctaaaattgaccacatatttggaaataaaatactcctcagcaaatgcaaaagaatggaaatcataacaaatagtctttcagactacagcgcaatcaaattagaactcaggattaagaaactcactcaaaactgcacaactacatggaaaccgaacaacctactcctgaatgactactgggtaaataacgaaattaaggcagaaataaataagttctttgaaacccatgagaacaaagaaacaaygtaccagaatctctgcgatgcagctaaagcagtgtttagagggaaattcatagcattaaatgcctacaggagaaagtgggaaagatctaaaatcgacaccctaaaatcacaattaaaagaactagagaagcaagagcaaataaattcaaaagctagcagaagacaagaaataactaagatcagagcagaactgaaggagacagagaaacaaaaaaccatgaaaaaaaaaatcaataaatccaggagctggttttttttaaaagattaacaaaatagaccactagccagactaagaaagaagaaaagaaagaagaatcagatagacagaataaaaaatgataaaggggatatcaccactgatcccacagaaatacaaactaccatcagagaatactataaacacctctatgcaaataaactataaaatctagaagaaaytgataaattcctggacacatacaccctcccaagactacaccaggaataagtcraattcctgaatagaccaataataagttctgaaattgaggcagtaattaatagactaccaaccaaaaaaagcccaggaccagacagagtcacagctgaactctaccagaggtacaaagaggagctggtaccattccttccgaaactattccaaacaacagaaaaagagggaatcccccctaactcattttatgaggccagcatcatcctgacaccaaaacctggcagagacacaacaaaaaaagaaaatttcaggccaatatccctgatgaacatcgatgcgaaaatcctcaataaaatactagtaaaccgaatccagcagcacatcaaaaagcttatccactacaatcaaatcggcttcatccctgggatgcaagcctggttcaacatacttaaatcaataaacgtaatccatcacataaacagaaccaacgacaaaaaccacatgattatctcaatatatgcagaaaaggccttcgataaaattcaacacccctttatgctaaaaactctcaataaactaggtattgatggaatgtgtctcaaaataataagagctgtttatgacaaatccacaactaatattatactgaatgggcaaaagctggaagcattccctttgaaaactggcacaacacaaggatgccctctcttaccactcctattcaacatagtattggaagttctggccagggcaatcaggcaagagaaggaaataaagggtattcaaataggaagagaggaagtcaaattgtctctgtttgcacatgacatgattgtatatttagaaaacccagcatctcagctccaaatctccttaagctgataagcaacttcagcagagtctcaggatacaaaatcaatgtgcaaaaatcacaagcattcctatacaccaataacagagagccaaatcatgagtgaattcccattcacaactgctaaagagaataaaatacctaggaatacatcttacaagaaatgtgaagttctccccttcaaggagaactacaaaccactgctcaaggaaataagagaggacacaaacaaatggaaaaacattccattctcatggataggaagaatcactatcgtgaaaatggccatactgcccgaagtaatttacacattcaatgctatccccatcaaactaccactgactttcttcacagaattagaaaaaactactttaaatttcatatggaaccaaaaaagaactcatatagccaagacaatcctaagcaaaagaacaaagctggaggcatcgtgctacctgacttcaaactgtactgcaaggctacagtaaccaaaacagcatggtactggtactgaaacagatatatagactaatagaacagaacagagacctcagaaataacgccacacacctacaaccatctgatctttgataaacctgacaaaaacaagcaatggggaaaggattccctatttaataaatgggtgttgggaaaactggctagccatatgcagaaaactgaaactggactgcttccttacaccttatacaaaaaatgactcaagatggattaaaaacttaaatgtaagacctaaaaccttaaaagccctagaagaaaacctaagcaataccattcaggacataggcatgggcaaagactttatgactaaaataccaaaagcaatggcaacaaaagccaaaattgacaaataagatctaattaaactaaagagcttctgcacagcaaaagaaactatcatcagagtgaacaggcaacctacagaatgggagaaaatttctgcaatctctccatctgacacagggctaatatccagaatctacaaagaacttaaacaaatttacaagaaaaaaacaaacaaccccatcaaaaagtgggcaaaggatatgaacagacacttctctaaagaagacatttatgcaggcaacaaacatatgaaaaaaagctcatcatcactggtcattagagaaatggaaatcaaaaccacagtgagataccatctcacaccagttagaatrgcattcattaaaaagtcaggaaacaacagatgctggagaggatgtggagaaataggaatgcttttacactgttggtgggagtgtaaattagttcaaccattgtggaagacagtatggctatttctcaaaaatctaggaccagaaatactgtttgacccagcaatcccattatcgggcatatacccaaaggattataaatcattccactataaagacacatgcacacatatgttgactgcagcactattcacaatagcaaagacttggaaccaacccaaatgtccatcaatgatagactggataaagaaaatgtgacacatatacaccatggaatactatgcagccataaaaaaagaatgagttcatgtcctttgcagggacatggatgaagctagaaacaatcgtcttcagcaaactaacacaggaacggaaaaccaaacaccgcatgttctcactcatatatgggagttgtacaatgagaacacatggacacagggaggggaacatcacayaccggggcctgttagggggttgggggctaggggagggatagcattagaagaaatayctaatgtagatgacgggttgatggatgcagcaaaccaccatggcacgtgtatacctatggaacaaacctgcatgttctgcacatgtatcccagaacttaaagtataacaaaaaataaataaataaatagcaggaaattctgtcatttgcaacagcatggatgaacctagagaacattatgttaagtcaaatgagctaggcacagaaagacaaatacagtatgatctcagcttatgtgtggaatttagaaaagtcaaattcatggaagtagagaatagaatggtagaagtagggaaaaggtggacaaaaagaaaaagaaaaaaaaaaaaacactcccaccagtgccatgacagtaaatttacagatgctggcaactcctggaaattactctatattgtctaaaaatgggaagaactcttggttccaggaactaccagcttctttcctggaaaactcatgaataatgcatcccttgcttagcatgtgatcaaagataaccataaaaatagtcaaccagcagcccatggggctgctctgcctatggagtagccagccttttatttattccttcactttctttctttttttttttttttttttgagatgaagtctcactctgttgcccaggctggaatgcagtggcgtgatctcggctcactgcaagcttcgcctcccgggttcaagcaattctcctgcctcggcctcccaagtagctgggattacaggcgcctgccaccacgcccggctaattttttgtattttttaatagagatggggtttaaccatgttggccaggatggtctcgatctcctcacctagtgatctgcccgcctcggcctcccaaagtgctgggattacaggtgtgagtcaccgtgctggcctattccttaactttcttaataaacatgatttcactttactgtcagcttgttcttgaattctttcctggaggaagccgagaacccatrtggcctctctggccgaatcccaattttggggttcacccagtaataaaccaaagagttgttttgttttttagactttagacaaactggataaagaatatcaggaggaaatgatttttccattgctaaagataaacaatatcctcaagttcagtgatattaaaaaaagggcaataagaaatttacatcagacagaaaagtacagagattaagagcaggggtttaaatcgtcactcccccacctactagccatgtgaacttggagaaagtatttaaactttatgggcttctgcttcctcttctgtacgatgagggtaatagttcccactcgtgatgactaagcaagtttatacatgtggagcacttagaacagcatctaaaatrtaagyactcagtaaataatagctgactcaagtttataattaagaaggctaaggaagtagcaagatatatgaaaatgatattcatatatactatgtttttaatttagaaaagkgggaggggaatttgttagtgtattttctcagttatatagtctgggagagtatttaataaactattatctagaggcagtaaatactgtgcaactacattttaaaatttaggccaatctacatttcaatgtcacataatttttaaaatactgccaatttaagaagctcccaatttgggaggctgaggcgggtggatcacaacgtcaggagatcgagaccatcctggctaacatggtgaaaccccatctctactaaaaatacaaaaaattagccaggcatggtggcgggcgcctgtagtcccagctacttgggaggctgaggcaggagaatggcgtgaactcgggaagcggagcttgtagtgaaccgagatcccaccactgcactccagcctgggtgacaaagcgagactctgtctcaaaaaaaaaaaaaaaaaaaaaagcagctcccaatttcagagatgcttcaatgtgaaaaaaaaatgcacattttagattgaatgaaatagattaagagatggaaaacagtaacagcaatattccaagcatcagatgttttatagtctcatctttttctttttttttttttgagacagagtctcattctgtcgcccacactggagtgtagtggcatgatttcggctcactgcaagctcagcctcccgggttcacgccattctcctgcctcagcctcccgagtagctgggactacaggtgcccgccaccacrcccggctaatattttgtatttttttttagtagagacagggtttcaccgcgttggccaggatggtctcgatctcctgacctcatgatccgcctgcctcagcctcccaaagtgctgggattatagacgtgagccactgcgcccggcctatagtctcatctttttctatacaagctgtgaactaaaatccagtttctaaacatgcatagctgcttttgttttgcttttgttgttgttggttttttgttttttgcttttaaagcaaagcccactagagacagcaccacatatgtgactggtaaggcaacagcagaagaaaggagtccttttatyaggagtcttgacctaaaaagccaagtcctaataatgaaaaaacaatgagcaaagaaagaggaagaaaatggctgtgaaagaagagaggacagtggaaatgggatatgatagagaaagctacaagataaaagaaatacagaaattcctgacaatgtaacaaagcattctgggggctttcagtggaggagcagccagatcctacagaccagcatgctcttgaaataaggccctacgacaacatcagaaaggatgccaagaaaattggaactgttaaactaaaagggacataaagaaagtccagtccatgaatactcaaagagaacaaaaagtatactattctctaatacaccccagcacaaaattgctacacattgctgatgcgagtatatgratggtgtagacacacaaggaaagctgagtaccactgatgttatttagtttgcaagctgggattacaggtcagaaagagttacatctggcattccatctcctctatagcaaagccactaagtcatctagcctctccttgaatatccctcattattaagaaactcatgatcactgcagaaccctaattccactttctgacagtgttggtagaaaattcttatgtttggttgggcatggtggctaatgctggtaaatcccagtactttgagaggccaaggcagaaggatcacttgagcccaggagttcgaggttgcagtgagctatgatcatgccaccatactccagtccaggtgaaagagtggagaccctgtctctttaaaaaaataaaaagtaaaaaataattattacattgaaccaaaatgtaccaactagtttggggttcttctgtttattcaatatctattgagcccctgaatggactttgagaggcccttgaggagcaatggatgactacagaattaggggctatagggcagacacagagcaaaaacaagaagtttggtgaagaaattgaggtgactgacaacagtgaaagcaggaggaattttttctagtcagggaaagctagaagagggctgacctcaggtcccaaccaggagatatgtgggtcataaaagatgaacaaccgtcacttgagtgtcaccagggaatcagtaatgtgggagaaagccaggcttcatgcagaaaactgtgtgggtctgtgttgaaattcaggttttagggaattttctaaacataaaactggggttgctcaagacagcacagaaggaaagactgaggaaagtggtcagcaataaaaggcagttttggaaggggctagggaggcaagggctaagccagagggattgaaagggaacggaaagacatgcccggaagagcttgcacctagggcagtaacttgtagtaggtgctagatccttgtaaacaaacatgatccaatgagacaagcattagattagagatacacaaaagctgccacaaggaactgttagggcatgaaaacaataccccaaaatacggcactttggcatgctgaactaaggcagcagccacaggggcagagcaagatgatggaatagaagaagcctacactgtttgtcacccccctcacccccaggaggaacatcaaattttaacaactaactacatacaaaaggcagccatctcaaataaccaaaaatcaggtgagcattcacagtagctggttttaatttcatatcactgaaagagacattgaagagaataggaaagacagtcttgaagtgccaatgccagccctcccccttctcccagcagtggccacacgtgcagattttgtgcttttgggagatggacagcacagcagttgggaggctttgctttgaactcagtgctgccctgtcagtgataagcagaaccaggctgcactcagatgacatctaaccacggaaggagcatttggactggccttagccagagggaaatcacccaccatagcagtcagagcttgagttcccacaagcctcacaaccacaggccagagtgctctggggccctaagtggtcttgaggggcaggttaggccacaaggactgcaattcctaggcaagccctagtgctaagctgggcccagagccagtggactagagtaggaggcacacarcctactaagacaccagccagggtgactaagggagtgcttctgccatgcctcccccayccccagcagtggctgcgtggtggggagaaatctgtgcatttagtagagggagaatgcagtgactggggcactttaacttaactcagtgctgccctgtcacagaggaaacctggcaggatttaccccctgctgactaaagagcgccaaggccctgaattatcaacagcactatccaggtagtataccataggcactgggctctgagacatgctggcttcaggtgtgacccagcacattcccagctgtgagggctacagtgaaagactcctgtttgagaaaagcagggggaaaataaaggagactctctgtcttgcacctcaggtattagctcagctacagagggtagagcaacaagcagacttctgaggtcactgagtccaggcctaggctcttggtcagcatttctggacctgccctgagccaaaaggtgagtcccagagctggcagcattggtcacaagctgackgaagagcccttaggctttaagtatcagtgatggcctggcagaacccccmcataagccagtggtgatggcagccacagggagaggatcttctgcccgtggaaaggggagggaagagtgggaagcaacttgtcttgtgggtcacgtgccaccttaaccacagtagaacaaaacaccaggtaaatatctaaggttttgacttcaatccctggtgttctcagacagcatctatgaaccaatctggggcctaggggaactcaccaccctggagggaagggcacaaacctggctggctttgccacctgctgactgcagagtcctagggcctggagtaaacttaggtggtagccaggtagtggttacaccgggccttgggcaagatcgagtgctatcctggcttcrggtctgaaccggtacagtcccagttgtggtggccacggtgtgctggtgacaccccaccccccaaggtccaggtggtttagcacagagagagactccatttgtttgggagaaaataaaggaagagaacaagagtctctgcttggtaatccagagaattcttccagatcttatctaagatcatcaaggtggtacctctataagtcggcaagaaccacagagttattcagtttgggcccacatcccctcaaatacctgaaaagcctttccaagaaggatgggcacaaacccagacagtgaagactacaataaatacctaactcttcaatgcccagacatagacaaatatctacaaggatgaagaccatccaggaaaacatgacctcgcccaaagaactaaggcaccagggccaggygcggtggctcacgcctgtaatcccagcactttgggaggcagaggcgggcggatcacgaggtcaggagatcaagaccatccyggctaacacagcgaaaccccgtctctactaaaaatacaaaaaattagcygggcgtggtggcgggcgcctgtagtcccagctactcgggaggctgaggcaggagaatggcgtgaacccaggaggtggagcttgcaatgagccgagattgtgccactgcactccagcctgggcgacagagygagactctgtctcaaaaaaaaaaaaaaaaaagaactaagacaccagggaccattcctggaaaaaacagagatatgtgacctttcagacaaagaattcaaaagagctgtggtaaggaaactcaaagaaattgaagataacacagagaaggaattgataattctatcagataaatgtaacaaagagactgaaataactaaaaagaattatgcagaaactaaaaatggaattggcatactgaagaatgcatcagagtctcttattagcagaacagatcaagcagaagaaagaattrgtaagcctggcgttggagaccagcctggtcaacatgaggaaatcctatctctactaaaaatacaaaaattagccagacatggtgacatgtacctgtaatcccagatactcaggaggctgaggcatgagaatcactttaacctgggaggcagaggttgcagtgagccaagatcgcaccattgtactccagcctgggtgacagagtgagactctgtctcagaaaataaataaataaataacatataatggagctccaatacatctagcacttttcagtggaaaccttacaggccaggagaccttacaggcatgacatatttaaaatgcggaagaaaaaaaaaatttaccctagaatagtgtatccagcaaaaatatcctttaagcttgaaggagaaataaagactttcccagacaaacaaaagctgagagattttrtcaacaccagacctgtcctacaaaaaatgctaaatggtacttcaatcagaaagaaaaggacgttaggccaggcgcggtggctcatgcccgtaattccaacactttgggaggacgaggtgggtggatcacgaggtcaggcgtttgagaccagcctgaccaacatgatgaaacctcatctctactaaaaatacaaaaattagcagacgtggtggcatgcgcctgtagtcccagctactcaggaggctgacgcaggagaattgcttgaacccaggaggcggaggttgcagtgagccgagatygtgccattgcactccaacctgggtgacagagcaagactccatctcaaaaaaaaaaaaagaaaaagaaaaagaaaaggacgttaatgagcaataagaaatcatctgaaggtacaaaactcactggtaatggcacacagaaaaacaggaatataacatggcaatttttggtgtgtgaaatactcttaagtagaaagactaaaccatgaaccmatcagaaataataactacaacttttcaagatatagacagtgcaataagacataaaaagaaacaaaagttaaaaggggaggagaaagttaaagtatatagttttattcattttcttttttgcttgtttatttctgcaatcagtgttgtcatccatttaaaataatgggttacgagatagtatttgcaarccgaatactaattgttgtgttttatgtgtgtccattgtgtgcatgtccaacgtacaatggacacccaaaaaataaaaagaaattaaagcgtaacattggagaaaatcatcttcactaaaaggaagacaggaaagaaggaaagaargaagagaagaccaaaaaacaaccagaagacaaataaaatggtaggagtagtgcttacctaccaataataacactgattgtaaatcaactaaactctctaatcaaaagacatacagttggccaggtacagtcgctcacacctgtaatcccagcactttgggaagccaaggtgagcagattgcttgagcacgggagttcaagaccagcctgggcaacacagggaaaccctgtctttacaaaaaatacaaaaattagctgggcatggtggcatacacctgtagtcccagctactttacttggaaggctgaagaaaaggatcacttgagcccaggaggcagaagttgcagtgagctgagattgaaccactgcacttcggcctgggtgacacacaacacaaagacatggagaggctgaatggataaaaatgcaaggcccaatgagctgttgcctaaaagaaacacacttyatttataaagatacaaatagactgaaaataaatgaatggaaaaagatatttcatgccaatgaaaacaaaaaaagagcaggagtagctatacttatatcagatgaaataggtttcaagagaaaaactgtaagaaaacacatataacgtcactatataatgataaaggggtccattcagcaagaggatgtaacacccagatataaaggaaatattattaagagctaaagaaagaggctgggcgcggtggctcacgcctggtggctccgcatttgggaggccaatgcgggcagatcacgaggtcaggagatcaagacaatcctggctaatacggtgaaacccgtctctactaaaaatacaataaattagccaggcgtggtggcaggtgcctgtagtcccagctactcaggaggctgaggcaggagaatggcgtgaacccaggagacggagcttgcagtgagccgagactgtgccacagcactccagcctgggtgacacagggagactctgtctcaaaaaaaaaaaaaaaaaaaaaaagagagacagatcccaatacagtaatagctggagacatctaaatcctactttcagcattggacagatcttctagacagaaaataaacaaggaaatatcagacttaatctgcagaatagaacaaatgaacctaataagtatttatgaaacatttcatccaatggctacagaacatcctcctgagcatatggatcatcctcaaggacagatgacatgttaggtcacaaaacaagtcttaaaacattcaaaaaaaactgaaataatagcaagcatcttctctgaccacaatgaaataaagctacaaataaataacaagaggaattttggaacatatacaaacgcatggaagttaaataatatgctcctgaatgaacagtgggtcaatgaaaacattatgaaggaaattgaaaaatttattgaaacaataataatggaaacacaactaccaaaatctatgagatacagtgaaagcagtactaagaaggaaatttayacctatgagggcctacatcaaaaagaagaaaaacttcaaataaataacctaacattcatcttaaagaactagaagagcaagagcaaaccgaacscaaaattagaacaaacaataaagatcagagcagaaataaatacatttraaatgaataaaatacaaaatatcaataaatatcatttgcaacagcatggatggaaccagaagtcattatgctaagtgaaataggtcagtcacagaaagacaaactttgcatgttctcacttatttgtgggtgctaaaaaaatcaaaactgaactcatggagatagtagaagaatgattaccagaggctgggaagtgcagctggggaggaggggaaatggggatgattaatgagtacaaaaaaaaatagaaagaataagtaagacttagtacttgatagcacaacagggtgactatagtcaataatttaattggacattttataactaaaagagtgtaattggattgtaacacaaggatgaatgcttcacaggatggttaccccattttccacgatgtgattattacccgttgcatgcctgtatcaaagtacctcatataccccataaatatatacaccaactctatacccacaaaaataaataaataattttttwaaaaaaaaagaagtaggctgggtgcggtggcacacgcctataatcccaacactttgggaggtcgaggcaggtggatcacctgaggtcaggaatttgagaccagcttggttaacatggtgaaacactgtctctactaaaaatataaaaattagctgggtgtgctggtgggcgcctgtaatcccagctactcaggaggctgaggcaggagaatcccttgaacccaggaagyggaggttgcggtgagccaagatcatgccattgcactccagcctggtgacagaacaagactccgtctcaaaaaaaaaaaaaaaaaagtatcctcaaggtctctctgaccttcgctcccctatctctcagttatctttctgtccaaaagtacaagatgaggctgttctctgtagttccttcatctacstagaaactggacccccaaagaatacaattgccttcaatcctgttgacaaaaaaaagcaaattctgtaaaatatttaaggtttattctgagccaaacataagtgaccatggtccgaagtacagtctccagaggtccagagaaagcacgcccaaggtggttggattataacttggttttatacattttagggagacttccagattgtgtcagcaggctgctgctcccaccagatgcataagccagtacacacaagctcccagatgaccttgagggcacaaattacatgttcagttttccccaaagatgcatgcagcacagtccaaagtgtgccttcctctgaacgcttctcttagacacaacagtggtattaaaattatgcattatattcccctttctaggatgaaaattaccaatactgctaacatactggtaagtcattaatatgacagcataatttacacagcacattaatatgacggcataatttacacagcacgtaaatgttacatgttagccaactttctgcagagtaaacgaagatcattttgttaaaagtttttttttctataaataggtttttggtaattttttttatatatactttaagttctgggatacacgtgcagaacgtgcaggtttgytacaaaggtatacatgtgctatggtggtttgctgcacttatcaaaccatcatctacattaggtatttctcctaaagctatccctcccctagcccccaccctgttggtaattatttttaatcaaattggctataatttwaaaaaaatttttttttggagacagagtcttactctgtcacccaggctggagtgcagtggcgcaattatggctccactgcagccttgatttcccaaactcaagcaatcctcccacttcagtcccctgagtagytgggaccacaggcatgcaccaccatggctggctaattaaaaaaaaaaaaaaaaaaaaaaaaatttctagaaaaggggtctctggacaggcgcggtggctcatgcctgtaatcccagaactttaggaggctgaggcaggcagatcacgaggtctagagattgagaccatcctggccaacatggtgaaacctcgtctctacaaaaaatacaaaaaattagatgggtgtggtggagactgaggcaggaggatcgcttgaacccaggaggcggaggttgcagtgagctgacatcgcgccaatgcactccagcctggcgatggcgcgagactccatctcaaaacaacaacaacaaaacaaaaaggggactccctattgcccagccgggtcctgaacttctgggttcaagcaatccttccacctaggtctcccaaagtgctggaacacaggtgtgggccaccatacccagcctataacaatttcataacttccaattgaaggagcgcaaggaatttccaccccaaaacacagcctcctgagataatgagtattttgaattaaaagcccttaaaaatcaacaggtattaggaatagatttttcctctgtctacataaacaccagatagacccaacaaaaacaatactttttccttctctccattatctcacaatctactgcagaaaagatgaccaagaatgtaaccagacctaatcagatctttctacaaaataacgtctgcctctcgggatcactccatttccaaagagaatcatttacacatcagtctctgttccctcatccattcattctccacagtaatcaattattactcagcagaataccaatattccctatctcctcttcccctctgaaataagawtatgtaagtatttgggccccattgggatactgggcaatcattctgtgattctcacgtgtgcacgttaataaatstgtatgctttttctmtatgygcctttttttttcttttgagatggagtctcgctctgtcgcccagtctggagttcagtggcgcaatctcggttcactgcaacctccacctcctgggttcaagagattctcctgcctcagcctcccgagcagccgggactgcaggcgcccgccaccacaccctgtgaatttttgtacttttagtaaagacaggatttcaccatgttggtcaggctggtctagaactcctgacctcagataatttgcccaccttcgcctcccaaagtgctgggattacaggcgtaagccactgcactcaaccagtatgcctttttgagttgatttttataccgcattgtacttgaaatggtaagcaatgacccctcagtattcttcaatttggggtatcttataatttatatggttccacatgctgacttttcacctcctagcatgtgtttgttgttgttgttgctgttgtgagacggagtcttgctctgtcgcccaggctggagtgtggcggcgcgatctcgcctcaccgcaacctctgcctctcgggttcaagcaattctcctgcctcagcctcctgtgtagctgggattacaggcgtgtgccaccacgcccggctaacttttgtatttttagtagagagggggtttcaccatgttggtcaggctggtctcaactcctgacgtcgtgatccgtccgcctcggcctcccaaagtgcagggattacaggcttgagccaccgcgtcccacccacatgttttaaaaatacaaatgagcggccgggcgcagtggctcacacctgtaatcctagcactttgggaggctgagccgggtggattgactgaggtcaggagttcgagaccagtctggccaatctggtaaaaaacagtctctactaaaaatacaaaaattagccgggcgtggtggcgcccctgcaaccccagctacacaggaggctgaggcaagagaatcgctggaacctgggaggcggaggctgcagtgatccgatatctcaccactgcactccagcctgggcgacagagtgagactctatctcaaaaaaaaaaaaaaaaagaaaaaaaaaagagttcattgtaaagtcattgtgctttttaagactattattaacatgtggcctaaaacaaaaccctgtcagaggctccaggggacaaccccagccttgcagagcagggtggacatttggcattttgttcaaagttgcactgaggctcagtgcggttcccagaactgtggtagctccctggtttccacagacactgcagttgatgaaggctgacagtttaattccaatgaacggatgtgcatgtgcracgggcacagcaactgggtttgttttcactctattctcgcttaagtgaggcaataatacaaagttgactgtgggctcccagaacacttgctggtgctaatgcctacactgtcaactgcaattcaagaacmgatgacaaattcaagacaatgccctgcaaatgatgccaatttctttttttttttctttttgagacacagtctcattccattgcccaggctggaatacagtggtgtgatcacaggtcactgcagcctcagcctcgccctttgggacttcagcaatcctcccacctcaccctcctgagtagctaagactacgggccatactggcaatttttttttttttgagacggaatctcgctgtgtcgcccaggctggagtgcagtggcacaatctcggstcactgcaagctccacctcccaggttcacgccattctcctgcctcagcctcccgagtagctgggactgcaggcgcccgccaccasacccggctaattttttgtatttttagtagagatggggtttcaccctgttaaccaggatggtctcaatctcctgacctcatgatccacctgcttcggcctcccaaagtgctgggattataggcgtgagccaccgcaccaggtccatactggcaaatttcttgacttttttttttttttttttgagagacaagacaaggtttcactacgttacccaggctgattttgaactcctaaactcaagcaatcctcccaatgtggccacccaaactgctggttttacagatgtgagctactgcgactggaccaaatgatgccaaatatattcctgaaaacaaacatacacacaacttctaaagtgtgatcaatgcatgactagtctagctttcatagttcaaataagactaaatatttgtgtggattttaaaagatatacctattccaggggttactggtaaggtttaaccaacaatcaatcactaaggcaattatttctggatcccatcacagacatcagtaacaggcagctggggagacatggaaggtttttgactatggcaaagatatgatccatactcagatttaagaaaaattactggggggaggctgggcacagtggcttacacctgtaatcccagcactttggaaagccgaggcaggcggatcacctgaggtcaggagtttgagaccagcctggccaacagtgaaaccccgtctctactaaaaatakaaaaattaaccaggtgtggtggcaggcgcctgtagtcctacctacttgggaggctgaggcaggagaatcacttgaacctgggaggcggagkttgcagsgagcggagatcgcaccattgcactccagcttgggggacaagagtragacttcaactcaaaaaaaaaaaaaagaaaaaaaagaaaaattactggggggaggaaagagttatatagaatgaatagcaacactattgttgagaaataggccaaaaataaggcaaaaacattcaatgtgaaatgaaggaaaactgataagaactggtagctcattgggtagcaggtagattccattttaaaacagaatttgaagccaaacaagagctaggttagtaaaattgccaaggaaagtcaggagaaggggctggattgcaatgtaaaaagaaattgtgatttggtgcccttggagcatttatattcattaagcaggcccttgaaaacgcggagtaggtatagataccctctgctgaaccttcccagagggcagatgggacccccaatgaagacgaggagaaaggagaaaatggcaaagccagaggaagaaagttgaagaaccaatgaggtargaaaatcaagatatctcaggtcatcagaaccaagaaaagagctttaaaaaggtacaaatgtcacagaaaaattaagaagggctgaaaataggtgctgaatgctatttgggaattcattgctgaccttacaactgctaatccaatgttgtaaacacaagccagtccaaaagaagacaaggaagtggtgaggacggggtgagaagatgaagaagtgagggcagcaaggcagrtccacacagtaagttaaagtcactgggaggcagctctagaaaatttcaaggtttaaartctaggatggtgaggtcgaggcaggtggatcacttgaagctaggaattcaaaactagtctggccaacaaggcgaaaccccatctctattaaaaatacaaaaattaggctaggcgcggtggctcacacctgtcaacccagcactatgtgaggccgtggtgggcggatcacctgaggttgagagttaagacaagcctgaccaacatggggaaaccccgtstctactaaaaatacagaattagccaggtatggtggcacatgcctgtaatcccagctactcgggaggctgaggcaggagaattgcttgaacccgggaggcagagattgcagtgagccgagattgcaccattgcactacagcttgggcaacgagagcgaaaytctgtctcaaaaaaaaaaaaaaaaaaaattggctggacatgatggtgtggcctgtaatcccagctaytgaggaggctgaggcaggggaatcgtttgaacctgggaggtgaaatttgcagtgagccaagatggcaccatcgcactccagcctgggcgacaaagcaaggctctttatcaaaactaaataaataaataaataaataaataaataaataaataaagtctaggattacctcattgggggtgaggaggggaaaaaatagcctataaatgagagtaaaggggcaaaccatggaaggtaacagaggagaaatgtctctgaggactgggtttatctgccagattagtaaaaaggagagggctgcaataaaggagtctataaaccaagtctgaagtgacaggtcgkttgagctcacctcagataccccagtctgataaaaattgtgtatcggcacaaattcaggtctacttcaagagggagagggtggagttgagacaaaagaacaaagtaggaaagacctgtaacagatagaaaaagtgcaatgaggagtcaaacagaaatgagcaaaaagtatgccagaaagtgcagagggcccagattatgtattgagggacaatctatagcattccttgtcttattcctgcaaatctyggcaacctgtcctcaggaccaaagtggggtttacccatgtttggraatgcacagaagcttataaacctggttgtacatcaggatcgtctgggcacttgttaaaaatacagcttcttggccaggcgtagtggctcacgcctgtaatcccagcactttgggaggctaaggcaggtggatcacctgaggtcaggagttcaagaccagccyagccaacatggtgaaaccccgtctctactaaaagtacaaaaattagctgggcatagtggtaggtgcctgtaatcccagctactcggaaggctgaggcaggagaatcatttgaacccgggagggggaggttgcagtgagccgagatcgtgccattgcactccagcctggggaacaagagtgagactctgtctcaaaaaaaaaaaaaaaaaaaaatacagcttcttggccgggcgtggtggctcaygcctgtaatcccagcactttgggaggcggaggcgggtggatcacgaggtcaggagttcaagaccagcctggccaagatggtgaaaccccatctctactaaaaatacaaaaattagctgggcatggtggcaggtgcctataataccagctacttgggaggctgaggcagagaattgcttgaacctgggaggcggaggttgcagtgagctgagatcacaccactgcactccagcctgggtgacagagcaagactctgtctcaaaaaaacaaaaagcaaacaaacaaaaaaaaacagcttctctaaccctacccctcagattctgagtcactatrtcaagggtgtggctagagatttttaattagcaatcccaagtaattctgaaacagctggtagaatggcatttggaagccaagcagatcatcagaattatctaatatactttttaaaaatgcagatccataagctcctgtccaaacctactgaatctctcaccacatttcacatgcataaattttttctttttttttaaatttttttgagatggagtctagctctgtcacccaggctggagtgcagtgacacaatctcagctcactgcaaactctgctccctcggttcaagcgattttcctgcctcagccttccaagtagctgggattacaggcgcccaccaccacgcctggctaatttttgtatttttagtagagacagggtttcaccatgttggccaggctggtctcaaactcctgacctcaagtgatccgcctgcttctgcctcccaaagtgctggaattacacacatgagccactgcgcccagccccacatccatatatttaaatgcatcatgtaggctgggcacagtggctcacgcctgtaatcccaacactttgggaggctgaggcgggmggatcacctgaggtcgggagttcgagaccagcctaccaacaaggagataacctgtctttactaaaaatacaaaattagccaggcgtggtggcacatgccagtaatcccagctactcgggaggataaggcaggagaatcacttgaacccaggaggcggaggttgcagtgagtcaagatcgcgccattgcactccagcctgggcaacaagagcaaaactccatctcaaaaaataaaataaaataaaaaataaatgcatcatgttctaatcctttttcaatcaattttccagcaaatgcgtatttgaaaaaaaaaagagatttgagtaagagcaatacaagtaagtactattgattgaattctggttctgaaccagaactatatgtatgttatctccctgtaaaaggactgactccaacagcaggtgacctcaggcagacccccaatcaagttcccgttccctcaacaaattccagttcctcttctctgttaccagttaaaaccatgaacctagatttccttcagcagagaaaaggaatgcaagcaagcaggtgactgtggagtaagagtctctcaatgctcttaggtccacaagtttacatggctattcattaaaagaccactgactaggctgggcgcagtggctcacgcctgtaatcccagcactttgggaggccgaggcgggtggatcacctgaggtcgggagttcgagaccagcctgaccaacttggagaaaccccatctctactaaaaatacaaaattagccaggcatgttgacgcttgcctgtaatcccagctactcgggaggctgaggcaagagaattgcttgaacccgggaggcggaggttgtggtgagccgagttcactccattgcactccagcctggacaagagtgaaactccttctaaaaaaaaaaaaaaaaaaaaaccactgactgctctttaaactgttcttggagccaggcrcggtggctcacgcctgtaatcccagcacttcgggaggctgaggcgggtggatcacaaggtcaggagatcgagaccatcctggctaacacggtgaaaccccgtctctactaaaaatacaaaaaattagccgggyrtggtggcaggcgattgtagtcccagctactctggaggctgaggcaggagaatggcgtgaacccgggaggyggagcttgaagtgagccgagattgcgccactgctctccagcctgggcaacagagccagactccrtctcaaaaaataaaaataaaaaataaaaataaataagctgttcttggaaggaaattcttataagaaacttttcctggttccaatttcagagcccatctttaaggagcttctaagaagcattaatgatattcatgcacatgcacaccatccatcattttagtgtaaatctttacttgtttagaacattgtatgattctaataatactaaagatacttttatttaaaaatataatatagattttttaatgttacaaataacattagctctaacatatgaatgcaaatgacctatggttattgctttacgttgggccactcaaagccctggaaaaccttaagaacaggtgttaacaggcatgcaagcactgaagccagtgacataagtctgaatcctgcctctgaaatttactaggtgcagggtactgcaataggactttctgaaactttttttccttccctaaaattgtaataataccacctattttttcagggttgttataagaactagaggtaacatacacatagtcctggttcagtgccagaattcaatcaatagtacttttttgtattgctttcaccaaaatttctatccctcttccccagagatgaaattagtactctagaagttctyaggatactggggtatatgttgaaaatgtgagcattccagccatggtgagtaccagaaaaaaaaaaactgtacttacatagaaagtttaccaagtaaataatgtgaaaagtccctcaccacaaagcaccgagatgctgaataaattacaacagatattcaaatactcagatacaacaaatgcatggctgagctcataacaaaataaaggaggtgcccaaaggcaagcaaaaaaaaaaaagaacccaaaacttaaacacaagtaactaactygtaagaccatgctgcccaagaggcaaagtcattgccaggaacccgaaagcctaggggactaagagccttkcaggggacggaagttttggccttgggttttcacaataggaaaaagctgaacctgaggcctggaactaaggttccataaaagggagcattgggccgggcacgrtggctcacacctgtaatcccagcactttgggaggccgaggcgggcggatcacgaggtcatgatattgagaccatcctagccaacaaggtgaaaccccgtctctactaaaaatacaaaaattagctgggcatggtggtgtgtgcctgtagtcccagctactagggaggctgaggcaggagaatcacttcagcccagatggcggaggttgcagtgagccaagattgcaccactgcactccagcctggcgacagggtaagactcagtctcaaaaaaaaaaaaaagatggagttttgctgcgttgctcaggctggagtgcagtagctattcacaggtgcaaacacagcatacttcatcctcaaactcatggcttgtagtgattctcctgcctcagcctcccaagtagctgagactataggagtgcaccgattataaggattgttatctctgttgtccagatgaagaaacgtagaaattaagagacagtccaattcacacagctagctatggaagagggactagaacgtgagtgctatataaccccaaagcctatgtcttaattgcttcacctttctgtttcacttaaatggggagcttcacattcaggaatacacaaaggatgcagttggtacactttattatttttgccaaaaagcayagaactctaaaaacagcagggtttataaccacagaacatgacataacaatgctaaatggaattttctgccaagttcttgagttttcagtttttgttccttcttctttaagagggaaagtgacatttcaattgagtaatgcctactttgtaatgcgtttaaattttgtggttttcatatataaatattttcctaggtgctatagaatgaactggcacttttcagtaacttaaatctggtttactttttgatgagggggaagaacagacttatctaatgatactattgaactaatagggaggcagatttgagtcaaagaagaaagcactttctaaaatattttttacccttcccaaattgaacagggtgtggtcatccagtagtttgagactacttctcaaaacactagatcattctcctacagatattacagattttatcatggtaagggggctgtacctattaagataattacttttcgaccctgaaaatagcaacaagaattttgagtttcagccggtttacaatatcgagacaatgtaacacacctagaaaaggtagtgctaggttctccattttaaaaaaaactgctctgggttttctttgaattaaaaaaaaaaaaatggtgtgtgcctgtagtcccatctacttaagagactgaggcagaaggatagctttgagcccatgagttcgaagctatagtgagctacgattgtacctatgaataggcacagcactctagccttatcctgggcaacacagtgagaccccatctctctctgactcccctcccctctctctctctctctccctctccctctctttttgagacagggtctcactctgttgcccaggctggaatacagtgaaacgatcatggctcactacagcctccacctcctgagcgcaagcgatcctcccacttcagyccacaaggggtcattttttgcagagacggggttttgaaatgttcccaggccggtctcaaactcctgggstcaagcgatcctccccctcggtctcccaaagtgctgggattacaggsgtgagcccccgtgccaagcaatcccgtctctttaaaaaaaaaaaaaaaaaaaaatgcctggccaacatggtgaaactccgtctctactaaaagtacaaaaaattagccgggcgtggtggcgggcgcctgtagtcccagctactcgggaggctgaggcaggagaatggcgtgaacccgggaggcggagcttgcagtgagccaagattgcgtcactgcactccagcctgggcgacagagccagactccgtctcaaaaaaaaaaaaaaaaatgtacaaaaattagctgtgcatggtggcaggcacctgtaaccccagctactcgggaggctgagacaggagaatcttgaagccaggaggcagaggttgcagtgagccgagattgcgccactgcactccagcctgcgggacaagmgcaaaactgcgtctcaaaaaaaaaaaaaaaaaaagaatggaaaagagraaaagcagagcyaccttacagaaatgatttgtagactgccacaactcccttttacccttactgctaaaagggcacttcctcttttcccctactcaatgggtttgtaatttagccaggtgattttaagtaaaatgatagaataaagaatttgaggccggatgtggtggctcacatctgtaatcccagcactttgggaggctgaggcgggcggatcacttgagatcaggagytcgagaccagcctgggcaacatggtgaaacccccgtatctactaaaaacagaaaaattagttgggcgtggtggcgcatgcttgcaatcccagctacttgggaggctgaggcaggagaatcgcttgaacccgggaggcagaggttgcagtgatctgagttcatgccactgcactccagcttgggcgacagagtgagactccgtctcacaaaaataaggaatttggtgcccactattctccaactgaaaacagttgatgattaacaaattctgtacattaaataacttgaaaacccattaaataaataccttcgatccaaagtaaatcattttcatttgataaggaagaaaacaccctcccattaatttgagtgaatcacacctaagactggaagagagttcagaaactgtttcacactagtgtcctcattttgaagacaaggaaatgaagaccgaaggcactgtaattcagttacttgtttacatattttctcacctcacaatttctgcccttatctactgtagttatatctttttaattcatcatgtttttctgctctatgcctactacaagttcagaaccaggactaaaagggaatttaaaagctctaatatttatcatatttaaatcgtcatatttgcttaatcagaatgaaatgcgtgaaagtaattagaattatttgtatttctgctgctcaaatgaggttttgcctcgtaagctggtctacataccagacacctctggttaccgcataaaggaggggaggggattttaaagaagttttgcaaatcaaagaaaaaagaaatccctagtttcaaactcgcctggggagaagagaacacatttacaagacaggggagattacgtggccttgaatagatcgccttgaatagatcaccttgaggacttctttaagattcaatgagaattcagaaatcaaaacaccgcattactgacatctgaacctattaacatgaaaacagcaataatgattccgttttctgatgttaggaacagctttccttgccgcttttcacagtcagcctgggagtcaagcgtccctttaagaaaatccaggcactaagaaggttgctcaccacacctaggttgtcagacttgggcggacaccagcctccccttcaccgtattaggcctccaccacggctgcccaaagcaggaatttagcgaagccgcttaagcttcagtagctagaaaactggtcttttcaaatcctaacaaaagttagagagaaaaagagaattctacctktactttctgaattttctgagaagtgacctccaggacaagctcggcggtaggcgggttcctgcccaaggtcctctgggggaagggacagcatagctaagggagtgggtggccgagcgcagccttccacaatgaacctcccgaaccagttacctccgcagcgggggacgagagggcgcacctgcagggcgctgggagcgcccctcacccgcacctacgcgccggggccacccttcccccgcgccccgaggcgcttacctgtggctcctgagggcacctggcccttgaaggcagcggtccctacacgtcccaggtgcgacgcgggcctgctccagggccggggcaccccgggcggcaggtaggaggggttggacttccgccgsatcgccacccgcctgaagttggagccgccctcgtcgctcatcctgccgggctcgaccgccgctccccgactcctcccgctcccgtccagccgcgagcggcccctggggggcgtcgcctgcatgcccaggttcggcgcgactccgggggcgccctctactgcggcgtctcctcagcgagtgcctcctctccctctccttcccggtacgctccctcccggcgtcgcggcgagtttggctgcggcgactcctgcggcagtcgcagcgyctcggtatctgcagctcccgcactcactcaaagccgctaccgcagctgccaggccggggctgcctccaccccttcctctctggagccaatcgccagcaggtccccaagggcgggaggagagcgcagagggttcagcctgttagcgccgccgccgccgccgccgccgcctcctccggccggggaagcagccaagaacttgctgtgcccagcggagcgccctgggcgcggccccggagccggagccggttcgctctggccggccccgccctgccgcgccactgcctcgccctttggccgaggggagccgcgcgggcgcgcacctgcggccgcacacctggggtgctgcgaggcgggggccgcgctcacctgctggccacgcagtgccctcgggaagaagtccagctactctggaccatgtccagggtgcttgcattctcgcagacccgcactctgagggtcgcgtatgtgtctcaagccgttgtgctgaacccttgatcttatgtcctaaaactaccgaataagtatttcagataaggaaaccaaggtgctgaacctacagtggggtcacatagcactgcagagctggagtctccgcaccgaagtctgtccttactccactgaactaaacatcttgccaggagtatcgggacagaaaatgaaataagaggtgtggaaataaaagaggggtagaggttaacaatccaaaggtttccagaagagcagcagaccctccattcaggacttcattaggaatgcactttacagtccttttggttgttttgagacagggtctcgctctgtcaccaaggctgcagtgcagtggtgtgatcatagctcagtgcagcctcgaccttctggtctcaagcgattctcctgcctcagcctcctgagtagctgagacaacaggggcgcgccactactgctggctaatttttgtagtttttgtagagatgaggcctcgctatgttgcccaggctggtctctaactcttgggctcaagcaatcctactgccttggcctcccaaagctctgggttacaggcttgagtcactgtgcccagcctagagtccttttaaattatcatgttttcgtttttaacaccagctaaatactaacctgaagaaatgcttttttgtttgttttttagataccgggtcacaccctgatccaagctggagtgcagtggccctatcaactcactgcagcctcgacctcctgggctcaagggatcttactgcctcagccccaccactagctggaactacaggcccatgccaccacactcagctaattagtagtaktatttatttrkttatttattcttagtggagatgaggttttcctakgtcgaccagactggtctccaatccctgggctcaagcattcctcccaccytggcctcccaaagagctgggattacagccgtgagccacagtgcctgaccaaaaaaatacattttaaattgacttgcttatctgcatttgaaaattcactattctaataacaaagaggctgtgtcccaaaaatcacacagataggaggcaaaaagccaccattacaagtatcccagctcaagccaagttccccagccatcacttccatcttggaagccaccccgcctttcttcacatggtcattcacccaggtaccatctccagcccccygaagtgtaatggtaattcgatctttctcagcctttgtgaagggcagttcaactgtttcagtctccctggctgctacccaaataaacgtactcccaaagagaaggaactagccctctaatgatttatgcagccattcagacctttattaaaaggagcttttgctctcttaggatttattctctttctgacagcggcactgttatctactgtgccatatagtatcaaaagtaatttaaacaagtagtttcaaatataaattaaagcagaaagttttgcctccatatacataaattaactataaatgcaaatttctaacttagtttatttgcctcaataaaaagatggtgttgaaatcaacaatactatagtagcacgttggcttagagcaacctttttcttttttttttgagacagagwtttgctcgttgcccaggctggagtgcaatggcgcgatctcggctcactgcaacctcctcctcccggattcaagggattctcctgcctcagcctcccgagtagctggattacaggaacctgccaccacacccagctaatttttgtatttttagtagagatggggttttcaccatgttggccaggctgatctcgaactcctgacctcaggtgacccgcccgcctcggcctcccaaagtgctgggattmcaggtgtgagccatcacgcccggccatattatacttttgtacataccatggtaagatcaacagaaggtgacacactgaggctataagactattgtgccaatctataattctaaatttacatctttctctaatgacactattgctttatacaaggctcacacatctactaggcatttgcagtagcccacacagctctgcatgattagaattcagcagaggctgggcacagtggctcatgcctgtaatcccagcactttgggtagctgaggcactaggatcgcttgagcccaggagtttgagaccagcctgggcaacatagtgaaatcctgtctctacaaaaaaaaaaaaaaaaaaaaaaaaaagataatgcaatggcatgaccttggctcactgcaacctctgcctcccgggttcaagcaattctcctgcctcagcctcccgagtagctgggattacaggcgtgtgccaccatgcctggctaatttttgtatttttagtagaggcggggtttcaccatgttggtcaggctggtcttgaactcttgacctcgtgatccacccgcctccgcctcccaaagtgctgggattacaggcgtgagccactgcgccaggccaattttgttttttttttattagccgggcatgatggcatgcacttgtagtcccagctacttgggaggctgaggtaggagaaacagttgagccccagaagttgagaatgcagagagccatgattgtgccactgcactccagcctgggcaaaaaagtgagaccttgtctcaaataaataaattgaaaaaaaaaaaaaagaattaacagaatactctgaaattttccacgaaaaagagacaaactgataaaagagataaacctgaagtgatattatttatgcagtatttcaaatagtttgttttcaaagtagacacaaatagatacatgataaacattttagtgagaatattggcaatcaaaaatattttttaaaatgcaaggtataaacattttcatggtaatagttttcaatttgttgagagaaaacagtctcctcatttttaagtctccaaattgcaaatcaaaaacgttgttcatgaggctggtctgaatgcagtgatgtttacaacagactgatcacaaccagttaccgatttgtttcttctccactcccactgctttcaataactagccttaaaaaaaaaaaaaaaaaaaaacctgggcacggkggctaatgactgtaatcccaatgctttaggaggctcaggkgggaggatttyttgagtccaggagttcgagactatcccgggcaaraacatgaatcctcctctctacaggggaaaaaaagaaagaaagaaagattttaacggcatcattatatatattttttctttttttgtcctgggtgaragggaggaagtggctcatcattatttacaacagtaaaaatcttgaagcaacttaaatagccaatataggaaagtattttgttttttaaaaagtataatttattcatcctatagaatattatgtcaaccttaaaaatattgtatttgcaaacttttaataacctacaaaaatattcaccataaatgttaaaaggtgaaaaacaggatttaaaattgtatattcagtatgattcaagtaaagtcaccaaaatgttaacagcagttttcattgagagagattatgggtgaattgtattgcttcctttctacttttccatatctttcaaactggctacaataaatatatattgctttattactagaaaaaaagaagcaaacatttgagaaataaataaatgaatgggattggcagacctgtatctttggccaatctgaagaaaaataagctaatttattccaggtgaaattaaagtttttatcctcaactgagcagatgtctcccaaacttcctgtctgtgaggcagagatgcaaatcctgtccaaggacacagagaacctctgccagtgagaagtataatgagtaggctcagctgttaataggatcttgaactaaaaatctgacactgcctctgcagcctaattggtgtgattatcacttagccaattatcaccctgggtatttgctgatctaggggatctttaagaacacaatcagttcttgaataatttgtccaacaccttaggcacagtttttccatctgaaaatacacactgtcacaggctctctaagtctgttttcaaactttatcagatgcattctagaacatattttaactatattatattgaattttacatcctaaattaatggaactgctttagaagcatgggtttatttcagcatagggttgcaagtaccaggagaatgccattacttcagctcatattccagtgttttatgtttggtagttggtataattttgctcagttgatcataaagaaattttttagattccactgatgcaaaaagaaaaaagaactcttcacaacaaataattgaatagacttttaataggtaagattttcaccaattaggttttattctcatctttgattttgtttttattttattttatttattattwttttttgagacggagtcttgctctgtcgcccaggctggagtgcagtggtgcgatctcagctcactgcaagctccacctcccgggttcatgccattctcctgcctcagcttcccgagtagctgggactacaggctcccaccaccacgcccggataattttttgtatttttagtagagatggggtttcaccatgttagccaggatggtctcaatctcctgacctcgtgatccgcctgccttagcctcccaaagtgttgggattacaggcgtgagccactgcgcccggcctatttttgttttttgagacggcatcttactctgtctggagtccagtggtaggatctcagctgactgcaacttctgcctcccaggttcaagcagttctccctgcctcagcctcccaagtagctgggattacaggcacccgccaccatgcctggctaatttttgtatttttaatagaggcggggtttcacaatattggccaggctggtcttgaactcttgacctcaagtgatccgccagcctcrgcctcccaaagtgctgggattacaggtgtgagccaccacacccagctgtttgatatttgttaagtactcctagtacttacctaggtatagaatgtgatgatgccctttccatattacataaacatatttagtaccatggcctttattttctaataaagtaaccgagaattaggacaactattcatgtgaataaagaaaaggctgacttttaaatatatactaattgctgttaattctactgaaatagccaactttgaagtttgaatctatataaacctaagaaaaatggtaacattgacaaaaaaaaaaccaaaaaactaatgcaaagcttagcaatgtaataatactccttttttttttttttttttttgagacggagtctcagtcttgttgcccaggctggctggagtgcaatagtgtgatctcagctcactgaaacctccacttcccgggttcaagcaagtctcctgcctcagcctcccaagtagctgggattacaggtactcaccaccacgcccagctaatttttttgtatttttagtggagacggggtttcaccatgttggccaggctggtctcgaactcctgacctcaggtgatccgcccacctcagcctcccaaggtgccaggattacagacatgagccactgcgcccagggaaataatacttctttttatttttaatttttagagaaaggtttttgctatgttggcctggttggtcttgaacttttggcctcaagcaatcctcctgcctcggcctcccaaagtgctgggatcacaggcatgagccactgcacccaaccatcaatgtaataatagttcttagttttgtattaggaagtttatgagaaaatatttaaaagttgcccttaattttatagaaaatctggacgaaagggtcattcaaggagaagagttggaattaaggaccagaagaaaaaatagcctagtttctgactatatgttgaaaaataacattatgacttatctcaaggattatttatacagtcaattacaaggtcattagaattgacagttggctgggtgaggtggctaatgcctgtaatcccaacactttgggaggccaaggtgggtggatcgcctgaagttaggagttcgagaccagtctggccaacaatggtgaaaccccgtacctactaaaaacacaaaaaaattagccagacgtgatggcgtgcgcctgtaatccaagctacttgggaggctgagggagggtaattgcttgaaccagggaggtggagattgcagtgagccgagatcacgccactgcactgcatgcagcctgggtgacagaatgagactctgtctcaaaaaaaggaaaaaaaaaaaaagggccaggcacagtggctcatgcctgtaatctcagcactgtgggaggccaaggcaggtgggtcacctgaggtcgtgagtttgagaccagcctgaccaacatgcagaaaccctgtctctactaaaaacaaaaaaaattagccgggcgtggtcatgcatgcctgtaatcccaggtactagggaggctgaagcaggtcaacggcttgaacccgggaagtgggggttgcagtgagctgagatctcgccattgcactccagcctgagygacagagcgagactctatctcaaaaaaaaaaaaaggagttacagttatcaataaggcagttgagttaaattatttgatacaaatatttaaaggagaaacctaagtggacaaataccaaagcttcaagaaggmatgatatctacttgtaaaataaatattgggattttaaagaaacactgtcatgaaataaaatatatgcatattagctgggcacgacggtgcacacctgcagtcttagctacttgggaggctgaggcaggaggactccttgagcccaggcgttcaagtccagcttgggcaacacagcaagaccctgtcttttttttttttttttttttgtgacagaggagtcttgctctggcgcccaggctggagtgcagtgacgtgatccccgctcaatgcaacttccacctcccgaattcaaacgattctcctgcctcagtctcctgagtagctgggactacaggggcacgccaccacgcccagctatttttgtatttttagtagagacggggtttcaccatgttggccaggatgctcttgatctcctgacctcgtgatccgcccgcctcagcctcccaaagtgctgagattacaggcttgagccaccatgcccagccaaccctgtctcttaaaaaaaaaaaatatatatatatatatatgcatatttcgtaatggttatgcctattacacaattttaaaataatagtttttgaaaatgctattacttaatgttaattgttgtttgatatttatttttatttttttgagacagtctccctctgtcacccaggctggagtacagtggtgtgatcaaagctaactgtggcattaaactcctggggtcaagcagtcctcacacctcagattctgtagctgggactaccagcacgtaccaccatgcttggctaattttttaatagagatgaggactcattatattgcctatggtggtctcaaactcctgacctcaaattgatcctcctgccttggcctcccaaagtgctgggattataagcgtgagccactgcacctggtctgatatttttagatggacaattagttctacaaaaattgaaaaaaaattgtatatagatgacttaatattttttaaaactgaagcaaccatgatgtgaaaagaaatattttttttcttatttcatctttgtgatgaggcccgacctgatcaccccatttaataatctgttttactttctccctatcccaatctgacacaatcttttttccctgttctttttatttttaccttacagtttcataatctaacatactgagagatgacaacgtgctagcagcccttgctcgctctcagcgcctcctccgcctcggcgtccgctctggccgcactcgaggaggcccttcagcccgccactgcgctatgagggcccctctctggggctggccgaggcctgagccggctccctctgctctcgcggaagtgtgaagagagaggcgctgcaagagccaggggtgcgcgcggcgctcgcgggtcggcgcgagttccaggtgagcgcgggctcggcaagccccgcactcggcgcgaccggctggcgcctgctgggtttgatcggggggacgagttccctctgggctgccagagtgcccgggctacgtgccgcaaagtcccgcagcggtgagtgccattgagaggtgaagctggctgggcttctgggtggggtggggacttgagaacttttctgtctagctaaaggattgtaaatgcaccaatcagcactctgtgtctgcctaaaggtttgtaaacgcaccaatcagcactctgtcaaaacggaccaatcagcgctctgtaaagcggaccaatcagctctctgtaaaatggaccaatcaacaggatgtgggtggggccaaataaaggaataaaagcaggccaccgctagtagcagcaatcggctcggtccacttttaggtagtagaggttttgttcttttgctcttcgcaataaatcttactgctgttcagtctttgggtctgctgctgtgtttaagctgtaacattcactgggaaggtctgtagcttcactccgggagccaggggggctacaaacccaccagaaagaataaactccagacacatctgaacataggaaagaaaagactccggacacacagtgtgtaagaactgtaatattcactgtgagggtccagggcctcaagaccaagaacccaacaattccggatacaatactatgatagttatataattatcatgcaactcttttctgttcgtttatttgagacagagtctccgtctgttgccaaggctggagtgcagtggtgcgatcccggctcactgcaaccccccgcccccccggttcaagggattcacttgtttcagcctccccgagtagctgggattaggggtgcacgccaccacgcccagctgctttttttttcaggacctcaggtgatctgcccacctcaggctcccaaagtgctgggattacagttgtgagccactgcacccagccactaatattatttttaataacagtacctagataattggagtcctatatattgacatgtgtgaaattcattcattcacttatacattccttaattcagcaagtttttttttttgagatggagagtctctgtcacccaggcgggagtgcagtggcacgatctcggctcactgcaagctccgcctcccgggttcacgccattctgcctcagcctcccgagtagcggggactacaggcgccggccaccatgcacggctaattttttgtacttttagtagagacggggtttcaccgtgttagccaggatggtctcaatcgcctggcctcatgatctgcccgccgcggtctcccaaagtgctaggattacaggcgtgagccaccgcgcctggcaattcaccaactattgagaacttattttgtgccagattctactctaggcgtttaagatgcattagggaagaaaacgaagkttcataccttttggaagttactatcatatatgtaccatggatggaaagagacacaaaaaacagtagtatcggctgggcaccggtggctcacacctgtaatcccaacactttgggaggccgaggtgggtggatcacttgaggtcaggagttaagagaccagcctggctaacatggtaaaaccccgtctctactaaaaatacaaaaaattggctaggtgtagtggtgcatgcctgtaatcccagctacttgggaggctgaggcaggagaattgcttgaacacgagaggtggaggttgctgtgagccgagatcgcccattacactgcagcctgggcaacaagagcgaaactcttaataataataatagctactaaagactaaacactggttgaaagttgttatatatgttatttcatttaatctttgcaataaccttgccaagtaggctgtttttgtttgtttgtttgtttgttttgctgggttttgctctgttgcccagactggagtgcagtggcactatcttggctcactgcaacctccacctcccaggttcaagcaattctccctctctcagtctcccaaatagctggggattacaaccacggccaccacacctggctgatttagagccggggtttcaccatgttggccaggctggtctcaaactcctgacctcaagtgatccacccagccggctttttttcccccgatgtcgggtgatccagccgccgtggcgtcccaaagtgctgggattacaggcatgagccactgtgcccagcccaagtaggcaatttttaatccttgtttgaaaaacaagaccacttaagcttggagagggtaagaacctttctaaagtgacagagctagtaagtgcgtgccagggttagaatttgaataaaattttgtgtttttaaaaatagttctgctgacatagtctgctatggaacaaatactcatctagattttgtgcactttttgtttgtttgttttgagatggagtctcgctctgtcgcccaggctggagtgccgtggcacgatctcggctaactgcaagctccagctctcgggttcacgccattctcctgcctcagcctccggagtagctggggctacaggcacccaccaccatgcccggctaatttttttgtatttatttttagtagagaaggggtttcaccgcattagccaggatggtctcgatctcctgacctcgtcatctgcccgcctcggcctcccaacgtgctgggattacaggcgtgagccaccgcactcggccgattttgtgcttttatttatggcttcattgtgaaatttttgagagcccacgttatcttaatttttttcctttggataaatcatttatttacatggctgaaaacaatatgtaagaaaggcattcgtgcactgaaagagtctggcttccacccttttatcataccctctgctcttttacagataaccatttctattggtttccactgttactttatccaaaacaagaaacacttactatatatttttatattatcctttttttacatatagggtggtttactacacatgagcacccgtatattcaaaataaatggatttcaattaggtaaataatttctttttttatttatttggaataaaggttgatatgaatcactgattaatcttggactaatagctcttttcagttaggcaaatcttcctgtgacatttgactgacattattaatattttacaacttcaaaggacatcaaactataaaagtatcagtagggttcttaaattagttttactttaatatacactaattaaaatgtctactgttgcttttttaaagatttaaagatttttataatcttagtatgacctgatacacatatcagagttgtttagaaattttgagttgacatgttatggctacattggaataaggaagtattgcaagattcaactttagaactcattgatatattagcattaaatatttttccccaggacgtaaacacattagtatttttccttccaagcacagaaacttagaagtatattttgttaaaaacaaagcccagtttctttttttttataacttttttttttttttttggagacagtgtctcactctgtcacccaggctggagcacagtggcacaatctcagctctctgcaacttctgcttcctggtttcaagccattctcttgcctcaacctcctgagtagctgggattacaggtgcacaccaccaagtctggctaatttttgtatttttagtagagacggggtttcaccatgttggtcaggctggtctcaaactcctgacctcgtgatccacctgcttcagcctcccaaagtggtgggattacaggcgtgagccacagcgcctggtcaccaaagcccagtttctgaatagctacattcagtgttgagatcctgaatcattatttcagcatattctggggcatggctggcttcatggcctgtggatccctgcagtcaaacaaagccctgtgcttagaaggacctcatgtttggcctaatgcattgctatcactgtcttgaaattcttcttattttttgatcaaggagccccgcattttcattttgcactgggactagcaaattagataaagcccatcttgggatatgaaacatacatctatcctactatttatagtctttcacctgactttagtagtaacagaagctaacttactgaattatctttcttttatcccctactgatatagataataaggaaaatgaggggccgggggcggtggcttacacctgtattccaagcactttgggaggccaaggcaggtggatcacctgacatcaggagtttgggaccaggctggccaacatggtgaaaccccatctctactaaaaatacaaaaattagctgggcgtggtggcaggcgcctgtagtcccagctactccagaggctgaggtaggagaatcgcttgaacctgggaggtggaggttgcagtgagctgagatcgccccattgtactccagcctgagcaacgagtgaaactgaaaactaaaaactaaataaataaattaatctttaaaaaaaaaaagggggggccaggcgcagtagctcacgtctgtaatcccagcactttgagaggccaagtcgggtggatcacgaggtcaggagattgagaccatgctggttaacatggtgaaaccccatctctactaaaaatacaaaaaaattagctgggcgtggtggcaggtgcctgtagtcccagctactcaggaggctgaggcaggagaatggcatgaatccacgaggcagagcttgcagtgagccgagatcgcgccactgcactccaggctgggcgacagagcgagactccatctcaaaaaaaaaaaaggaaaaaagaaaagaaggcaacaaggtattctgtaacatttctttactatttaacaagaagccactatatttatgatttatttatctttatgttgcttcctacattcaaattatattataaattgtttacttttgacacttgaaatatttttcccagagatttatcttccttgacagttattttgtggattaattattctgagggtcttctaaagcatttaagtgtacttgattcataaattaagaaactcaactgggcatggtggctcatgcctgtgtaatcccagcactttgggagtctgtggcagsaggattgcttgagtctagggctttcagaccagactgggcaacatagggagacctcatctttacaaaaaataaaaaattagctgggcatgatggtgtgcacctgtggtcctagctacttgggaggctgcagtgggaggatcagttgagcctatgaggtcagggctgcagtgaactgtgatcttgccagtgcattccagcctgggcaacagagcaagatcttgtcacacacacaaaaaaaagaattcttagattatttcatcatacatacttagcctcctattacagtgttaagagatctagtttttagattcactaagacagaatgacaggaataagcattcacttaatttaaaggccatttcccccaattagttgatatttagtgcctgctgtaattatataagtaggtgacattaggttctgtaaactcaattctggatgtcttatgagaaagctagatgtcaagaagccaagaaactcacttctcaggaacaactactctaattcaaaattgactgagttcctacaatgtgctagtcagcatgtgtacgaccaaaaaccaagaaaatcctttcctggctgggcgaggtggctcatgtctgtaatcacaacactttcagtgtctgagatgagagaattacttgagtctaggagctcaagaccagcctaggcaacatagtgggacctcatctgtacaaaaaaattaaacaattagccaggcatggtggtatatgcctgtgatcccaactacttgggaggccgaggtggcagaatcatttgagcccagggggtcgaggctgcagtgagccaagatcatcccactgcactcctgcctgggtggcagagtgaggccatgtttcaaaagaaaaaaaaaatccggctgggtgcggtggctcacgcctgtaatcccagcactttgggaggccgaggcgggtggatcatgaggtcaggagatgaagaccatcctgkccaacatggtgaaaccccgtctctactaaaaatacaaaaattagctgggcatggtggtacgtgcctgtaatcccagctactcaggaggctgaggcacgaaaatagcttgaaccaggaagtcggaggttgcagtgagccaagatcatgccactgcactccagcctgggagacagagcaagactccctctttaaaaaagaagaagaagaagaaagaaggaagaaggaagaagaggaagaggaagaagaggagaagagaaggagaaggagaagaagaaagaagaagaaaagaagaagaagaagaagaagaagaagaagaagaagaagaagaagaagaagaagaagaagaagaagacggaaatcccttccacaagttcccatcgattctgctctctttctcatcccttgtgggttgcaatataggctgtccaagttgcctgcaaaatgtatagatgagaagagactttcttgatgcgtccagctgttttcacttttgaatgtggcagactatcagctttatcatgtaagagaaagtcaagtatcaaatagacttatagatccaacctccaagaaaaacaaaagcttttggaagagaaaaaggagaaatttgtagaaaagtttacattattatttctagtgttgtatttatgcaacaggtgagcagacagcttttgccaggatgttggctgcccgtgttgcacgaatttgattagctataatgaggattgcattagacgttttaactcactagaacaccatgttctatctgcctctccccctcctccaccctttaaataaaatcgaatcaaagtggatggttcccaaagcagctgatttactacaatatgtatttgtaggaggagctagaaaattaacctccctcaaagttttggaactctgctgttccaaaaagaacaaagaggaattgtctcccaaaataatgcatagaaacttcattcttctttcatcaaaataatgtttcctgttttagggcaagcattttcttcatgttggtacatttctaatcaaattcagccaagtatatcctcctgccaaaatagctttctagaaaagattacaagtagaagaggtgataactggaggaaatgagcagagttgatacacattacttaccaggaatgtatagaattgttgttaaagcaaagcatttagtttttagttcaaataagttcttactttgaataaacatatagatcacatctgaattcatatagtcttttcctttttgtaagtatacatcaaaatgacatacagaaaaactgctcaaattgataaaaaggcagcattaatgaaatgaacaaaaaataaccagtttatttactggaaaaagttatgcattacaccatattcagttggtaacataaaccgagatataagaatcgatatattggcttctggttattttcttagcactggagtgccttttccaaccattgagtgcatgatcagattacacaaatacaagcacatatcatgtgttctcccatgagacattattcacttaggattgtctacaataaaaaaagttaaagtacaagcaataataaattcataagaattttttgaatttaaaataaatgcatgtgtctttgagaacatttcttttgaaattcatatttttaaaaataacaagtttcttaaatcagtcttttagtcrtgttttcatatgstatttatcagtaggtggaaacacttcacatcatttaaccccaaaaggcataataattaaactgcaattaaatgtaggaacagttgaatcattacaacaataatacggtgtacaaatcagagttggccacacaatacacatgttaatactggaaagaaatacaatatcagaatcatggatggttcatcacataagcataatcatgcaaataaaaacagagtagattataaaaatgtcataagagattttcaaatagtaattgtttgactctcatagtcaaaccattgagctttaacattttgtgggaataatgttaaaatgatgtatttcctctaagactggctgcacaaatcatacctatgaacccaatgaktcattctgtatctccattatctatcattgaataattatttttaaataaaatgatatttccccttactttatagttctctcatctttgttttaaaatgactttttaaaaagaaaaacatatttacactaagaagcaccagatttacttctcggtgttttcattagagaacaatgattgaggaataattctgaaagaaaaaaagtaaaaaatgtgttctcaacaagtgttctacagcaattaaactccaatcacaggaataatctggctcagcagtttatccaggcttcagcttaaatagggcaaattttaaataactcgagaagggataaaaatacactgaggattagagccatgcagttcaatatggaaaggagactagatatagataacaatctccttactttcctaatggacagaagatcacagagaaatgagacttctatagtgttcatcttatgaatatgggaaagcttacatgatgtgaaataattcatgcaaacattttacattgcatatttctatgcactctcgcccttacactaaaggcagttaattgctcttcttcttcttaagtagaatattctggaaaattctcaattggggaacatgtcttaatactaaatatctctttcaattacactttgaataataaggacgaaagacatgtctagatgaaatctttcagctgtaaacataatacgatcaggttacaaaygcaatacattagggactatggcagttaagttcgcatataaataaagatgaacttaattttagacacaactcatccgagggcattattacagacaatggaaaatgtcactcgggagctagattgatcttgtagttccatagaagttgattttaaggtaaaaaagtacttgtcagtatcagcactgatcatgctctctgtcataacctatcataactccagttcaacagctttttgaagaattatgttccctttacttgaaaacatactcttgtacattttttgcagccttaaatataagggttacttaaaaatcactctagtttataaacaaacaaaaaaactggagggcaacctttttaaaattgtgaactttatcccataagtttctttcaaatttagtcctacttcctacctaccatatcaatgtatttgtggcagcctgagtttgaacccaccacagttccttactggaaatccatcagcttcccccaatgtctctgagggacagattgtaacttttggctgattgattatgacaattatacattaaaattgacactcatcccagaagaaaagatatttcatttcttccttttcatgttttgtgatctccatttgagacatgtagagaactttaattaatacagaatatcaagaaatctccacattcttaggttattggaccaatgtttcatgcttgtttcaaacagaagaacttatctgcacaaggatattttccaaagcacgaaaaaagcaaatgttgtagwctgaagatccttttaaataaagacgaaatctgaaatgtgtttgccccccactaagggattgcataccttctatttctgaagtattcctgaggacattgtttttttagactctgacaattgaatttttttagtaaaagtcctatattctgaacaattttaaagataccatggaatatagctgaaagaaaaaataataccaacratcatttttttccaacaaatatcttggaaaaataaagattgccatcctattttcaaatataaaatattttatgattaaccagtaaaattttaatgtattttaaaacttaaaataaaagaatcacaggattatgagctcccagaactgaaatgcattctcctatcttgccacttaatacttactagaccaccaatgatattcaatttttacaaaacaaatattctttatgattatcaatttccacgttaatttcccagtgttaaaaatctctttcctagagttactatacatccttcacactgaagccttttttattctagacttagtaacaatatctatagctgatatctatcatttgttaaatattcttttcttgaagactactattgtacctcctcttygttagactaaagtataatttctaaataggtcttttcttatttaacagttttcctttttctcaaagttctccaaattattttattagaatccagagttggatatatgaatgggatctaatggattatgtgtggaccagaaagattaagccaagctcctttatttatgccactcagcactcaggccaaagacaatttattgcttcttcttattttttgattaaggaaaatcctcaggagaaaagcatttctccatactattcaatattgtaattgtgcttacttttaaaaaactacctgtttactttgctaactacttttactagttagcattaatctttgctcactctgtttgcaataattagccagtattttttagtgcatttctgctgtttatttttcctctccaagtatgtcttcaattagtcttactggagttcattctttttggttctcactagttctgccccttttcaatttccttttgaattcctgatgttatctttacagatactgatttttatcaacactacacatactgattcactttaaatgcctataaataaatatggctcagtgtaaactatactaaatgatgccacagtgtaaatacatggtattctctcttactgcttagggactatcacttaattttgtgctgaaaatgagaaatttatttccaagtttctataacttcttggcaaagattcactaaaattattattttcatagaattagtatttcagaaaaagactttcccactctatgaagataaataactgaaatgaaactagtttataatagacgtaataatacactttgtattggaagaaatgttttgtgggtgacccggcttttcatggagtcctagattcagagttagggataaagaatgcaaatacaacattgccgactggcaatactgccccgtcatcacacacagacaatacttcctgctgaactcccagtcccaccaaacaaaaccgatgagacgatctasgaacatgttctgaggtactttttaaaaaggcatatatttccctcaggcacaaacagttttttattaaaagtcaacttagcagctatgccacttctcaggtccaaatacgtggtgcttgagaaagggggaaaaataaaaaacacaaagtgagggcaggggtaagctttctttcattgaactctgataaaatccacagtctcactaatactggtactaggcagatacaacgccagtgaaatgaagacaatgtttaggaacagcaaggccatgcaggtagaaaagagcagaaggttaggctgctatggttgggaacttcatgtcgaatcgttttgtttctgtttctgtactttaacctgaacccttattttggtgaagatttcaactctttactccacgttgcataataaatgacactgtggaaaatagcactcatataaagaacacaaaacgtcctggttgctttggtaatagcgaccactacttaataggcgtatgactaacgaaagctcctgcaatgtgctttacgacttaccatttggtctctgatggaccactccatttctgtgccacccatgtccgctcaataagctgagtggctcctggatctcctttctcagtgccctacactggtaactgtcctttgtgttaacagtgagggtcatttttgttttgaagagaagttacagatgtctttatatgaaaaggtcaaacccttatggttttaaataagttaaggctacctgacaaagacaaggaatcagggctaggagcaattgtgtgggcagcacttgatggttaaggagcccgagagtgttagacctttcagctcagttagctgttttccttgtttgtcagattatgtgcaaaataaattttgctatgaaaatccactgccttaaatcaagtcataaaagttacccagcagaatctgtaaattaaccaggaacatgtattatctcaagataatagaatgtttgtaggcacctgagtgtttgtcaaaagtagacaatgagctaaggtttattatctattgtttttttggcaaggaagattcgttatgaaaaaaactaacaacaacaaaacatacaattttaatcaaactttgaacactctctgggtaaattaattaattaaaggctatcttacatctatatatgtatatattttcccatttgtacttgataccttttatcaggaaagactcagtaggaccctgattttgggagaagtaaaaaaaattctggtcattaaataaacacaccatttttttcccttcaagttaytgagccttctttaacgttatcacacacatacacacatacaaaggagcagcaccagtacatctactcaactgcaatgaaaaaataaaagtaaagatgccatcaaaacttgaataagtcaataaatcataacttagtctctttcttagatttacttagtaatgtccagtgaagaactctagttaaaaatacaaaaacaaaacccagcagttaatgagctactgattagaaagtaagtgcmtaaacaataccagcgtagcagcaaaatacagttattgttaacattctgatgcacctcatttatcattttgtgcaagaaaaatgaccacagtctggccaattccagatttcaaactaaattcaaactcatacttaattgagcaaattatgcttatttgaaaataaatgaattaaattcacctcagagaaattatttgtatagacataaatcatgtagcaaataaagtacaaaataaatatcaatgacaaacatattggaatcaacttccctagctgaatttggagtgtgaggaaagatgatactgcaatatacgtattttacatgtcttaggtctctcttatgctatcgaggtaaagccagccatctgagacacgttttctgtttcttttttyttttttttaaatttaaatgaactgtagccatttgatggcagaagtttatctgtgactcagagaaaccacaaaatgttttatcacatcagggtctgtgcttcgtgttcttctcaactttctctcgtcttccaaaacgatggacattaatccaattgtacatctaacaaccgagaagaaaacacccgctggatcttgggcagtatcctgtgtgtggctacaaaacttccaccccagatgttygtccacaggagatgaagactaggggtgaggaggcttggagagacagtggagaggggcgcactgggagctggaatgtggctgctcctcagggagagctgtgtcaggactggaaaggagaaacaagcacgtcagcaagaaacacatttcaaagggccaggcacaatggtaggggttagacgagatatttttgcatasattttgagaacaagaacagaaatctgcacagtaaatggtttccatctaaagcatgccaagataatggtagcttttcaaaacaaggcataaaaaagaaaaatgaaatgtattaaggaaatgatatatgmactcttccctcaaagtcactcttctcttttcttgttttccctattttcttgcccccagcattttacagaagttcttctcaatttttgcacggtcttgttctcctaggtctctgtgttagctgtaagatttcatgagatcagttcttttcaaactttaatatgcatgcaaattacctggggagctcagtataaagggcagattcggattcattaggtgtggggtgagatctgagattctacatttttaatgagctcccagtgatgctgatggtactgacaggttgaccaaggctttggagtttagaggattctatagttatctggtagatccagattcactaggataaagaatttgcctgtggaagtctaatttgctctaagaattccccctacctgcttgggcttggaggtataaggaagagttttatatttcaccccccccccttttttttttagatggagtctcgttgttttgcccaggctggtgtgcagtggctccatctcagctcactgcagcctccgcctcccgagttcaagcgattctcctgcctcagcctcccgagcagctgggattacatgcatgcactaccatgccctgccaatttttgtattttcagtagtgatggggttttgctatgttggccaggctggtctcgaactcctgacctctggtgatccacctgcctcggcctccccaagtgttgggattacaggcgtgagccaccgagcccagcctaacatttcccatttgttaagtgtataatgtaactttccaaacgacgcctgtgatagcctctagtttaaatgaacctgtgctcaggcctatcagggtctggatgaataatcttgaagaataaagaagcaaaatcattgagtttcctagggtaaaatgacaaaacacatttgggtttgggccttttaaaatttgactagcggccgggcgcggtggctcacacctgtaatcccagcactttgggaggccaaggcaggaggattatgaggtcaagagattgagaccatcctggccaacatggtgaaaccctgtctctactaaaaatacaaaaaaaaaattagctgggtatggtggcgtgtgcctgtagtcccagctattcgggaggctgaggcaggagaatcacttgaacatgggaggcagaggttgcagcgagccaagatggcgccactgtactccagtttggcaacagggcgagactccgtctcaaaaaaaaaaaaaaaatgtgactagcaatgggggaatcacaacatggagatttgtttttttaattagaaaagagtatttttctaaaactctgttatattcccttaaactatgaaagtcagtactatataattcatttctaccagaagtgatgtttgagagaacaattcaaggctcattattactattaatttaagcatagctttttaaagctaattaaaattagctttaaatttaatggagtttaaaatgtaatggagtcattaaaattagtattaaataatttttatctttggtactgaaattatcctctacctatatctcttgcattttaatacaaaatcataattatggaaaatatctgactggcttgaggttattctttcttcccaaactctttgaagtgctgtaaatatagtttaaaagaagctttgctgttctgtactggttaagacaagcagtgataaaaattgtttttcctacctatttttaaaatgtggtatgtaaacatgggagaactggaccttcaacaaaaagcctaagaaaatagtgcatagtttcatttgtaaatttttttgatatggaatctcactgtcgcccaggcaggagtgcagtggcacgatctcggctcactgcaacctctgcctcctgggttcaagcaattctcctgcttcagcctcccgagtagctgggattacaagggcccaccaccgcgtccggctaattttttgtatttttagtagagacggactttcaccattttggccaggctggtctcgaactcctgacttcaagtgatctgcccrcctcggcctctcaaagtgctgagattacacacacgagccaccgtgcccggcctcatttataaattggaaaataagcctgggcgcggtggcgcacgcctgtaatcccagcacttcaggaggccaaggcgggcggatcatgagctcaggagatagagaccatcctggccaacatggtgaaaccccgtctctactaaaaataattaaaaaaaaaaattagctgggcgtggtggcgggcgcctgtagtcccagctactccggaggctgaggtaggagaatggcgtgaacccgggaggcggagcttgcagtgagccgagatcgcgccattgcactccagcctggacgacagagcgagactccgtctcaaaaaaaaaaaaaaaaaaaaaaaaaggaaaataaatgaagaaaatcttaggccaagcatagtggctcacgcctgcaatcccagcactttgggaggccgaggcaggcggatcacctgtggttgggagttcaagaccatcctgaccaacatggagaaaccctgtctctactaaaaatacaaaaaaaaaaaaaaaaaaaaaaattagccgggcgtggtggcacatgcctgtaatcccagctactcaggaggctgaggcaggagaatcgcttgaacccgggaggcagacgttgcggtgagctgagatcacgccattgcactccagcctgggtaacaagagcaaaactccgtctcaaaaaaaaaaaaaaaagaagaaagaaaagaaaatatttaaaacagaaaataatgtatggcaagattcacacttgaccctccaaacagagtttgacggcctggtaaacagcaggttataggccagactttcccatcgacctaacagtttttctgcaaatatgcatgacttagactgctgacttccacagcacatatagtaaaaaaaactccaattttactatacgtgctgtggaagtcagcaccagaactaatttctttttagggaactaaacatattatgcaatgtgatttatggcaagtaatgcagaatcgtcacattacacaagaaagatatggcttttttttcttttcttttcttttctttttttttttgagcagaatctcactttgtcrcccaggctggagtgcagtggcacgatcccagctcactgcaacctctgcctcccaggttcaagcaattctagtgcctcagcctcctgagtagctgggattacaggcctgcgccaccacacctggctaatttttgtatttttagtagagacagagtttcaccatgttgcccaggctggtctcgaactcctgacctcaagtgatcagcctgcctctgcttcccaaagcgcaaggattacaggcatgagccactgtgtccacccaagaaagatatgtttttgaagaccttgtgtaatccartacttttttttttttttgagacagtctcaaactgtcgcccagcctggagtgcactggcgcratcttggctcactgccacctccaccttccgggttcaagtgattctcctgtctcagcctcccgagtagctgggactacaggcacatgccacaacacctggctaattttttgtatttttttttttttagtagagacggggtttcactgtgttagccatgacagtctygawctcctgaccttgtgatccacccgcctcrgcctcccaaagtgttgggattacaggcgtgagccgctgcacctggccccaatactctttttgawaaaggaagacaaatatttcttcctgaccagctgaagtgtgtagctatagcttaaatatgggttacaactcactttgcctaacaccttgacattacatcattcgtgatgatttaaatttttttcattcctttagatagatttcttacataaagttattatctatagtattaatatttttaatttgcataaaatgctgcaatcacatggtgtatattatgtgtaaattaacctgtaagacacacattcttggcttacaggttaagatactatttcttggatataaatatttgataaattataatcatttaaggcatagaatgaattcagtttcagttgtgattgctaaatattttcaagagtccacttgttattcaacatttaccattgattttactttacataggtagatcatgttgtaaatggcaagtttaggaagctgttactaagatataaaattggatacatcttcaggaagtttctttttttttcccaagtagaaaactacttgatagaagggaagtgctaaataccaaacaactctatatatttcaatattatatccaaggctatataccttgggcattcctttcatattataatacctattatctataaacaattttgataatttagctctacaatggaattagcctgtaaaaagtatacatggaaaagttctactttttttctgtttttggagacagggtcctcttctgccacccaggccggagcgcagtggcacaatctcggctcactgctgccttgaactcctaggctgaaacgatcctcccaccgcagcctcctgagtagctgggactacagatgcaggccaccatgcctaattcttgtattttgttttaaaggacagggtttcaccaagttgcctaggctgatctagaaatcctgggctcaagcaatcttcccacctcagccttccaaagtgctgggactacagaggtgagtcaccatgtccggctgaaaagttctacattgttaaaggtgagaaaatgctcttttattaaaaaatcattcaccttaaaagctgtttgaatatatgtataaaccgagggaagtacaaaataattttttttttaagatggagtctcactctgttgcccaagctggagttgtccaagcgtgatcttggttcactgcaacctccgcctccctgttccaagtgattctcctgcctcagcctcctgaggagctgggattacaggtgcctgccaccatgcctggctaatttctgtatttttagtagagatgccgtttcaccatattggccaggctggtctcgaactcctgacctcaggtgatctgcccaccttggcctcccaaagtgctgggattacaggcatgagccactgggcccagcactcaaaatcatttttcaaaatgagaaacagaacacctgatgtgaaataactcaacattcttagcacatcttctgtttctcattaaacaaacattcctcttcagtttgagggaaaaggaatcatggtgggtgatttacatactctgactttgctcctcacagtgtaactgaaatagatttctcctctgcagtgcagccacctgtggtggtaggtaggagtcactaggctcagttgtgttcaggatatgtgaccttgaacaagtcattttaccttcccaaacctcaatttcgtcacataaaaatgggtgtaagaccaggtgtggtggctcatgcttgtaaccccagtactttaggaggctgaggcaggcagatcactggaggtcaggagttcaagggcagcctggccaacatggtgaaaccctgtctctactaaaaatacaaaaattagctgggtgtggtggcasacacctgtaatcccagctactcgggtggctgaggcagaagaattgcttgaacccaggaggtggaggtgccagtgagccaagatcacgccactgcactccagcctgggcaacagagggagactctgtctcaaacaaaaacaaaaacaaacaaaaaaacgccaaaaaactaaaccaaacaaacaaaaacaacaacaaaaatgggtgtaataactgtgcttatcccttatggaaggctgtaatgtttaatatgtgtaaagaaatgaacccttgtctggtttatactaagaattcgaatgttggctatgtgttaacttttctgccaagaaggagtaaaaagggcaatgaaggtattaacattgacccatttggcagtgtgtatgggtgggaaaagagtcagtcatcatcccagcaattttggaaaagagtcttttcagatctatatgcatttaatcatttctttacgtagaccacgatggggaacagtagtagaattgggctctagaccaggctgtattcatgtgggtagaaactggaaacatttgagaagctggaaatgtttgtaattcattaaattgcttttctttaaagtaaatcatccctgtggtagtagtaagcaacctaaatttattaatctcagaacagatggaactagactacataattgtttagtcaaactggttctcaaaaaacaagcaaggtggaaaaaaaaaagttaaaaaaatctcctgccagcctttccatttcctacttaatggaaacacttcaagcagtagtcttctgaggcaggaaggttgctcgagcccagggttcaagtccagtttgggcaacatagccagacccaatctctgaagcaaacaaaacagcagcccgctccacgctttcttcagcaaattagagaggttaagagattgcagatctttgtcttgaggaatggtaagatactaaaaaagtattgataacagatactgagcagacactccaagccaggagcgtgcctcgctgaattccctcagtatctattgtcatctgaactttacaagtgaagaaatggaatcttagccagcaaaagaaattttycaaagttaaacaaccagtgggtattagaagtgggaattcaacccaagcaatctgattccagagctcattcactctctcaggtataatcaatatttagtgcacagctgtcatgtgcccagcactgacccaggccttgsggtaagggctgggggtgcttggtggagaatggactgtaggtgaagagccctgttcttaaccgctacaaattcagaatcccactgagacgagtttgaatatttatattgttacttatataattgagataaatctataattacattatttcttttttttttttcttttttgctctgtcgccaggckgtaatgcagtggcgtgatctcagctcactgcaacctccgcctcccaggttcaagtgattctcctgcctcagcctcccgagaacctgagattacaggcgcacatcaccatgcccagctaatttttgtatttttagtagagacggggtttcaccatgttggccaaggtggtctcgatctcttgacctygtgatccaccggccttggcctcccaaagtgctgggattacaggcctgcgccaccacgcctgacctatcattattatttctaaccgaaattagtgctgttgtaaaatggcattagcgaaaaacctttcttaaagccctgttgctgaaggtggtgggaacaatcaactaacacacaccaattggaaactgctggctagcaacctattttataatgtatttttctttttatttatttatttgttttttgagacagggtctcactctgttacccaggctggagtgcagtgatgcaatcacagcttgctrcagtcttgacctcccgagctcaagtgaccctccaacctcagcttcccaaatagctgggactacagccatgtgccattatacctggctaatttaaaaaaaaaaaaatttggtagaggtcgggggtggaggtctccctgtgttccccaggctggtcttgaagttctgggttcaagccatcctcccgcctcagcctcccaaactgctgggattacaggcgtaagccaccacacctggccaataatgtacctttctgtgctaactcaatgttccactgatacagctggctgcacaaccgcctctgagaccatgtgacacttgggcttcagctgccactgtgtttccacacttgtggcaccccaggtcccctggctctgacccctgaccacatgtagcttgctactgacatctactcctcagacacacatggaaagtgtttgggcctgcccctgctcaaaagaagccttcccctggtagaagggcaacagctgtgataaggagagaacactgagcagatgatgaaaaccacaaccrgactactgaggtctggcaccatcagaggccaggtggctggagatgaagcattccaggatggaggtgaggtcctgatggaacgctgagaygctgtgtggaggttcaccaggatggagggcaattcatgactgatttggaaagctttcctttggaatcggaattgtcagcaaactctccagttcagtgttcaggactgtgcaaacctgttttaacaatttttcaagtaatctcacataaaggtcactgtcacagcaaatattatcttttgaatgctaactacaatgtttttctccacctttcaaattcagttttaccaaggctactgagtggacagagaacagaaacacagaaacacttttatacagctgttctatctgtctgtctatctatctatttatctagagacagggtcttgctctgttacccaggctggagtgcaktgatgtgattttactcactgtaaccacaaattcatggactcaagcaatcctcctgcctcagcctcccaaagtgctgagattaccagcatgagccactgcacccagcctttatatctaattctttatattcttcctgtttgttggcctgagatatatattttttaattttttatttttttttagatggaatctctctctgtcacctaggctggagtgcagtggcaccagctcagctcactgcaacctccacctcctgggttcaagtgattctcctgcctcagcctcctgagtaggtgggattagaggcatgtgccaccacacccagctaatttttgtatttttagtagagacggggtttcaccatgttgcccaggctggtctcaaactcctgacctcaggtaatccctctgcctcggccttccacagtgctgggattacgggtgtgagccatcatgcctggcctatttaaacactttaagttttattttactgtgttttttgttttgttttgttttttagcaacaggttcttactcaccaggcaggtgtgcagtggtatcatagctcgctgcagccttgaactcccaggctcaagcgattgatcctcctacctcagcctcctgagtagcggggattttatttttttaaattgacaaataataattgtacatattcatggagtatatagtgatgttttaatacatataaagtacaggaatcaaatcaggtcaattagtatattggtatccctcagattccscaggaaaataaatatattttaaagacaaaagaaaataaaaagtaggacaaacatcataacaattccagcttttattttttggaaaggaatgaaacagtggactaatccaagtatttacacagacaaaggggctgaaggcagcctgtagagtctaccagctggcagccagcaaaataaaccccagctctcttgtattcctactgggaacgcagggactgcaggtgtccaatgtgtgtctatgtagcccacacttgaaataaaatacagcaaaatacaatgatgcgtaggcagttcaggtgtcggaaaggggagctggggtctatggatctgacatgcagctgggtggaagggaaaggacatctgaatttacctgacagttgggcagtcttgcctcccggctagttgtgagcactgtggcggtacggaggcagcaggctgctgacaatctacaagaaactgataaattagacatgtgtacaaagagatgacagagcaaggtgttagtaacagtgactaaagcagctgcctgagagatttagtgaggaatgtgcattcacacagaaatatcctgattcagctttttttttttcttcttgaatgatgccaatagaaaagacaggctttttttttttcttaaatacagtattaaaaaattagtgacacagcattagtagcgagatttctcaagtacattaggatatatgtggccatttgtctttggtattttgttatatctaaaaataaagggtctattaatataatgaaagatcttccaattctaaacctgaatgtggtggtggttacttgcttagcacttagatctcttattccaaaatggaacgcattcagataactgactttactatcaggacacatggacatattgtcagtcccataggtaacttgagaaaagtgtgcaatataatcttttctatgattagtagaatcttaattaaacaaggaaataatctttacagttttctgaaaattgattttatatattgacaatagaattgttggcagaaatcttagaatgtctattacatagtaaattgttagtgacttggactagaaagctaacctgaatgagaactccactttrtaattgtttttaccattttaaagtcacaatataacacactaggttaataaagtgctagctagtaaaaatcaagctttagctgggttaatcatctactccaagaaagtagtgcctggtgttctaaaaaaaaatcaaagagcagtctgtttactggtactaggtgactatattagaatcatgcaagaagctggttagaaatgcatatacgtcatatttctccaaaaagatttttgcaaacaagttaaaattggaattaaacttaaaaattattcttaaataattgaagcatttcctcttgccaactgcttagactgtatttgcttagcaaatccctttccttatatgtgtttgtttgtttgtttatttgagacagagttttgctcttgttgcccaggctggagtgcaatggtgcaatctcagctcactgcaacctccgcctcctgggttcaggcgattctcctgcctcagcctcccgaggtgattctcctgcctcagcctcccaaggagcagggattacaggcatgtgccaccacacccggctaattttgtatttttagtagagacagggtttcaccatattggtcaggctggtcttgaactcctgacctcaggtgatccacctgcctcggcctcccaaagtgctgggattacaggcgtgagccactgcacccggcctccttatatgttatgtaaataatatttaatccacattatcacaaagtctggatttatagccttaacgaggctctactgatatttacatttgaagtcttctatttaagtatcactgttatattctgttataaaaaagcctgcctatatagttacataactccagaatttaaaattcgaaaaaactgctgatgcttttccagaaatacactaaaactgtttgtgatgcaaagtagaatacaatataaggcaggcttgatttttgttcactcaagaaaacattactgaaggaacccttttatatggtggtctttgttgccatcttattaattagcgcatcttaataggaacaaggagatctgatttttgtttagtagctggtgttcggatgatcatactcagtaaaaatctttcaaatataacaaatctgttttctcagattgaggaaattccttttttaactccgttttcccattttgcagcattgattagctccagattcccttttgtagaaactcagagtcttaaggaatgcattcttttgtcttttaaaaatctttgctccttttgtcttctccaacagctttcctgcctatctgagtggtaatttaggaatgtcttagactaatttgacaactattttgataaggccaccagacaggcagttaagtcaaccaggtgtgtgctgccctccgatggtgtatttgggtaaatgcaatggatgtaaaaaccactctggattccttatgtcttacattgccagggaggtataatgaaactcttctaaagcagagtagtggcctctgtggaatagcgatccttagaattagagtaactagagtattaaaatggcttacatcttttaaaaatatctcatatatttgactttgttttgccaatacagtcacagattattattcattcaaaatataatttatggtaaaattcagacagcaggtgatcagaaccacagtgtactcccttaatgaaatgctagagaggtggtagacattcttcttatttgtagtgaatatcactttttccttcattagaagtaacatcatctctggctaatatttattttttattttattttatttttgagacaagagttttgctcttgttgcccaggctggagtgcaatggcacaatctcggctcactgcaatctccgcctcctgggttcatgcaattctcctgcctcagcctcccgagtagttgggattacaagcgtgcgccaccacgcccagctaattgtttgtatttttagtagagacggggtttcaccrtgttaaccaggctggtctctaactcctgacttygggtgatccacccaccttggcctctcagagtgctgggattacaggtgtgagccactgcactcggcctatttatttagtttttgagacaggatgtcatgctgttgcctaggtgsctatcatagctcacttcagcatccaacgcctgggctcaagtgatcctcctgcytcagcctcttgagtagctgggaccacaggcacacaccaccacaccctgctaattttttaaatttttgtagagacaggttctagctattttgcctaggctggtcttgaactccgggcctcaagcagtcttcctgcctcggcctcccaagatgtggggattgtaggtgtgagccactgctcctagccaagctaatgatgattatttttcatttattatttataagcacttagctacgtgttatccttaaagaataaaaaacaaatttcatagataaaatggtgatggacttaaaaaattaaactaaaatgtagctacattgctctgactcagttgtcttctaaatccctcttctcgggtctacagccctccagttgtgtcaattgtagcctggctgagccacggatgtgtcttaggatgtactttgtaaaatgaaggaggtaggttgggaggctgaggaagtcccttgtagctctgagatgctgcaggctctgagtgatctcccctgctccgtctaggatctattctgctaggctcacccttgaaggaactagaccacatctcgttgctttggggggaataaaagatgacaactatgtgcatgaaggagcaggcattgtagaacccacaaagccattgctgttgtttggccaccagggtttgtctaaaccattcaacagtcaagttactaaactcctattttgtgtcagaaactgtgttaggcagcagggggaaaaaggtgaacagagaaaatgtggtctctgttttatcaaggaagataagcatatttartaagcaactacattgaagtgtgatggtgatggtgatgatggtggtgatggtgatggtgatgatgacagcatctagtacttatttattgtttacgatgtctcaggcactgtataggcacttaatatacatgctcttctataaccctgttttattaatctcacttcatctataaggaaaggggaacttaggttaagtaacttgacaaactccactaggaggtagaggtgcaatttgaatccaggattgtatggtccaagggctgagctgaacttgcagaagtatcactgtattgcctcctatgatagggaaagtgtagggtgttacaggacctcacagcggaagttaattaaattaaattagactgaatctaactaatcaaacataactaaatctaactaaccaaacacaactaaatctaagtggttagggagtgcttcctggaggttgtgatatctaggctgacatctaacataatgagttagtcaaataacttctttgtaactacaaactttttatggtctttagtaacagtaataagacattttatcataaaattaaagtgtttatttgaaatgatcagaatggaattagaaaatgctgtacgtttatatgataaggccacaggcttgggaaatgtcatagcatactcaagagattatttatgtattttttttagaggccaggtcttgctatgtcgctcaggctgtaatgcagtgagttcaagtaatcctcctgcctcaatctcctgagtagatgggactacaagtgtgtacactgtgcctggctcaagagattactaatgcctccagggcagggatgaatatggaatattatagctcaaagcatctataggtctgtctcgatatgcacaagaagagtacccttgtatgacattcctccataaacaagggcctcacgtagaagggaagatagaaaagaaagggagaaataagagaggaaaatatttgctgaatcaacatgatgtaatctttcctataaactttacatttgttatctgttttaagagacagggtctcttaaagcctggtcttgaactcctgggctcatgtgatgctcccacttcagcctctaaaatagctgggtcgacaggcttgcactattcctacattgaggaaaataagtgtttttgataatatgggagaatatcatagtctcacatatttttttctttaacttctttttaaaatctctcctgctagaaacaaacacagaatttgccatcacagtaggtgtcctacaagcctccaytgattaatccaagctcagcatgtgtattaacttgcccaaggtcacacagttaggaagtggcggaacaaggatttaaatttagtctttttaatgctaaggcctcttttctattcactcctctggatgcttctcaaattgacaccagctacctctagaaaatatcagggtcatagagtcaaagaaacagaaggaactttgccagagatttgagatactgattttaaggcaaccagcgctctcaaaaatacaaagcaaaatgaagggtacaggaatgaagataatattgtttttaaaaagaggtggctgaaaataatacatttcattggcagagagagaaagttttgctgtgtggctttctctcgggcttctattatttataaaattttcaatgcaatttagaaaactaaccaattttctttttttttctttgagacagagtttcgctcttgttgcccaggctggagtgcaatggcatgatctcagctcactgcaacctccgcctcgcgggttcaagcaattctcctgcctcagcctcccaagtagctgggattacaggcatgcaccaccaygcccggccaatttttataattttagtagagatggggtatcgccatgttggccaggctggtctcaaactcctgacctcaggtgatctgcctgcctcggcctcccaaagtgctgggattataggcgtgagccactgcgcccagccaaactacccaattttctaaaagtcaatgccttagggagtccaggagcccactggtggctgtttgggatgggaaggaacagctcatgtaggagacaaggaacacttctatgttttggctccacacctggcccagatggcagcagtgggcactggtgagcaccatgtgagtgaaagcccatctgtggagaccaaacccagccacgatgagtagtgaggctgcagaggtggcttctttgggcccaagtgctctggggcaggcacagcagcaactctttgtggcaaacagtctcctgtagcatcgcttgactccacctcctcattttcctgacttgagaactaatgcatccctactttttcacaagatcgtattttccacaccacatctctttccctcatgaccataaacaacctccggatgctccacgtgttcccatgaaaactatctctgtcctctgagttctcctcaggccaagtatccaagttcttcctttttttcttatctttctttcttttttttttttttttgagatggagtctcgctctgttgcccaggctggagtgaagtgacgtgatcttggctcattgcaaactccacttcccaggtttaagtgactcttgtgttacagcctccagagtagctgggattacaggcatgtgctgccatgcctggctaatttttgtatgtttrgtggagatggggtttcaccatggccaggctggtctcgaactcctggcctcaaatgatctacccgccccggcctctgaaagtgctggaattataggtgtgagccatcaggcccaaccccatttcttccttttaagacrtgatgtcaatttccctcactcgtctccttgctctctgaccttgttccggtttgtgcacatccttctaaaaaygaggtgataagaaaggaaatcatgtgtggtaagatatgcccagtgaagagtacagtggcactgtcttgtcttatctgagacatcccagtcctattaaaacagcagaaacctcatggcatttttgggcagccacatcacactgctatttccattgagctttgtttacaggtagtgctataaagtcatttttcctccatcttacagtgcttggaattccagcacaatawttcatatccatttaaactttatgtttaaaatacatgtgaaatatttcgcctcttcctatctgatgaatattttggatcctattccrtcatttagcatttatttctctcttaaatcagaaaatatgagaatcatgacctcgatagctttatgtaagattagcaattaataataaggtcaggctaagtgaagaccatatttcataaatataagtcaatgaatttggaccctttgcacatatcattcaattagttatgagtctacacaattatattatcctctagaattgatttctctatttgtctcaagaatattaaaaaaaaatgcctggttaattgcttgcccaagttcagacacattattttaccatttccctggtcttatgagatagagaatgtgggtagtccagttcaagtcattcttgatgaactcacactggcttttaacaatccccattctatagagagcatttgtaattcatccatttccagaaatttgccgaggatgaggcaaagtttgttggtctacagtttagagaaacttttcttttccaccgtgtaaaaactatatttctacatttcttcttctgacatatataggtattaatcctcttacttaaatattctctttctccttaggcacctcttcctctatctttcataagttcatgatttttcagtctctttccttcaacaagtgagaaaaaaagggacgtgtgctttcttcttttcctttcctgttttgaaaatgggcaactcatatattcttttttttttttgagatggagtctcactctgtcgcacaggctggagtgcagtggtgtgatctcggcaagctccccctcctgggttcacaccattctcctgcctcagcctcccgagtagctgggactacaggcacccaccaccacgcctggctaattttttgtatttttagtagagacggggtttcaccgtgttagccaggatggtctcgatcccctgacctcgtgatctgcctgcctcggcctcccaaagtgctgggattacaggtgtgagccattgcgcccagcccacatactcatatccttaaaaataggcaggagaaatggaagttgatgatataaggaacacacacgcctcttgatgagactcttagttattatctttgctaacttgctgtattcttcccaagactgtctataaaaaaggtttaataaatttctttgaacaattgctatcatagaacatgctgctattatctatttgaaagtaaatagatttaaatagataccactgctatggtttgaatatcccctccaaaattcatgttgatacttaatctccaatgtggcagtattgaaaggtggaactttttaagaggtgattgsatcataaaggtctgctctcatgaatggataaatccattcatggattaatggattcatgggttaatggattcatgggttatgatgggagtgaaattggtggctctataagaggaagacagacctgacttagcatgtacagcccccttgccatgtgatgccctgcaccactttgggactctgcagagtccccaccagcaagaaggctctcaccgtgaccttggacttctcagcctccataactgcaaatgacaaattccttttctttataaatcacccagtttcaagtattctgttataaggaacagaaaatggactaagacaaccactttagaccaaaaatcttataaacttggagtaaacagtcaatattcattaaagacctttcaataagaacagatgattaacagttagtagaaaagcaagaacatttaattttgaaagctgttaagtaggaaattgacagagagttatagattgtcctaaaatcaacacgccatggttaatgatcaaagcacagagacatcctcttttagtccttatgggagggaaaaggatatctctctttcttctttctgcaaacctggccatgttctttcaaactattcattaatagggattttaggcaatgacagaaaaggaagagcgggcagaagaaatgtagaagaaagaaggatgagaaataatggtaatatgtaatgcttataaaaagtgctatatatatatatttgcagacaatttgcatgcaaaagctcttgaatccttgtaaaaactctatgagatacattttatttttgtttagaaatgagaaactaagtttatgcaaggtcactttctgtattacttttttttctgaggtggagtctcactctgtcgccaggctggagtgcagtggtgcaatctcggctcactgcaacctccgcctcccgggttcaagtgattctcctgcctcagcctcctaagtagctgggactacaggcatgcaccaccacgcccagttaacttttgtatttttagtagagacggggtttcgccatgttggccaggatggtctccatctcttgacctcgtgatccgcctgcctcagcctcccaaagtgctgggattacaggcgtgagccactgtgcctggcctctgtatggcttttataatgaacaaaagctttttagtgcctagaaaactcaagtgagtccaggcgcagtggctcatgcctgtaatcccagcactttgggaaactgaggctggcagatagcttcagttcaggagttcaagaccagcctggccaacatggtgaaaactcatctctactaaattaacaaaaattagctgggcatggtagggcgtgcctgtagtcccagctacttgggaagctgagccatgagaactcttgaacccgggaggtggaggttgcagtgagctgagatcacaccactgcactccagcctgagcaacagagcgagactctgtctcaaaaacaaacaaacaaaccaaactcaactgagattggtagtcataatgcccattttacagattagaacactgaggatcagaagggttaagtgattttcttagggcccatggagagagtggcagagtgagaacttgtgcccaggtttctgactgtccacccacgccctttcagtggaatggcccatgatgttatagactgaattgtgttcccctaaattcatatattgaagccctaactctcagaaccttagaatgcaactgtatttgaagacaggacctttacaagaggtgactaaattaaagtgacactgttagagttggccctaatccaatctgattggtgtccttgtaaagaagagaggattaatacatgcagagagacaccagggatgcagtgcacagagatgcgaggacagtgagaaggtggccttctgcaatccaaggacggagacctcaggagaaaacagacctgcggacaccttgattttgaacttcgggcctccagaactgtgagaaaattaacttctgttgtttaaggcatccagtctgtggtcattcrtgatggaagccccagcagactaacacagcctttgatacttgctccaaagtagaagcagttagtgctccttcttactctgccgagagtacttcttcagtctaaataaaccaagaacagcccaaattctctcaaattattcaaaaytaagcaatccaagagttgaattaaaaagttttaattcaaggaaactcaaaatgaaaaagatatatacgaaaggcaagaagcacaaattaagaaggataatctggggctgggtgtggttgctcatgcctgtaatcccagcactttaggaggccaaggtgggtggaccacctgaggtcaggagttcgagaccagcctggccaacatggtgaaaccccatttctactaaaaatacaaaaaattatccgggcgtggtggcgtgcgcctgtaatcccagctactcaggaggctgaggcagaagaattgcttgaacccggggggtggaggttgcaatgagccgagatcgcgccatcacactccagcttgggcaacaagagcgaaactccatcaaaaaaaaaaaaaaaaaagcaggagaatctgcattcgaatttagcagattccttcttagcaaaagcactatagacagaagtgtgaaagtggtcaaaacagtggtactgggggaaactaaactgacgggagtggaatgtcagttgtgttagtagaaaatataaatgtccatatactgtgcactgacgtggagatagaaaagttgcacagttataraagtttcccacacccaggaattctgataatagcacaaaggtgctctccataatcagttactaacacacttagatgcactggagtcttaagtgagggtacatcacaataatttccttgcatttgccaatgatgcttctgcagccatttcctatggcatctcagctttcttctttcttttttttttgagatggagtctcactctgtcacccaggctggagtgcagtagtgtgctctcggctcattgcaacctctgcttcccgggttcaggcgatcctcccacctcagcctccccagtgccactacgcccagctaattttttaaaacttttgtagagacagggttttgccatgttgccaaggctgctcttgaactcctgcactcaaacgatccgctcgcctcagcctcccaaagcgctgggattacaggcatgagccaccgcgcctggccctctttattctctattctctctcctctgtgctcttcagctcttctccatttcagcatgaaatttagagtccatcagaaagatctctgtctctcttttagataccagttccaacaaccagtagctagggacactgaagaagtgacttaactgttcttagcctcagtttttctatccgtttaagtgagaacattaaataccaatcttgcagggttcacgtgaagatcaggtgagagaatgtttgtgaaagcatgcagctctgagtccatcaattagacatgatggacaaaggaaagggaggagtcgaaggcccttaaggttttcagcttcgagaaacaaagtaaatgctattaacaacaaggaaataagaaaggtcaaaatggatcataggagaaattcatttcaacaagctatcattatattcatcggaaatgctcttgtctatcagactatgcaaagtcaaatttcagtcattatttctggccatcccaaaaggaggtgtctgcttcctgcaaactcctttagcacttctctcatctcyttcggcatttcttttttttttttgagacagagtcttgctccgtcacccaggctggagtgcagtggcgtgatctccatctcggctcactgcaatcttcacctcccaggttcaagtgattcttatgcctcagcctcccgagtagctgggattacacgtgcatgctaccacgcccagctaatttttgtatttttagtagagacagagtttcaccgtgttgcccaggctagtctcatactcctgacctcaagcaatccgcctgcctcagcctcccaaagtgctgagattacaggtgtgagccactgcgcccagcttcctttggcatttcttacagaattctagacccctgcttcccttgcagtatatctattctctctagccacactatgcagctccttgagagcaggcaggaccctgccttataattcttyaattccccacaacactttgctagggaatttatgtggtgcaaaccacctcccttaaaaaaaatccttggatttatttattagtatcatcaatgtcactgtttaattaattcacttgaaaggagagtttacaatttagacatccctgtcattgtaacaacatctttctaacaaaaggaataagaatggataaatattatctgataaagattttaaggttaatttagtgttatcagatgatcaattattcttctttggtaactgtaggactttaatatataagtcttgaaaataatttttaaattgccatcatttaagatgtgccaaataacataaccagtaaattattcctcactaaatctacaaaatgattaataatgttagtgaattaacagaaaggttaatggaaagaagcatcaaaatacattctccttgtagtaacaacttgaacatttaaacagtcctatgaattcctaaacaaataaactgaaaaacacacatatagagtagagaatttagaaataataaggaaaaactgagaaagaaatattatatataaaagaagagcatgagatagaaacatttacataaatattaacagtagctaggaaaataactattttcaaaaatctaatgatgaatttaatggtacactgatatgaataaaaatggagagctgtgaagcactgtcagcattttataatcaaacacatagagttggctatctcatcccttttcaccaaacgtattacatcccctgttaaaacatcagttattctaaaagtacccacagatgatagtgtaatttctgacttatcgggtgaaatctgctaatttatatcaccaaacacttcagacatatttacatcagtctttaacacagcaaagtccattatagcgtatactcttgatagaaacaatcattcttcgttaaaaatttccagagaacaaaaagaaggaattgttgaaacacatcaaaaaatttcaatatagacaatgcaaaaataagacctggtgacaaatcttaaaaagcatctggttcctccttcacataaatgacaactgcatatagttcatcacacttcagtgacaagcatgaaagtcgtcttcagcgatgtagaatgagagcatgccttgctaagtagagagggagcatttttagatttttcagtggttatagatttgacaaaacctttcacccatcttcccatttgctgtcctgatgaatatcagatgactagctgataaaacaaagtaatattcatgcaaaaatctatttttatttcaaatcttgcaaaagagaaatataaaaacgccctgcagtacagtcagctttctatttctgaacaacttacaattaaaccatgagcatgtgtgttatcaatagcttatggtaggaaagacatggaggataaatggggagagggtaattaaatacagtggcaccaagaggtaaaagtacattctgctgccagattcttayaccagttaaaaatctttcaaaaaataaccttctgtttagaaatgaccttctcaagagcaaggccagctggcacagagttaactcaaggtggtacgatgatggtctgttcttgttaagcaaagtcaataacagcacatatctaatgaagaccagctgtacctttgaaatgtcagaattgatgcatcatcaaaaagaaacaaaagagaaataagttaaactacaatcaagaatccactaaaaagatcaattataaaaatagatcccaaacaagaaaaacatatgagacaccactcaatgaaatgtgtttgatcttcttgtttaatattttcttcattttttttaatcattaaaaaaaatcacactakaaaatattctgagaggttcagggcatcttcttctgtaaatcaatggatctgaaaattacagactttcaccaatgtcagttgtttcttggctttttttttcatttttaagaaaataggaaagacttataacatgtaatccacatttctggtgggagaaacaattcagttatctcaaaactaaaccaagtgtttgaaaatgccttgtcttcacaagcaaattaaaccgtaagtataacttgattaaaggaaaagcaaaatgtttaaatactagatatcttgaaaatctaagtttacagaagatgcttattcattttcaaagaaaagaataagaatttccaatgacaatcttcctaatgtaaaagtatttgattcacagaaatttaattgaagcaaagctactcaggaacaaatctactaagaaaaattaggttcacctacaggtttatagccaacttacctctttttgcttttgatgtcaagtagtgcataaaaagagaaaaaaatttatgtttaactgattctaatgtcaatacataatggcttattccataaatacctactcagagtaaaggacctcagaactagtcttttaaaagatcctatggttagaggtgaagcttggccagaagcaaacggtagcccttcctactttaaatttctttcttttcttctttttattttttagagacagggtcttgttctgtcacccaggccggaatgcagtggcacgatctcggctcactgcagcctctaactcccaggctcaagtgatcctcccatctcagcctcctgagtagctgggatcacgggtgtgcatcacatccctggcttctattctaaatgtacawtttcagttcttctgatccaaactgatcacagactaattttctctttgtagtaagacacaatctgaagtgcaatgaagaactgggaggcaaggctcagtttagagcaaaagaatggactagatgaccagcatcagagcagcaaaaaagtccttaagatgaggaaatgtgtctccttaaactaaaacacaaaacaaaccaagaaaacaccaatttttttttttttttgagacggcatcttactctgtcgccaggccagagtgcagtggcgcaatctcatctcactgcagcctccgcttcctagattcaagtgattctcctgcctcagcctcccgagtacctgggattacaggtgcgtgtcaccatgttggccagaatggtctccatctcttgacctcgtgatccacccgcctcggcctcccaaagtgctgggattacagacatgagccaccacgcccggccaaaaacaccaatttttatatccactaagaataacttttttttttttgagacagagtcttgctctgtcacccaggctagagtgcagaggcacgatctcggctcactgcaacctccacctcccaggttcaagtgattgtcctgcctcagcctcctgagtagctgggattacaggcgcccgccactgtgcccagctaatttttgtatttttagtagagatggggtttcaccatcttggccaggctggtctcaaactcctgaccttgtgatccacccgccttggcctcccaaagtgctgggattacaggtgtgagccactgtgcctggccaacttttttttttttcgagacagagtctcgctctgtagtccaggctggagtgcagtggcgccatcttggctcactgcaacctctgcctcccgcgtcctggttcaagcaattatcctgcctcagcctcctgagtagctgggattacaggaatgcaccaccatgcccagctaatttttgtatttttagtagagatggggttttaccatattgaccaggctggtcttgaactcctgacctcgtgatccacctgcctcggcctcccaaagtgctgggattacagacataagccaccacacctggccaaaaataactttagttaaaatgacagtcctgctctagatcattctrcaaaataaattatgtattttcatataagtcttaaatgcaaatttttcttttctttttctcctttcttttttwtttttttttttttttttgagacagagtcttgctctgttgcccaggctgaagtgcagtgggtaccatcttggctcactgcagcctccacctcccaggttcaagcgaattctcctgcctcagcctcctgagtagctgaaattacaggcgtgcgccaccatgcccggctaatttttgtatttttagtagagacagggtttcaccatgttggccaggctgctcttgaactcctgacctcaagcgatccgcccacctcggcttcccaaagtgctgggattacaggcgtgagccaccacacctggccacaaaattttcaagttatggaagttttttttttttttttaagtaattattttaagagtaacaatctaatctagtcctgagaaccatcactgactaattcaatcacacaagagggccggctccagaagcagtccctcagaagatctcatctgtggactgggcatactgaagtgacataaataatctatatgccaaaaaagagaaagaaaatctctgggatccagtaatgactaaagttaaaataaacttggctattgcatgtacagttcacaaaaaactttaaatttgtggtatggagagtatatcaatgactattattggctgagaggtgacaaaggacaatgaatttagtggttctatggcatctttatgactttacactttttgaagaaaacaaagaatggaatagtcaaccattttgagttgtgcttttcctttttcctctcatacctttcaggtaaaatacactggggaaactgccaggaaaattgaataaaatcaatagatgactaaagagatgggtgtgtggaggacagaacacagagatatgcaagaggaatccctgagggtggcagcgatgcttccctgctctataacgagtgtggtgcactaggaatctttgctggttgatgagctatataagtttaattactaggtcactttaagtagtctaggtataagtgctatgtaactatattttcactacatcatttctttctttctttttatttatttatgtaggcactgtcacccaggctagagtgcagtggtgcaatcacagctcactgcagcccccacctcctgggctcaagcaattctcccacctcagcctcccctgaaactacaggcacacaccatcatgcctggctaatttttgtwttttttgtagagacagggtttcaccatgttgcccaggctggtcttgaactcctgggctcaagtgatccacccacctcggcctcccaaagtgcggggattacaggcatgagccaccacgcctggctcactacatcatttaaaataaaggaatgggaagtagcaagcctgggccttccatgaacattctaactacacatcagttgagctatgctcacagccggagctcaggctgcccctgcccaactcccttagagctcaggagagccactgaagccagatttagtgtgtagaaaggtcaattttcctaaccgtttacaatgcctcagaggagtttaggtggctgtcatgttgacggacattccagaattaaatcagtggcttccatattccatgtaacaatatacttttagatatgtaatggtatacttttttagatatcaaatcccacccattttgacagagaaatcaaagtgttggcacgttgtcagaattcagcaagaactcaggaacatcactactccttcctgccttgtctactcagttcacaacacacagtcactttaaatcatcaaaaaagtttgttttatatattagataatgggaattttcctttttttaggggggaagaaacattcccttttcttgggaactatactatatggwatagtatgctgttataagcatacatgttataagtatggtatagtatgctgagatatcataacatttatttagaagcgtagattttacacagtgacctccagacccagtcatggacagaataacttgaattcatagcatcagagagtctcagagctgggagatgcccttccaggatttcttcattgtaggctctcctttcacatttataaggagaaatggacagggaagtagttggttaacctagagattggcttctctgggtacctattgtgactttctcataatatgttttcttagtattctttgcagatagaagtccctttgcaaggtacagtttggatataccctctcagataatgccttataatcactgttgtaatagaggtggttgttatgtagttacagtgggggcaaacagttgaatataatagactggtgccagcagattggattaaataggtatgagtacagcacagaagatacggatggctctcttyctctggactacaacaaatggccctagctgcccaccagaacwcttctttgcttgcagagctttgggatatgaaggcaagggaatgttacaggtagattgttcagcacccaactccctggcacaaaggataccaaagaaactgtggatttggtgttgtaggctagtgattgctggttggtggaatacgggctattctctgtcttgagggtggacagcacacacaggtagaaggtggtaagattaaaatgtataattgttttattctggatttagactagtttgttgttactgggtggaggctggtcacttcagtgagcctgaggcaggatctgtgatctagaaacgaaccccagtaatgtctctttcagcttgagtatctgcctgctgatatatatatatayatttttgtgtgagctagaaagcatcatttcgggtttgggcagagtcaggagaggcagacagttattgcctggaatgtcctgggcctcatgtatatctcagcccacctgttcctccctgttactcctccggaaacagccaccttctgaaggccgctatcctcagcaatgtatgggtggacttaggtgaacataagtatgaactaattactcttgctcttaaatatgtaacaattaagaatatcaaataagtacttcttctttcactttatggatatattagagaaaaattatagtttttctcctaaggattaaaataaggaactttcaatttccatggatttaataaaattttaacaaaatctaaaagactttaaaattacataatggtactaaaatagtcaatatggattgaaaagtatgatctaatataaaatacacattcttgctacagagtttttcatgttgatctcttcagtaattaaaaagtttcatcctttcatcatagcttattttgcatacaatgctcaggttttgaatatgaaatcttttaaggaaatgtaatttctggacaggaatactggacagaggagagaacagtaaacaaaaacaaaaataaaacaaaataaaaacacgaataggaccatggtcatcagatgttctactaagtattgcatttttgtcgaatgggtccaatttgtagcatggaatggtttactcagtattatctttatcttctctcttactgtgggaagaaggaaggcacaagaaataatcaaccttgaaagactttgatgtgttttcagtctatatatatggtatcaataaattctgctatttaaaactggcaggatgcattttaaacctttttaaggcactctctgcttaaaataagaaacatgggcttttacaacttcattacggtaattaaaaaactaagtcattatactgttttaagaatgtttaaggaatatgttttgttaggatatacctaagtaattaagtttttatattgacaaggagatctagtaacaaataagagatgtatgaaaagggtatataggtacaaactttttttttttttttaattgagatggcgtttcgttcttgttgcccaggctggagtgcaatggcgtgatctcagctcactgcaacctccacctcctgggttcaagcgattctcctgcctcagcctcccaagtagctgggattacaggcacgcaccaccatgcccagctaatttttgtatttttagtagagacggggtttcaccatgttggccaggatggtctcgatctcttgaccttgtgatctgcccgcctcagcctcccaaagtgctgggattacaggcatgagccaccacgcctggctcaaacatttaatatgtatctattttaaaaagcactgccaccaatcagagacaaagcagaatcagcaaaatagcactttggtctatgtcagtttaaaagaaaaatgagggcagggcgcagtggctcatgcctgtaatcccagcactttggaaggctgaggcaggaggatcaactgaggtcaggaattcaagaccagcctgaccaacatggagaaaccctgtctctactaaaaatacaaaattagccaggcatggtggcacatacctgtaatcctagctagttgggaggctgaggcaggagaatcgcttgaacctgggaggcggaggttgcggtgaggcaatattgtgccattgcactccagcctgggcaacaagagcaagattctgtcttaaaaaaaaaaaaaaagaaaagaaaagaaataaaaccgaaatacatgccatcttaaattttattttaaaatcagtcattagttattcaaatttagatttctgtgtggaaattctatctagttaaaactaagaagttctagaactgcaccgtccaacacagtagcccttagcgaaattaggctgttgagcatttgaaatgtggctagttcaaatcaagatatgctgtaagtgcataatactgaatttcaaagactgaataagaaaaacagaatgtgtatgtatgtgtatgtgtgtgtgtgcgtgtgtgtgtgtgtatatatatatatatatatatatatatatatatatatatatacacgtatatatatattttttttgacagggtctcactctgtcacccaggctggaaagaactagcacaatcctggctcactgcaacctctgcttcctgggctcaagcgatccccacaccttggcctcctgagtaggtggaactacaggcatgcaccaccatgcctggctaatttttgtagtttttgtagagacagggtttcaccatgatgcccaggctggtctcgaactcttggcctcaagggatccacccacctcggcctcccaaagtggaattataggtgttagccacctatgaattccatgttgaaatgatcacattatggatatagtgtgtcaattaaaatctactactaaaattaagttcacttgtttctttttatttattttttgaaacagggtcttgctctgtcacccagcctggagtgcagttgcacgatcatggctcactgcagcctcaatctcctgggctcaagcaatcctcccatctcagcctcctgagtagctgagagtacaggcgcatgccactatgcccgaataatctttttattttttgtagagacatggtttcgccatgttgcccaggctggtcttgaactcctgggctcaagtgatccttcattttggcctcccaaagtgctgggattataggcgtgagccatggtgcctgacttctttttactttttctaacatgactactagactactagagaatttaaatttacatatatggtttatatcatatttctattgaatagttctgaatagaaacattcttgtagctgtcattttatcatttggcaagaaatatttctattgcacacatagaaacattccaagctttcttaaagagctcaagcatgtcttccttccccttcataacttcttctgactcaaaagaaacaaaaagataaatgtataggaaagaagaacccagatacatcaagtgaaaaaaaccggcatgcataatgtctgtggttgtgccaatggtattaacacatatgtaaaatgcatatgtttttatatatgtatatatttatatgcatttccttatatatgtatagaatgtttctggaaaaatacaaaaggttgggtgggcacagttgtggcagaaatctaccatctactgtataccctttgtactttaaaatttttgaaccattacctattgaaaaatatacagcaagtataaaaatgtatttctcaacatgtggttgacaattttgtgaattaatatattttttcttctttttttttttttttctgagacagggtctcactccatcactcgctggagtgcagtggctcactgcagcctcgacctcccagactcaagcaatcctcccgccttagcctcctgagcagctgggactatgagtgcatgccagcacatccagctaatttttaaattttaatgtagagacgaggtctcgctatgttacccaggccagtctcggactcctgggctcaagcaatcctcctgctttggcctcccgaagtgctggggtgacaggaattaacatttttgatttaacttttgttttggcagattccaaactaaagacaacatgttctgacatcaagaagtgcccaggccttcccctacagggaagaattctgtggaaactatgttcaaagaaaatacaagcctaagagattacaggtttcaacagactgcccttcactcctactagttcaagaattgaatcctgtggaaaaagacagtttagtgatatggggaagtggaatacacataaatagaaaagcctctataggaaaaaatataaattataaagtacaaaatactgaggccatgagttcaagattgactgatctccttccacatacagaacatggaaagcagtaagagcaggtcgtgtgtgcacaggacatgctggctgatgaaatatgtaactgaattgtaacttgggacatatttaaacattcctattcctcacagttttgattctggtctccactacctctcatctgcatattttatgagtctctgtacctgcttctttatcttcgatgttacccacatctaatccactctccaccttgtcatcagggtgattttatcaaatgaaaatctgatcctattcttaaaactgctaagctatgcccgtggtaagtctgctctcactaacctggccctctgtcttcaggtccctgtccacctttgcagcctcgctttctattacttcgaagtcctgcaccaggttgtagtgctgagctcatggcactggggcaagttgacctcctttcctataaggttcttcttacgacccatacctgcgctgccaccttctgcctattacgatatagtcacctttcatggccagccttgcatttcttctggaaggacgttcctaaccatcctaattcctttatttatttcaggaatatctattaacatcagtacatatttgtctcctacctcccctaccagactatgagttttatttgaatatcattgtatatcaagagccaagaaaagtgcctgacacatagcagatattcactaaattttgttacattctggtgaatgagtaaatggattaatgaaataaatgtgattttggtacatgcttaagaacataggctttgcaatacgtgaaacaaacaaatatctacttgcttgaatgcagtgaaacataaaggcagtttttactatgaacatgtcrgtgtgtactgttgactatatatctcaaggggtgattacgtatctaaggctaatacacttctgtgagttgctttaaagatcagtaaaaagcaaaatatcacagaaacattttcagacttcaaaataataccattctcttaaactagctgagtcattgtgtcagagaaagacaggagggagggatggaaggatggaggaacagaaggaaggaggagattgaaatgagagggagaagcaagatacctaagaggaaaagggtgacatgggaaacacagtgtgaagagcaagctgcttaggctattacttccagattgagttcaaacttgcttccccaggtttgccatttcctatttatcatgtgtaaatgctgcagtcaggtctttactacagaaataacaactcccgcctgtgaattacatggattccctttacgtattctgacaggctgattgcaattattgattaaatggtaagatgatgaggaggaggaggaagaggggacggaggaggargaggaagaggggacggaggaggaggagaaggatataggcctaggtagttaaggagtcaagataaaatgctggctaaaaaataggcaacaattttgtgaagacatacaatctgctgycyaattacaaactccttgatgacaacagggtcccttttgagtcaaggtcatcaaggctgataggcacttctcagatcagctggtaactgaaactgtgaaaactaagatgagcatgtggaaggacactggaatttgtgtgccaggataaggataaagtcaagaacaagaaagttaacaagcaagccatggccagaagcactgcaattgtaagggctgaggttgcagaagctgagccagccagagggaaacgccagaattttcccttaaaaggttgtactaatgcagcaaaccgatcagtataatgcattaatcaattactatacaatattctactaatgttgaaaatcagtgccycaccctatagttgattctccagaatggagaaattgtgcatttaaggagatgaggctttctgtttaccatctcatagaaataaaatctatttgaaagtaactcttgtacagaataaataacattttatgttctgtgtcttaaatttttaaacgacacatacctctctcaattcttcaactgaaggattaaaaacaaattaaactgatttcatttttagttgaggtaattgtttcaatggtcctcaatagaaaaataaagcccatatctgcttattagaataattaaaaatcatctaaaaagatgtactaaaaatatattttaggctgggcacagtggctcacgcctgtaatcccagcactttgggaggccgagatggcggatcatgatcaggagattgagaccatcctggctaatactgtgaaaccccatctctactaaaaatacaaaaaattagccaggtgtggtgacgggcgcctgtagtcccagctactcgggaggctgaggcaggagaatgacatgaacctgggaggcagagcttgcagtgagccaaggttgcgccgctccactccagcctgggtgacagaggaaaactccgtctcaaaaaaaaragaaaaaaaaacaaacccccaaaactatacatatatatatatatatatatatatatayacacacacacayatatatatayacacacatatatataymcatatatatacacacatatatatacacacatatatatatacatatatatgtaaaacaatgcttatcaaaaacattctgatacattaatagagaattttccttttaaaatgattaatagatattgttactagctagcaaattttataatggttaaactcctgaatttaaaaatactcataaaatctactatttcccatgggcttatgatatttcttatatagaacataagactggtattatatgtcatmttttctctttcttggcttattgaaaagattttatatagtaaaagcatcataaaaaatgtttgatatgtcttaccctatatagttcagctgagggaaartaacatatattggtaataatgcagatatttgtagaagctacaatttatttggtgtggatggtcmgtcactttctgtagtaattcatttaactaggaccttttagaaaatgttgctaagattgatttgataataatttactaagcgttaatctggttgattccacgatacataattaaaaattcctaaggctataataacagctttacttcctttcctcttttattattttaactttacataaatggtgagaattataaaggttatcaatatgttaagctgtcattagcatgaccttctggtctggtgattattctgaattccacattccttatatctctaattttttttttttttttgagacagtgtctcactctgtcacccaggctggagtgtagtggtgcgatctcggttcgctgaaacttccgcctccctgtctcaagggatcccactttagcctcctgagtagctgggactacaggtgcccactaccacacctggctaatttttgtagagacgggttttcaccatgttgccaaggctggtctaaaactcctgagcccaagtgattcacctgccttggcctcccaaagtgctgggattacaggtgtgaaccactgcagccggcctcgaatctcataaatagtaatcatttctaaggtcaatggtattttctggttattcaaaactaaagagtttaagacaatatatggtactctcattcatgtatgctaactgactttagagttgtaagatgtgcacagtgtggataaagtagcagaaagattcccaatgtgggaaaaagggaaagtgttttatgggcttttagtacattgatatacccttcttgacagcaacatcagaatggagcaaaaaacataaggatgttcaacttttaactgagtgatctcactcttgagaaaaatgtaatagatgagaagctgaatgcatgagggtattcccagcagtgctctataatataacaaataatgaaaaactacctcagtggacaagaagagaagtagtgattaatgtgataacagcatctgaaacaaaatctatgatacaataactttaacaaataaaaacaagactagatagcaacatggaaaagcttgtgatataatgttcatggcttaaacaatgtaatgataacaatataaartatatatycatgtaaacaaaaaccagtcatacaaaaatgaaaacagttattgttgttaacattgattattaatttttaaccttattgagatgttatctttttaattaaacagcaataggagttatttattaatcataccaatttcttttctaagttccagtagatagtgctactaaatccatttggaacactaaaaagaagacttgtgggttttatccgagttaggtatcctgataaatcattaccactttggtgattcacagaatacttcaaggtaccttccaaggaggtctaaaacaataggaaatcagttatgaaattaaaaacaccaagcagtttttactttttttcttcttaggtgtatattttggctattacaccattccaactcattatcactaccaatttcctcaaacacctttagaacgtgaaatgcactatcagtttctacaccacatcttttaatcccaatcagtaggctgacttcatgaatcagataaggaaagtattagagatccaaaggctgaggtttgcaaaaaggaattaaggtaaaatgaaaaaaaaaattctatttcaacggtggcaaactcaaagactacaggaggggccaggagagaatagaaatgaggatagcaggctgggtataagtaataaggaggagtggtgactgtggcaaagtgcgaagcttgccctaacagcagcagccactacagagctccaacaggtgttgacatgcgtgaacgcagacctagggctgccagatattcagaatcttccaaaagaggccagaaatactgatgttcatataaaatctcttgaatttttaactgtcaataactaacttaaatagttttattttttattttctggcaatagtcaaataacagctgcctttaagcttactttggtttatgggctccttgtttgccacttctgccctatactcacatgcagggattccttaaaaggatgatttttatttgcaagaataattttctctatttgccatatgtcacattttcaagttaggcctcttcatagaacaagtaaaaagaatgaaaggaaggaaggaagaaagaaaaatgcaaaatagtgaagctaagtgtgaacatgttggtaagcattaaccagtggggggcctgcaatctacaagaacattatactaagacctaaatgttcttgaggagcaaaatcttagaaggttttacttttattctcaatataatgattgaggagacgttctgagtcaccacaaaaggaaatcagcccaaaagccttgttatacatatggctctccctttacggaaattacattaaaaacgataagagagaactggccaaatctgaccaagatggaatcgccatgagctaccaaactgcaaataggatccaagtgtgtgtgcgttgtgcttgttgctaatttccctttacctatcccattccttccaactctcatttgccatctttggctgttaaatggaagtctgtcattctaaggaatatgagtgaaggaggaaatgggaagctaagtgtaaggaagtttttacttgacttataggaatttacacatcatcaaaggtatactctgcagctgggtgagcctgagtgaccggaaggaagggragagtctattcaactaatcatttgcatcacatgcacccaaggaaaaaatgtttacctggtggagccacggttaaccttttttccttgctgagccggtgcccttggatgaattcactcatggaaggggggcccttcagaagaaatgattctgtggaggtgggatcagggggaactcttaataaattctgtaggtaggaagcccctgaagtcctgggacggctctgatcacaaagggaaggtgaaaattgtcttgcaggagatccaagaaaaatacatataggaaacaaaaaagtttyactttaattaccttttaacgcctcaccagtgacaacattatttataytggcatttaattttttaaatatgtaaatcaatctttttgctttttttttttttagtttccacatcaggatacaaccctatttggaaactgttctggatactggaaaaaagatttattacagttagtcagcttgaaccgcaaatagaaaatatattatttgagtctttaatgaaagctcctaaaataaaaatgttaccattaaccgaaaatacagggtaagtaactcaacagccaggactcacaaaatcaagcccctaaaaaccttacaagtggtttctctgggcaatattcccatgccaaatgaaaaagcacaaaaacctgctttcaagaaaaggactgtgcgtattccatcccattttatctagatatagacatcccctttcagtctgtcatcagttttggtcatatggacaaaagtttccctaagagaacatattcatatccttgccccgttaaagagaagctgataaacagcaccatttccaaaggtacaatgacttttaaaattataacccaggtagaacacagcttcattcttaatatccacctttatctaccaattctcaggttggaggtaagggagaggcatatttacacatacaaagagtagcaaaaatattaacagacacttgaaaattatattacgattaatcaagaggagggattgggcagggggttagaaaggactacataaacacaattatcaaaaaggttttgatctggaaagacccacattagcaagaccatttatatgccagctcccattttttcttttsbttcccctcctccatcctccacaacaagagcacatttatttttgcagttaactaaaatctggccactgcaccgtactatgaagatygctgcatgcataccttttcctctgagtgccactgctgacccgaatgttgggtgtctgtgggccctgactatgcaggaggtaagtgtctatggtgggcacggtgactgatgcctccccacttactttagggctgccgatcttgctctttccaagtttgcctttgctgcgtcgggactgctcatggtcaaactctaagtcctccagcctctgggtcagggcgagtttttgctggatagccattcgtaacaaagtgttcagagtcttyttctcatcctctgcagctgctaactgtctctgcatctcatccaactgggtgacatattcatcacatctggaaccaaaacagagaagtggtcagaggaaaatcttggtgaaactgaatttgggasttaagytgaaaagtaataaatttgacygaaatttagaaatttagaagactggtttaaaggtctagcaatagaatgtagataacccacaatagcagaaaaytggaatatatgttcatccatacaatgagatatatgggacatttttwaaaaatttattattattttgttgttgttgttttgtttatttgttttttgagactgagtctcgctgtatcgcccaggctggagtgcagtggcgtgatcttggctcactgtaacctctgcctcccaggttcaagcgattctcatgcctcagcctgccgagttgctggaattacaggagtgtgccaccatgccaagctaatttttgtattttttttagtagagacggggtttcaccatgttggccaggctggtcttgaactccagacctcaagtgatcctcccaccttggcctctcaaagtgctgggattactggcatgagccaccacgcccagtcattattattttttaaagagacagggtctcactgtgttgcccagactggtctcgaactcctggcctcaagtgatcttcttgcctcagtctcccaaagtgctgcgattacaggtatcagccactgcacccagcccatatggagacagtcttaataggcaatgtcttaaaccccagggacagagttatcgtggggctgctgtgtaacagacgaataacagtcaagtctcacacaatgtccactatacctgaagtgtcttacagtagctctttttactgtatgacattgtattctttggaggaatgtaacaagtttattataggctatgcctatagtatccaaaataataatgtttataaagaaaacatttccttatctatatttatacgttttagtttagtatagattgcagctgttggtcttgtcaatttgactgatttgcctgaattagaaaactgagtattttcaatgatttctcaaccagatgacagagcaatgagttgtcaaaaaacaaaaaacagaaaaccctgcaaaaaccaagatttcacaaggtttcatacagatacagcaggctgtccgaaacatctttattcaggtttcatacttgtgccgaagaagaaagataagcttagtgatcttttttccttaccaaaggcaaaacctggcacatatacatttggaaggtagaggtggcgtggagaaaaagctcattctgaattttgttttgttttttttctgagtttatttacccgctaaaatatgaataacaaatactgttcatgccaaaaaaaagtctgtgaaaatagacaatttggggataacaattcctttttataaaaaattattattatttttgagacggagtctcgctctgtcacccaggctggagtacagtggtgtgatctcagtttctgggggactcctataaagctcaagagatctttttttgtttgtttttaacacttttacatgtatcagccaaatgtaaattatttactaaatctgcaagtaaagccatagtaattattcgtgaattttgcaccaagtttgcatcatacaagatacacaattggtaggatttggtcgggcatggtggctcatacccgtatctcaggacttttggaggccgaggtgggcggatctcttgagcccaggagtttgagaccagcctgggcaacatggcgagaccctgcctccacaaaaaccacaaaaattagcgggtgtggtagtgcaagcctgcagtcctaggtactcgggaggctgaggtgacgtgggaggattgcttgagtccaggatgtccaggctgcagtgaaccgagatagcgccactgcacttcagcctgggtgacagagtgagaccctatctcaaaaaaaaaaaaaaaaaagtaggtcttttttgacactgcattgtgacagcaaaaaatgtatttcaacagtatattgaaaatctcaagattctgaaaacttcaaatcaaatacattcttaacaatcacttcatgtttaaacacaaaatacagccgggcgcggtggctcacgcctgtaatcccagcactttgggaggccgaggcgggcagatcatgaggtcaggaaatcgagaccatcctggctaacagggtgaaaccccgtctctgctaaaagtacaaaaaattagccgggcgtggtggcaggtgcctgtattcccagctactcgggagggtgaggcaggagaatcgctagaacccgggaggcggaggttgcagtgagctgagatcgcaccactgccctctagcctgggcaacagagtaagactccgtctcaaaaaaaaaaaaaattataagtaattagctgatgtgatgattattaatcttcattatgacagtatcttctcgcacagtactaaaggtaaggcacttttatatactttcatgtacttccttcacagaactctatttcagaggtgataatatttagctattctaggaagtggggttttttyccttattgaaagctttttatttggagggagactctctttggggtgcataaattctagaaacaacctattaatattagcttacttaaaaaatatttttatgtaatagaatttctggatccagagtgttcagtagggggctctggaaaacagcacagaaggcttgcttttagataygtcagagtggacttccacagattttcttcacacttagccatcctagactactcaccgaatacactcaacatgcacaaaggcagggctgtgaattttaaagcctttwccccacctaccacacccagtcataggaagaaaatactgttaccttgttgcaaacattgctctcagggatgagaaggttgcagcatcttctttcaaagccttcagttcatttctaagcttcgtcatggtttcagtcaccattgctttttcattttcatatttgttcttgagattagctagcgccacctcagctgtctaaagcagaaaatcacactgcttacaattttcatatcaggaaaatccatcatacagattgcttcatgctgtgcctattatgttcttttataaaaggaaagtgaaattgatttggttacattttatataaacataggtatgcgctttggacacagggaagtttttctttaatgtcaaaatgtgttgtgaattcataatgtggttaaattgccctagaagcccgctgcgagccagagtcagtatcaggagctaagagaatgacagtagtttaataaatatttaatgcagattgctgaaagtatgcgattttaggacaaggagggagccaaaatgaaactttatdcaaaaaaaatttttttaccaattatttagtaaagaagcacagcttcaatwggaataatcaaattggaatatgttagaactcaaattttgtcacctgtgctctgtgggcccaaaacatagaataaaagacatacaccattgtaatttataatatgagtatatgataaactataaatccatgttatcatacatttaaggaaaagaagtgataaagaactaattactttctaatttgcatacaatttgtccaaacaatgaaatatagtgaaatataattccttcaaaatctccataaaagtaggggttataaaatgttgaatgagttaaaacatttgtttgaatctgggatttgggcatgtccgaagttcttggaattaatagtgtttcaaatcaagagctaccctggcacacacacaagtaaaaaaacacactgactgaatcaatgcataaaatcagtgtatacttagggattgcctgtttgatgcatagcacacagtttgcatgttgaagccaaactgggaacacatgatttttacaaactggaaactataacttttcaaagtgtatacaaataccccatactaatgaacaaccccattactagcagagaaatccattactaacgggatttcccaggaasactaccttggtttttaacatttctttttgttgcttgaaatgggcagcttcaaaccttcatatgcaaagtgccaacatctatagaaataaattctttcttaattaaatcaatgttgggatagggtactttgttactgttttgattccgaagtagtttcttgtgagttttgattggatttaaattcagattaaaatgagactttactcataaaatacttctgtatgttctgtaaatacttggaggaatcttcagaaatattacagattcagaaaattatccacaaggcagaaattgacctggggaaaaacggcagttgtttagtgtttaaaaagcttagacacatattcatttaaaacagaaaagtatgtttaagttgtgaaatgtagatgtaacaaatttgtaagcacatagaatcccatggtcagtatctaaggggaataaartgggggataacagaagagctagatctgaaacagaaatacaaaatcatttattgtttgtgacaaataccccaaagcctcagttttgtttgtagatttgtttgtccattgactgtgcaaagtttttccagaattaagtaattttaagtatccataactcactggatttgctgatttctgctttcaccactttctccacacattccaaagttgactttctaaataaaaaaagtcttatttccagccacataggcctttgtgagcattccctgaatatattattctattttgtcactccaaagcctctctacctactgttctgtctggaattacttcctcctcctctggaaaacaacttcttatcctttaataacaaactaaggtataattgcttctgtgaagtcttttccgctcctctaggaaaccttagttgcttcctctgcattgttctcataacttggattacagcatgtgtaacgttgaactgtaattgtgtttctatcctgacatccccaggaggctgagtcttctggaaggcagggaccatgtgttagtcttctttgaatcttcagcatctagcacagtgctagatggacggtgcttcataagcatttactgacttcatcagaaggcactgtgcctatgaaaaaatccttaagtaaatgagaagattcatagagactacagaatgcctatttatttatttttaacttttaagttcaggggtacagctgcaggatgtgcaggtttgttacataggtaaatgtgtgtcatgggggtttgttgtaccaattatttcttcaccaggtmtgtaagcctagtatccatttgttatttttcctgatcatctccttcctctcatccttcagcctccaacaggaaccagtgtgtgttgttcccctctatgtgtctatttgctctcatcatttagctcccacttataagtgagaacatgcggtatctggttttctgttcctgtgttagtttgctaaggataatggtctccagctccaaccatgtccctgtaaatgacatgatctcattcttttctttcttatggctgtatagtagaatgcstattttaaaacagggagatttccttttttcccctgtaccccagaattctcaccttaaccttaaaaacaaacatttcacaatgtctaaataaatatagtgaatgtcatctgttaatacttgaagctatttacggcaataagcatcacagcaacagccccaacatcatgaacgtgcagaccaaatgcattgctagaaatgtgttttcatttaatttactgagcccatatagactgtaactctaatgtaatgcaaatggtacaggttgagcatccttaatccaaaatccaaaaygcttcaaaatctgaaaccttttgagtgctgacatgagccacaaaattctacacctgacctcatgtcatgagtggcagtcaaaactttgtttcagccacrgaatcattaaaaaaattgtataaaattaccttcaggctatgtatataggaatacatgaaacataagtaaatttcatgtttggacctggatcccatccccaagataactcattatgtatatatgcaaatgtccaaaatccaaaatctgaaacatttctygtcccccaaaacatttcggaaaagggatactcaacctgtaccacaaagcacagtgaaaataaaacttcagctaggaatgctttgttctgttctgatttcctgtggtactgtttacatcactctaaagtgcttgataagtcctgtcttgtaaacagctacaggcaattgcggaattcctactagattatgtcatttatttttgcatccctacttactgcctcccagaaaatatgtaatcaatgaatgcttgttcacaaattagtctctgttggttggccaagtgtccttatctatacctctgtttcagttaagcatcttgattttttttttttwaagacagattttcgctcttgttgcccaggctggagtgcaatcatgcaatctaggctcaccgcaacctccgccccccggggttcaagtgattctcctgcctcagcctcccgagtagctgggattacaggcacccgccaccacgcctggttaattttgtatttttagtagggacggtgtttctccatgttggtcaggctggtctcaaactcctgacctcaagtgatccactggccttggcctcccaaagtgctggcattacaggcgtgagccattgcgcccagacctaaattgttaatattcaacctttaggaagaagtcagagaagttatctggatggcttgatcaagaatgccccaggatagcatgtccttgtgtaagccttatctaatatggtattggttatttatgaccactctgaatcattgggtctttaaattatagcagagttayaataataaattcctttattccgacctaaaattagagtcagatctctcacaaattcttcattcactctaatcttttctttttttattttatttattttatatatatatattttaatttactttaagttctagggtacatgtgcacaacgtacaggtttgttacatatgtatacatgtgccatgttggtgtgctgcacccattaactcgtcatttacattaggtaaatctcctaatgctatccctctcccctccccccaccccacaacaggccccggtgtgtgatgttccccttcctgtgtccatgtgttctcattgttcgattcccacctatgagcgagaacttgtggtgttcggttttttgtccttgcgatagtttgctgagaatgatggtttcattcactctaatcttttctatttctctaaagtgacaacataaaataaagtcatattttgcccttaggtttatataaaacatgttaatagtgcaaacaatattatggcttatggtatagatgtcaattatataaatagatttatgggaactagagatgaggacttgaaagctgcactgtagatgagataataagggcgtggttttccccagatgatggcaaatggagaagacactctgaatctgaaattaatcctcattctccaaagaccaagagctcccttgacctactattcactggcactgcttgcgtttgcaggagggtatttggtgctttgttgcttctctttatcaacaccaacatttattcagcacctttctcaaatatgtgtctttcaagaatatcttttcagataaactaaataaaggtgaaaataattttcctgcctatatttcgcagcactcccaccaaggtaaaactcagggtgaaaacaatttcagtcattaaggagggctgggaattagacaggttcatgttgtaacattactacttgtccagaaggacaagatcaatagctaggaaaagctccctattacttaacctctgacccaggtgggttaacatcccaaatgaacctaaatttcagatacgtggtcagtagcacaggtagagctcattcttatactctctcacacacactctctattatttccttgctaaagtggccccaaactatttaatttgttggtaacaatctgtctggctttgtttctgttactcactcaggtcctcacagttgtcttgcctttcatccctgacttattcatttatttagcgctcttgtttctctaagtttgggatgaaggacaaaacactccttttaatcttgctatacttggctgggcgcggtggttcatgcctgtaatcccagcactttgggaggccgaggtgggcggatcacttgaggtcaggagttygagaccascctagacaatatggtgaaattctgtctccacaaaaagttagccaggcatggtggcacatgcctgtaatctcagctgcttcggaggctgaggcatgagaatcgcttgaacccaggaggcggaggttgcagtgagcagagatggcgccastgcactccagcctggacaacagagcgagactctgtctcaaaacaaaaataaaaaawaawaataataataattttgctatactcctagaaattgagtcttgaatctgaacctccagctccaaagctggggtccagttattggccatcagaccttcttcaccatatgtacccagatttccctctgtttgctctagctgcctgctgggtgtttgtctttcttgctgtatcgccctggttggtgtaacctgccttgccagcctattctgccaccctccatctcctgtttccacagccactcactgccaggcttcagcccagcaccgcctgagctgcctttctacatctgcagaaaggcatctagatcttctcctgtgttcctgctttaagttcctcacctctgcctccacctaactgggcacaggtatttcatcatttaaaaacaataattattatgacattctgatctggcactgggacagttttatttatccacttaccaagaatctgaactctcatctygacgatactcgatactcaataaaattagggaataaattagttaagaaagctttgactggcatgctttcaccagtagaatgagattacctgcttgttggctttcaacaccgccctcaatgtggcgatctgctcccgtttggtgctcagcagggactttagcttgaggatctcttccattaaggcttccttgtctttatcaatcatgggrgctagctcccgagccgctgctctttgacgagacagttgcaaggaccggtccacagctttctgcagatgcttgatttggtcccggattatggcattaaggttgtagatattcattggctctttgcggatgtcacttgtatccaatactggagatgacggtggggcagtaataacaggagagattgtgggggtcttagttggacttggttctttgctggcctctgtgctttcttttgcaactggttcagatgaggtccttgtttctaccggggatgasacaccccgcctggctaatcgtggggacaaaagtcctctgggatcatcgggccctttcaggctgccactgcgggtgactctgctctgcctatagtaatccagcatgaccctgttgggagtttcattattacatagacacacatggtggtaaagctgagctaactcctcactgaatgtcactaactcatcctgggccgtattaagggtrctgtgattttcgttggctatgctggtcatcttttgcaactccttctccatgtgggccatcttctcaccactctccttggtggtcttctcaaggcttgtcacctgctcatcatacatctggattttactctcatacttggccttctcatcagtgtagttttctacagatttattatatttctcctttaaggccttaatttcagctttcagatcaatcacctcagttactgccaccctgtatttgcattcaaggatctctaaaccattgatgtccacctcatagtcatgggcctcctcccctgagtcccggcccttctccccgtccagctcagccttgagctccttgctgctttgcaggcccctcatggcattgacgtgctctgtgagccggtgcacccgctcatgctgctccgtcagtgcccccttggtgtgttccagctgtgtctgtgactcctgtaggttggccaaaagaatggccttttcccgctctacctgcaatggcaaaagaaagtttctgaatcacctcaaggcagcaccaatgatgaacttaatccattcacagtcgggcatgtatacacttaaaatcactgcagcagagccaatgttcccactatttcaaattaaattggagtgttttttatttcagcagttctggtaagtcaatctaaaagtacataattctaaaagaattatactgcaagtagttacccatcaatttcgcttgtatcatacacatatactgamgaaacttcaatgttattagaacaatcttattttgatttttaacaccttgcagaaaacaacatgactttaagagataagcataggacyggtgttatttttattttgagtgccttagagtacatctgcttttcagatyataagtgactgtatcagggtgcctatgaatcaatcatcttttccttcccagagctcaaccccaaatcaggtttaaaacctaaggctttaactccctaaataatgctgagtactttaaccatccccttaaaaataagcatttagtccccaaaataaacacgcactayatttgatagyttttatctttttttaagacagggtctcrctctgtcacccacactggagtgcagtggcacaatcagggcttactgcaggctctgcctctcaggctcaagtgatccttccacctcagtgtcctgagtagctgggactacaggtatgcaccaccacacctggctaattttgtgtgtgtgtagagacagagtcttgctatgttgtccaggctggtgttgaatgcctaggcgcatgtcagccccctgcctcygcctcccaaagtactaggattataggcaggagccaccacgcccagctttgatggtttctaatataaaagtcaaagaatacatacagaattttagggctaaaagaacaacttataagtcaattcaattccttcagtccaaaataggaattttaaatattagtaattaatttgaataatgtgatatgtaagtattaccgtgtgatgaaaaacactcaggtgtccatataaaatactgtctcattaaacataggtatataagaaattgcaatgtggaaaaattttaaaccattttctctccttccatatgggtraatattatgaattatgagtttttacatttataatgtaaatgtttctcaataaccaaataatattgtttacattatygttctataagaagtatcatggtgttcatatccttctgcacttgtgttttcttttctttcttcttctttttaaaaaataaaccatcatgagatctgctttaagagcaatgaattgatgctgaatgtcttcatatctaaaggaaagtatctattcaaactttcttttttttttttttttttttttgagatggagtctcactctgtctcccaggctggagtgcagtggcgcratctcggctcactgcaagctctgcctcccaggttcacgccattctcccacctcagcctccccagtagctgggactacaggcgcccacgaccacgcccagctaatttttttgtatttttagtagagctggggtttcaccgtgttagccaggatagtctcratctcctgacctcgtgatcygcccacctcggcctcccaaagattacactcccaaagattataggcgtgagccaccgcgcctggcccaattcaaactttcaaacttcctggatcatacattaaatccctctgaactcttctaaatccctaggtggcaagtaaaattattataattagatataataaatattaatcattaagtatggttaatattttaaaactagcttattactttaggatacacatgtgtatatgtaaatgtataatagagtagagtagtatttttatgatcctttatggaacctaatgcccctcatttaactttcatggtagtcctctcttggcgaggttctratatgggtaagtttcagttactatgctttagttaaaacaccagctactcctcaaaccatggtccaaatttcaatgaccaaatayattgattgtgagcaatgcataacgcacaatctttgctgccagcacttcagtctataaaakcactacataacatcatgaccaacggccaatgacaccacttcattcaaagtcggccagtgattggttactasgtatctgttattcagttcactcatagacagctaaggatgtagttgccttgtcttgtctcctagtgataaatccatgtgatgttttacaaaaatgaattacaagaaagaaaggacagcaacaaagagtgacaatgttggaaatgaaatctgaaaaaaaaaacataaatggagccaggtgcagtggggtgtgcctgtagtcctagctactccaggggctgaggcagaagcattgcttgggcccaggagctgaggcaacatagtgaaaccctgcctctaaaaaaatccccaaaactacctaaatggagttatagaagaaataactgaatatggaaatgttgacactaatgctgtttgagggactttagatgtkcacccaaagaaatttagtggaggcaaatttttcaatctattaaatgaaaaagtacagtatggccgggtgtggtggctcatgcctgtaatcccagcrctttgggaggccgaggtgggtggatcacgaggtcaggagttcaagaccagcctggccaagatggtgaaaccccgtctctactaaaaatattttaaaaaattagccgggcaaggtggcacgcacctgtaatcccagctactggggaggctgaggcaggagaattgcctgaacccgggggatggaggttgcaacgagccgagattgtgccactgcactccagcctgggcgacagagtgagactccatcttcatctcaaaagaaaaagaaaaagaaaaagaaaagtacagtacagtagttgcaaaaaggatgaaaatgtcgaagaggaagtgatgctggcacattaaaggtactcacaaagatatttccagatgtttaaagtgcagaggataaaatgttggaaggtgatccaaacttagaaatgaggatgacaatttgccaaagcatagaaaagattcttgctcagtgtcctaagtttttttttttkttttttttttgagatggagtctagctctgtcaccaggctgaagtgcagtggtgtgatttacgctcactgcaacctccgcctcccgggttcaagcgattctcctgcctcagcctcctaagcagctgggactacaggcacacgccaccacacctggctaatttttgtatttttagtagaaatggggtttcaccatggggtttttagtagaaatggggtttcagcctggcggctggtctcgaactcctgacctcgtgatctgcccacctcggcctcccaaagtgctgggattacaggcgtgagccaccgygcccggccctaagctttatgggaaggcaagatcaaaatactcttgataagctgtttacaaagaaataaaaggttaactctcaatrttcctaatgttttaaattatgaagtactaagtagttttactatattttcatttctatatatatttataaccaacagtaagagactttttaatgtttcacaaaaatatttaaagatcacaaaacaattgtaaatttccccattaattattaagtttgttttgcatggtttcagtttgcaygaccattttttactgtcccagactactatgcaaaccaaggactgcctgtatagtatgatcacatatattagaacctaagatacagttttgttatctcaaggtgttatttagaggcttttaagttgtagctctgattttatgacatagtgtttgtccatacctatgaaaggaaagcaacccacaaattatatattatggctgcagaaaccaaattattcccaaatgatagtactgcaggtaaagaactgggcctgtggcatcagagaacactggagtcaaatctcgggaccaacatttacttagctatgtgactctgagaaagcttcagtttggtaacctatgcaaggagcacagtaacgcctcatagggaattttgatgatgaagtgagttagtgaatttaatactgaaggttctacaatgttagctattgtgaacaattggttagctgtggtccacctcccacaaccaaaatgtttttacatggcaaacacatctgttctcacaattttgaaaattttataaaagcaactctttcattttagagtcaggaaatatttgaatacaaatcttagctggatttcattagttataacagactgtatctccagaggtgatgatgaatttgcttacccagactatttgggcaatagttttcagtgaaaaacctggtaattatgtaatatggtatttcatgaatagccatgtcatttgaatttttcataaaggagatggaaaatctctattctatacaatctcagtgaaaactgattatgtcagaagtgtttttgttttccytttttcctttgaaaattaagcaaatttgcactggaaagtgtaaacgttattcaattagtacacatgattacagataaggctgtttccaaaacgcccttcaaaaggaaargcctctggatcaaataaatattggatcaaaacaaaatgtactgaatgtgtctgaagcttgttttagcagcaaaagtgttatgatgaataaggtcatgcctttagaacagccttcaatctggactctgacagttgagatttaatataaacattttctaagcctaaaaaggtaagtctacagtgtcttcacgatagcatctccagaaaacatcaaatagaacactgtctcttgcatgtgtgtttcctccctacacaacaggagtccccaactcccaggcctctgaccagtaccagtttgtggcctattaggaaccaggccacacagcaggaggtgagtggcaggcgagcaaacattaccgcctgagctctgcctcctgtcagatgagtggcagcatcagattgccataggagtgcgaaccctattgtgaactgcgcatgcgagggatctaggttgcaagctccttatgagatctaatggccccagaccacccgcaccctatctgtggaaaaattgtcttccatgaaacagatcactggtccaaaaaaagttggggactgctgctatacagtactactttctatatttaatacgtttctgctgaaatcaattgaataggaaattgtatccaaattacatatatattacacacatatgtaaatatatattatacacatataaatatatcatatctatctatctatatatatttctcccagataattaagtttggcctgacaaaaaaattactaaaatacaggtaattttgtaaaactccaacactgtattttcactcagctattaaggcttagagtaccttaaatggtatttggatttcaaagagcagatgcttaaactgttttatttatttatttatttattttatttttttgagacggagtctcactctgtcgcccaggctgkagtgcaatggygtgatctcggctcactgcaacctccgcctyctaggttcaagtgattctcctgcctcagtctcccaagtagctgggattacaggcgtctgccactgcgcctggctaatttttgtatttttagcagagacagagtttcaccatgttggtcaggctggtctcgaactcttgacctcaggtgatccacccgccttggcctccaaaagtgctgggattacaggcgtgagccaccgggcctggcctaaattgttttagatttagtgctctgaatgaataaaatgcaaagcactttaaagcttaaaattactatacatttgaagtgttactattttaatttccatttgtaaagaatttatccaagagagagttgaggggtttattataatcttctgtagtgactgagaatagttgtcttatttctcttcctacaatcttcattttctgtctggaactggagattttattttttcacagaagagctggttgttctgccagaaaacctgacttcagtatttgtaaactgtttagtgtaagtatacaacatatgtttactatgattattgttgttcctatatcccatagaaattattttttacttcactgagtgtttaccttttattttttatttattttgagacagagtctcactctgtcgcccaggctggagtgcagtggtgtgatcttggatcactgcaacctctgcctccggggttcaagcgattctcctgcctcagcctcccgagtagttgggcttacagggacgtkccaccacgcccggctaatttttgtatttttcacagagacggggtttcaccatgttgaccaggctcatctcaaacccctgacctcaggtgatctgcccaccttggcctcccaaagtgctgggattacaggcgtgagccactgtacctggcctaaattgttttagatttagtgctctgaatgaataacatgcaaagcactttaaagcttaaaattactatacattttaagtgttactattttaatttccatttgtaaagaatttatccaacagagagttgaggagtttattatgatcttctgtagtgactgagaatagttgtcttatttctcttcctacaatcttcagtttctgtctggaactggagattttattttttcacagcagagctggttgttttgccagaaaacctgacttcagtatttgtgaactgtttagtctagtgtaagtatacaacatatgtttactattgtcattgttgttcctatatcccatagaatttttttttatttcactgagtgtttaccttttattttttatttatttacttattttgagacggagtctcactctgtcgcccagactggagtgcagtggcgtgatcttggatcactgcaacctctgcctcccagttcaagcaattctcctgcctcagcctcccgagtagctgggattacaggcacgtgccaacacacctggctaatttttgtatttttagtagagatggggtttcaccatgttggccaggctggtcttgaactcctgacctcatgtgatctgcccgcctcggcctcccaaagtgttgggattacaggtgtgagccaccgtgcccagcctcaaaacctttttataaatagagatggggtctctctatgcagcccagactgatcttgagttcctggcctcatgcaatcctgccaacttggctttcccaagtgctgggattacaggtgagagccaccctgcccagccaagtcttttgactctcagtttgacacttaaatgatcatgtgattcttctaacagtatacatagcatcgatatgcacaaacggaactcctaaataatttgttcttctctgcttgaagagaaacaactctgataatgcatatctgtgccccaacaaaagataattctatgaaaaaagatcaagatagaacaaagaaactctatatgagggaattcatcagttgttaaaagtgtctactttagagtgtgtggtgaaaagaaaattcatgcacactaacacacaaaagtcagtcaactggacgaagactaaaaaagatggagggagaggggcccttcccaactcttatgagaccagtattactctgataccaaaactagagaaacagcactttgggagaccaaggcgggaggatcacttgaggtcaggagtttgagaccagcctgaacatggtgaaaccccatctctactaaaaatacaaaaattagcctgatgtggtagtgggcacctgtaatcctagctacttggaaggctgaggcaggagaattgcttgaacctgggaagcagaggttgcagcgatccaagatcacgtcactgcactccagcctgggcaacagaccaagactgtttcaaaaaagaaaaaaaaacgaaactaaaaaacaaacgacctctccctcccagagaaacatattataagaaaagaaaactaaagaccaagacctcttatgaatatagacacaaaatcctcaacaaaatactagcaaactgaatccagcaacataaccaaatgcaatcatagaaacacaatgttgatttaacattcaagagtcaataaatataatataccatactaatagaatacatgacaaaaaccacatgatcatctcaatatatgaagaaaaagcatttgacaaaatttaatatccatttgtgataataaaaaaaagtcaacaatctagtcatagaagaaaactccctcacccggataaagggcatctatgaaacacccagagcaaaacaaggatggctgctcttgccatttttattcatcattgtactagagttctagccagggaacttaggtgagaaaatcaaataaaaggtattgagattggaaagaaaaaagtaaaatgatctttatttgcagatgacgtgctcttgtawatattaatagaaattcttaaggaattcactaagaaacaactattaggactaataagcaagtatagcaaggtggcaggatacaaaatcaatatacgaacatcagttgtatttctatatactagcagtgaaaaatgaaaaataaaattaataaaacaattgcttttatagcactatcaaaaaataatatacttcagaataaaatttttttttcagatggagtttcactcttgttgcccaggctggagtgcgatggyacgatctcagctcactgcaacctccgcctcccaggatcaagcgattctcctgccttagcctcccaagtagctgggattacaggcatgcgccactacgcctggttaattttgtatttttagcagagatggggtttctccatgttggtcaggctggtctcaaactcccgacctcaggtgatccacctgcctaggcctcccaaagtgctgggattacaggtgtgagccaccgcacccggcaggaataaatttaacaaaagaagtgcaaaatgcaaccattcttatacaccaataacagacaaacagagagccaaagcatgagtgaactcccattcacaattgcttcaaagagaataaaatacctaggaatccaacttacaagggatgtgaaggacctcttcaaggagaactacaaaccactgctcaatgaaataaaagaggatacaaacaaatggaagaacattccatgctcatgggtaggaagaatcaatatcgttaaaatggccatactgcccaaggtaatttatagattcaatgccatccccatcaagctaccaatgactttcttcacagaattggaaaaaactactttaaagttcatatggaaccaaaaaagagcctgcatcgccaagtcaatcctaagccaaaagaacaaagctggaggcatcaggctacctgacttcaaactatactacaaggctacagtaaccaaaacagcatggtactggtaccaaaacagagatatagaccaatggaacagaacagagccctcagaaataatgctgcatatctacaactatctgatctttgacaaacctgagaaaaacaagcaatggggaaaggattccctatttaataaatggtgctgggaaaactggctagccataagtagaaagctgaaactggatcccttccttacaccttatacaaaaattaattcaagatggattaaagacttacatgttagacctaaaaccataaaaaccctagaagaaaacctaggcaataccattcaggacataggcacgggcaaggacttcatgtctaaaacaccaaaagcaatggcaacaaaagccaaaattgacaaatgggatctaattaaactaaagggcttctgcacagcaaaagaaactactatcagagtgaacaggcaacctacagaatgagagaaaatttttgcaacctactcatctgacaaatctggatctaatatccagratctacaatgaactcatacaaatttacaagaaaaaaacaaacaaccccrtcaaaaagtgggygcaggatatgaacagacacttctcaaaagaagacatttatgcagccaaaaaacacatgaaaaaatgctcatcatcactggccgtcagagaaatgcaaatcaaaaccgcaatgagataccatctcacaccagttagaatggcgatcattaaaaagtcaggaaacaacagrtgctggagaggatgtggagaaataggaacacttttacactgttggtaggactgtaaactagttcgaccattgtggaagtcagtgtgacgattcctcagggatctagaactagaaataccatttgacccagccatcccattactgggtatatacccaaaggattataaatcatgctgctataaagacacatgcacacgtatgtttattgtggcactattcacaacagcaaagacttggaaccaacccaaatgtccaacaatgatagactggattaagaaaatgtggcacatatacaccatggaatactatgcagccataaaaaatgatgagttcatgtcctttgtaggaacatggatgaaactggaaaccatcattctcagcaaactaccgcaaggacaaaaaaaccaaacacagcatgttctcactcataggtgggaattgaacaatgagaacacatggacacaggaaggggaacatcacacaccggggactgttgtggggtggggagagtggggagggatagcattaggagatatacctaatgctaaatgacaagttaatgggtgcagcacaccaacatggcacatgtatacatatgtaacaaacctgcacgttgtgcatatgtaccccaaaacttaaagtataataataaaattttaaaaaaagaaaaaaaaaagaagtgcaaaatgtatacagacgctcctcaacttgtgatggggttacatctcaataaaaccattgtaaattgaaaatatcctaagtatggccaggcgcattggctcatgcctgtaattccagcactttgggaggctgaggcgggtggattgcctgaggtcaggagtttgagaccagccaggccgacatggtgaaactccgtctctactaaaaaataaaaaataaaaaaaaattagctgggcgtggtggcacgtgcctgtattcccagctactcaggaggctgaggcacaagaatcgcttgaacccaggaggtggaggttgcagggagccaagatcrtgccactgtactccagcctgagcaacagagtgagactccatctcaaacaaaaaagaaaaaaaaaagaaaatatcatgtccaaaatgcatttaatacacataacctaccaaacattctagcttagtctagcctaccttaaaagtgtccagaacacttacgttagcctacagttgggcaaaaatcatctaactcaaagccttttttttttttttttttgagacagggtctyactctgttgcccaggctggagtgcagtggcacaatctcagatcactgcaacctctggctcctgggttcaagcaattctcctgcctcagcctcccaagtagctgggattacaggcgcacaccaccacactcggctaatttttgtatttttagtagagacggggtttcaccttgttggtcaggctggtctcgaactcccgacctcagatgatccacgcatctcagcctcccaaagtgctaggattacaagcatgagccaccacgcccagccccactcaaagcctattttataataaaatgtttactatctcatgtaatttattgactactgtactgaaaatgaaaaacagaacagttgtataggtactcaaagtatggtttcyactaaatggtattgctttaacaccattgttaaataaaaaagtctagacgaacmwtcacaagtcaaggaccatctgtactctgaaaattataaagcattgttgaaagaaatgaaagaagacctaaataaagggataaacagcccctgtttctgggtcaaaaaactgaatgttaagatggcaatactacccaaattkatttacatattcaatgcaaactccaacagaatttcagctggattctttgcagaaattgacaagatggtcataaaatttatatggaaaggcaaaggacctagaatagccaaaacagtcctgaagaaacttcttgaaaaagaactagcaaactttcctatttcaaaaattgctacaaaaaaactataatcaagatactatagtattggcataaaaacagacatataaattaatggaatagaattgaaagtctagaaataagcccatatatacatctatgaccagttgattttggacaagggtacaaagataattcaataggggaaagaaagaatagaatagtcttttcaacaaatggtgctgggacaactggatgcccacgtgtaaaatagtaatgttgatctcttcctcatatcatattcaaaaattaagtcaaaatggatcaaagacctaaatgtaagagataaactataaaactcttagaggaaaacctagccatgaatgttcatgaccttagattagacaacagttttgtatgacaccaaaagcacaaacaacaaaagaaaaaaatamactagacacatcaagattaaaaagtttttttagctgggcatagtggcatgcgcctgtagtcccagctactcagaaggctaaggtgggaggattgcttgaggccaggagagtccaggggtttgaggctgcagtgtgctatgattgtgcctatgaatagccactgcactccagcctgggcaacatagtgagacccatctcttttaaaaaaaaaaaaactcctttgtacatcaaaggacaccatcaagaaagtgaaaagacaacccacagaatgggagaaaatatttgcaaatcataaatcacttttatgatgagggatttgtatccaaatcagtaaagaacactttcaactcagaaataaaaagacaacccagtcaaaaaataatctgaatacacatttttccacagaagatataaaagagcagataagcacatgaaaagatgctcaacatcatagccatcaaggaaatacaagtcaagatgataatgaaataccacttcacatccaccaggatggctatgattgaaaaggcacataataacaagtgttagtgagaatgtggagaaatcggaacactcatacactgctggtggggataaaaaatggtacactcgatttgttttcaaaactagcagttcctcagaaggtaaaacatagaattaccatatgacccagcatttccacctctagtattaactcccccgggaattaaaacataygtgcacacgaaaacttgtacacaaatgttcatagcagctttattgataatagctaaaaaaacaaacaactaaagtgtccatcaactgatgaatggttacatgaaatgtggtatctgcataccatggagtattatttgacaacagaaagaaatgaaaatgaagtgctgatatattacagcatggacgaacctttaaaatgttatgctaagtgaaagaagccagtcacaaaagaccacacattgtatgattccatttatttttattttatttatttattgatagggtcacgctctttcacctaggctggagtgcagtggcatggtcatggctcactgcagccttgacctcctcccagactcaagcaatcctcccacctcagcgaccctagtagctgggactataggcacgcaccaccgtgcccagctaattttttctgggtatttttggtagagatggggttttgccatgtggcccaggctggtctcaaacccctggcctcaagctatcctcctgcctcagccttccgaagtgctgggattacaggtatgagccactgcgcccagctagtttgtaatctctaactataaaatctgtaatagtttagccatttgtcagctttgtactaggaaataattatacttgtcactttaagtttcagaacccaagaactaaccaatcttgttttcattaatgtcatcctataaatattctgtgagtstttaagcagagataatatttcacttgttcgactgtctctgtgtagcaactccacttactagatttttgaccttgaactaatgacataacacagtcatgcctcagtttccctatctataatatgaagataataatactctctaccccatacagttgttataagcagcaaccaattaagcaaatatataaaaattgctttgaactcttatgggacatatagcaaattaccatcaccacttaacatcaatcattatagaaaaaactaaaattgcctttaatagagtggatcaaaacataatatgaatatatttcttccacatccatgaggatgcaacagaatatattaattttagttttacagaaacattactgttttctcatactacatgtgaaattatatacccagcataatactgaaaaaaaaaaatccaaagagttttcccctgcttagtttgactctatgcagatgtaaagttagaggctatttatcaaagacagaaatttcagcacaagcatacaggacacctttaaattgattaagtaatttagttagtatttccagacagaatctacttattttcattctaataaaactaattaaggtatttgactgccactggaaaatgtcaattacaacctatttgaaataatgaggtcttgagggcaccaaaaaaccaaaataatttatccgataatactctgaaaaacttctctcatgaataaaggatgacactcattgaactattcactatcaaggactattgtcaagtttatagagactgaggtgaatcaaaatgttttcttactgtattttttgtgtatatgtttctgtattatgtgaaacttagcatgattagctaagtttaaaatattcctgtattttattccataacctaggaaggcatacaattcagtaaaatattcactctaatttattctgagaaaaagctctccctaatttagatacaggcttaccaccacttgcctttcccatactttttataatttatgtattgaccgtttatacacagggatagtggggaccttcttggcatctcgaaacctgatggcagtttccaggacaataataatttataaaatgttatgacttatacayagtttcatatttaccatcccatttggtcctcacaattctacagaggaggcatggcattatcaccagggcttcaatgcagaagtctgcaggttgtatgcaaacaactccaggaggtgctatttaaattgtagtagctataaatgtttatacttgttattaccatttcccagcagatggcagtatgatggcttcaagaaggagacctgatttttgttttgttttgttttgttttttccatagttccaacaaaggcatgrmagagacaaatggtggggctaatttattaccttccccttttgaatgagcctcagagaagcaaaacaattcactcaacattcctgataattaaggcagaggtgaggactaagatctgatttttttttatcttgcccaaattcctatctaaggggtctggggagttcatgccctacaaaccataaattctcatcggatgcgttttatttaaccctgtatatcaagagttactttccaatctgatactggcaaagaaagaaaaccaaaatatatttccttgccataccttgaaattgccctgcaaagtctcttgtgggaaaaatccacattctgtagaraatcccctttccccgctttgttttccttccttcctttccagatccaggagataatcagctaagagccaggcacccttctaagtgcaataagaaacattttacaacctgctctctctgaagtcagctatctgagagcttcctctgcacaataaaacttggtctccacaatcctttatcttaacctgaacattttctttccattgatcccacgccttcagacaaactcaaccaattgtcaaccagaaaatgtttaaatttacctatagcctggaagcccccgctgtgagctgtcccacctttctgaaccaaaccaatgtatttctttcttttttcttttttttgagacagagtcttgatctgtcgcaggctggagtgcagtggcgcgatctyggctcactgcaacctccgcctcctgggttcaagtgattctcctgcctcagcctcccaagtagctgggactacaggcatgcatcaccatgcccagctaatttttgtattttttttagtagagatggggtttcaccatgttggccaggatggtctcaatctcttgacttcatgatccacccaccttggcctcccaaagtgttgggattacaggcgtgagccaccgcacccggcccaatgtatttcttaaatgtatttaattgatgtctcatgcctccctaaaatatataaaaccaagctgtaccccgaccaccttgggcatatgttctcaggacctcctgagggctatgtcacaggccatggtcactcatacttggctcagaataaatctcttaaaatattttacagagtttgacttgcttcgtcgacagaggcatttttttttcctggaaccaggttaaataaatacctatggatgggaaaacataaatcatgggcatacattgagccttgtaggagaagaaaaggccgaaagggtatatggactaggtatactgttttcaaaggagttctttaaaaacaaattaatgtatttattttaactgacaaaaattgtacatatttatcatgtacaacatgatgttttgaaatatgtaggcaaagtggaaattgagctaattatgacatgcatgacctgacatacttatcatgtttgtggtgatgtaactgagcctatattatcaaaatcattaaacgtttgttttttacttattttcctttctctttgtccttttcttcctccatgcatgactgcttgcacgtagtcattcggtagacggtagtcactaataattgattaactttgcatcctaaccctggcagccagtaagattaatgaacttgttttcctttcaaagaacaatgatccttaggtcatgcagacctccttgatggcatccagaagtctgattgagctgcgggacacaaacaactttgatcattgggggatttcattctcctgcacagctgccttactcacaaaaacccccagttacgttcaaaggcaggtaggatttgaccgattgcctctcccacaatgtcatttttggaaaaatgaatacacctttctctgctgctaagcactgatgtgtcagtatttggcttactgcccatccaacacgtggacctacatttaggggttctacaacactgagaacacttaaaatctactcttttattttcaatacaatacattgttattaactacagtcactgtgttgtactatagatctcttgaacttactccatcaaaggggtacttgatcagaaggaagaaaacctgaactgctgcatatcacctggttcagggmgttacagccttgcctgtgcccctctacactgtcatgagctgttagctaagcacagctgttggattagaggcacaaggcggcctctcccatgcagtgttttggatccaggccaggagaaatcctaagagataaaggaactatgaaaatacaaactgtcagggatagcattaggagatatacctaatgtaaataacgagttaatgggtgcagcacaccaacatggcacatgtatacatatgtaacaaacctgcacattgtgcacatgtaccctagaacttaaagtataataataataaaaaaaaatgaaaatacaaactgtcacgttccaagtatgttgacactrtaagctgaggtgcgcaaaactgacagccgcccaacaggacagtgctattcctacaacgcctgcaactgcaaaatccaaaaagctcgaaatcaagttttatcataattcacttgattatgataaaactcacttggcagtattcagacagtcctaaactcccagggcagccaaactgcacctgactggtgtaaggcctttaatggtcctcatcttattcttagtgtgaatactcatgtttcactgcagaaatgttaatattatttgatcaccggatgctgcatctgatcccagtggagatatcacaatctatgtggtatatgctgcatattacctttctacaatctgaaacctgaatttttaaaacacacctggtcccaagcattccagatagctatacttaaagtacatttgattggttcctcttcataatttccagaacaatggtactgacacatatatgcttcaggtgcacagtactctcattgatcagacttgccatattatttttaatccttattaacatcaaagccaattacaataaattctaggcaatgtatcctgtaatgtttttgtaatgtgtttatttacataaatttaacccaaaaagatgtgtggctaaggaaaaaactgtattgcaaaaaaatagttcatgagaaggtatacttctcatgaatatacttgtttgaataaaatatattcttaggaaaagctgacatgctttttaaaaacgctgattacaagaagataaatggatattctacctaaaaaaaaatttacagttagtgttgttagtatgagattggaagctgcaaagcccttcctgtgttgaacctggttttcacaactaaatctggagcaaactttgggatataaggacctacctgcgcccctctacatctttgcaaactgtcaacatcagttaagggttgaagaaagatttgaagggacacagctttctcaatagactgatggagggtttatccagcaaagtttttctcaccctaacattttgctaaatgaatatcctttttcagaccttcttgcaccatgagacttaactgttatttttctatattcctaccagtatccacatcagtcccttttggggtgattggccttgagctaatagcccaaaaataatagttaataataattatctaaattattataaagtgagtgcctaataaattaaaggaccaatggagttgaaataatgataacagttcataattaatgagcatttactgtgcactagtccctgttctcagcactctgcatataactcataaaccttcatgacactctaacgaggaaggtattatgtatcccattccatgggaaagtaaagtgctgtcctctaagaatgactgtcaactagtggctgactctcagagcatttgaaatacatggggagtttctggtcatcacttcaactgaggaaatgtaaccagcatctcatgagttgggatcagagacgctaaaccttctcaaggaagaaaacattctctggcaatgaggaaccgcctaaaccaaacgaaaacgacagtctattgagaactcaggagagccagtctccagctgagtacttacttgttttccaccattcttttaattgaacttttcatcttttttagacttttgtattacccaattcagatcacatttagaattaaatctgagcacagctctgagctttcagccaatagatgacctgsttgaaaattgttgtgctgtttcatgcatagaagcctcttttcctattatcttctgcactgccaccaaaacaaaaggaataaacaaaaagcctgaacccactaactttttatctcaaagccaccaatatgagagttaaacaaaactcataaaacttctatttaatggtattcaatctggggggcacaaattcttatgaatacatctgtcatgtaaaactttttcacaaggaaatatgttttctgtttcaatcaatctagtcatattagtgtaaactgagcaaaaagacatagaaaataaacctgttaacaaatcaacatcattggctctctgttctcttacttatttctgctaatttcacttttccagtcatcatttccgtggaggcagatgactgccagaggcttaacagcctctaattatcagctatacatgaagaaccttggagagataagattgagattgaagattaagcctcaaatttaatcacttaacaagcttgttataccagatttctagttcagtttctagttcagtagatctacacggagctccacaatttgtataaataagcccccaggtgatggtaatgctgctgtttcttaaacaacatttccattacatgtggcaggaaggcaagactctaaactagaaagcgattttttcaaggctgggatcttcacaagacatttgttttgaagaygctaaaaatttaaggtttaactcatgttgcaataagaatcctttggtcttagattatacctgttctgtatttttaatcatacggtatcctggataatttgtacataggaagtcctttacgtcttttaaggcttcaagtattcctgtgaaatgtaaccataaatctggaagctataaacacagttgcttgtgatgaaaaactgcatggtttccatcattttacttgtatataaagcttttgaattcttttgttaatcagaaatgcattaaggctctgtcttttcttttttctttttcttttttttttgagatgacgtttcactcttgttgcccaggctggagtgcaatggcgatctcggctcactgcaatctccacctcctgggttcawgttattctcctgactcagcctcctgagtaggtgggattacaggcacccaccaccacgtccagctaattttttgtatttttagtagcgatggggttttaccatgttggccaggttggtcttgaactcctgacttcaggtgatccgcccgcttcagcctctcaaagtgctgggattacaggtgtaagccaccgcgcccggcccaaggaacttttttctgtcttttctcagacttcattggagctcaatttgtggctctcagaagttcatttcttgaagtgatgcaaatgagagactgcatttctctttaacgctccttctgtcatgtctttctaaaatactgcactttcgaagtttctagytgaagaagcaatatttagaaaagaaagctggggctgggcgcggtggctcacgcctgtaatcccagcactttggaggccaaggcgggcggatcacgaagtcaggagatcgagaccatcctggctaayacggtgaaaccccgtctctactaaaaatacaaaaaaattagccgggcatggtggcgggcacctgtagtcccagctactcgggaggctgaggcaggagaatcacttgaacctgggaggcggaggttgcagtgagccgaaattgcaccactgtactccagcctgggcgatggagcaagactctgtctcgaaaagaacagaaaagaaaagagaagaaaagaaaaaagaaaagaaatctagaagtgaaatgcgagaatcagaagtcccacaacatgctacctgcaatctacaagaaattcactctagcggccctamacaaagttcttacctgcataagctgctgcttcaacttctgtatttctgaaatgttcagctcactgaataagtcrgagacagggttcagagactctcctttccttaaggtgggagtccgatagtctccattcagtttcacaagaggcccatggatatgaccgttcattttgtcatcattgtttggttcactcccatcctcggcaaatttgagtccatctactgagatgctgatatggttatcattgaggctgatatactgggagagctccttccgcaggttgttcttttgctctctttcattttttaaagtctcragggcttcttccagttggtgctcagcaatctctttcaatcggatggcatcttccagctggctgttcagcagtaccgtctcctcctcaaatcgcttaatctcatgctttaagccttcgtattcaacctgaatcagacaggataaagaagattcataaaactaaaatgtggatcttacaaaactgccattaaacactctagtggacctaatcacttaacaaaatacaacatgagtctaaaaaataaataataaaaagcacacaatatatccttaaagttatataggatagtttctttagaaattatataccatatataaaatatataattaggtattatagtgatataacataaatgttatatataattagatctaataatatacatctatataactctctatataattcaatttttagcagagatgaagagtctattgtcttaggatttctttcataggatccagtggtcaaaagsgggcactgtttgcccaataaatagggaatattttttgtaataacttatgagaatatttgcaatctaagaaaagattgtatcatcaccattactttgttttatttccttattaataatgaggaaatttttatacccagagataaatttgttaacgattataataacataatctcagtaaaatgtttgagagtaagatgaaaatgcaaagatcattgttatgtgcttaaaggatagacagaatctgaaagaacagttacataaactatccagtaacaaaaaatacctacattgcttttgtttgtttgtttgttggttggtttgttttgagagagggtctcgctctgttgcccagactggggtgcaatggtatgatcatggctcactgcagcctcaacctcccgggctcaagtgatcttcccatttcagctcctcaagtatcacaggcatgtgccaccatacctggctattttttttattttttatttttatttcttgtagagacggtctcactgtattgcccaggctgctcttgaactcctgggctcaagcaatcctctggccttggcctcccaaagtgctaggattatatgtgtgagccactgcacctggccatatrttgttattgaggtaatattcttttgaaatgcaataaaaataaacctcctcaaacaatctcttggtcatgaaggcccacgggtgacagggatgtctcctctgagccgacatgcctccttgggatcctttccatggcacttatcacatgccaccttttaagaaacattttatctccacaagtacactgtaatctccttagagaaagtaagtacttttttatccacctcattgctcctcatagtgcttcagwgttccttcatggkgtktaaaacasaattctgctgttcaatgtgcatttgctgaataaagaactatggagaatgaaaaaataaagtagaaaaagtaaaataaagtcatcatgatattagatgctaatacamactatgtgctyagwttcatatttattttagcayatatattagtttgaactygaattttaaaaaatattttaaaaactgaagaatagggaacattgaccagtatcatcatcatatatttctctttctcccccaacttccctttatataatctcaatgcaatggtttgtctcgcaaaggttagggtagagatttagttgggatgtagcctggctgatgtaacagacacctaagcaagagtgacttagtcaagatggaactttttctatttttttttttttgagacggagtctcgctctgtcgcccaggctggagtgcagtggcgtgatctcggctcactgcaagctctacctcctggttgacgccattctcctgcctcagcctcctgagtagctgggactacaagtgcccgtcaccacgcctggctaatttttttgtatttttagtagagacagggtttcaccatgttagctaggatgatttcaatctcctgaccttgtgatccacccacctcagcctcccaaagtgctgggattacaggcgtgagccaccacgcccagccagaggtttttctcttatgtaacagtatggaggtagacaggaggagattcctcatggaatctctgctccatgaggtcatccaggagccaggctcttcctctgttgttgtacagccttctagtctagaccatactatctcaggtggcttgccatttgatcatgttctaagyggtggcacaaaataaggagcacactgtctccctttaaggacattaaaagttacccacatcacttgttatatatcattggctggtactagtcttatgccatttggctgcgaggaggagtgaagaatgtagcctttactctgggcagcactgggcccaggaaaaaactgagaaatacaccgtcagaagggaacaatgaaagctgatggtaaaccagcactcactggtcaccgaaacactgtggtgctctaataggatgcaactcataaagacatatgtatagcagatgtttctaacaatgccagttgtatatgtgaatatggatagtgttatttcagtgaaagaatgtgctcaccacactatggtgtgtgaaatgcattatgaggactgggcacggtggctcaggcctgtaatctcagcacctgtaatctcaggcctgtaatctcggtgaattgcttgagcayaggagtttgagaccagcctgggcaacataatgaaaccctctctctacaaaaaatargaaaattagccaggtgtggtggcgtgcacctatagtcccagctattcgggaggatgaggtgggmggatcactcgggcccagggaggtcaaggctgcagtgagccctgatggtgtcactgcactccaatctgggtggcagagtgaggccctgtcttgaggraaaaaaaaaaaaaaagaaatacattatgtacaaaagatgcctctaaggcaaaaaaaaaaaaaaaaaaaatggtcattggaatttcaacatgtccctgatagaattactcaaaagagtcaatattggagaccattatttataatatccattatttagaatgaaaactagaaagtgctaattgttctaccatgaatatgcatttgaataaatataacaaaaaattaacaaatctatcaatggcatactaccaataactgtcttctaatcaagtaggagtttctgggttacatatcaactacattacttaagattatgagtacttcatgggagaaaaattgcactttgggaaaaatgataactgggcactataaatagcatgttacaaacatgatggcatggaaatgaaatatacttttcacaactccaaggagttattacctggcctgggacacctaataacttgacaggccctggctatctactacctgctcaaaggcatgtgtccctgtagtttgcattctgtactctrgtgggctccccaggctggtgtgtgctcccgtgtcccttccaccaattcagacatcaaatgatttaaagcagagatcacaaggggtgcccatagaccatcgagcctatagatgtgctttatttggcttgtaacacgttataaaacttttggaattgattgccaatatttagaaaactgatgatttcacaaacatttgaaaacttctgatttcttttttaaaaaaatcaaaagttcgggctgggctcagtggctcacgcctgtaatcccagcactttgggaggctgaggtgggcggatcacgaggtcaggagatcaagaccatcctrgctaacacagtgaaaccccgtctctactaaaaatacaaaaaattagtggggcgtggtggcaggtgcatgtagtcccagctactcagaaggctgaggcaggagaatggcgtgaacccaggaagcagaggttgcagtgagccgagatcgcgccactgcactccagcctgggcgacagagcaagactccgtctaaaaataartaaataaaaataaataaataattcaggcaacactgggcccaccttcacagagcacaaaaatcacctgtaagtgagcactggctgttccttttccatctactttttcttttgtttgtttgtttgtgacagggtcttgctctgttgcccaggctagagtacagtggcttgatcacagctcactacagccttgatctcccagtctcaatcaatcctcccacctcagcctcctgggtagctgggattgcaggcgcatacctccatgcttggctttttttttctttttgtagagacaaggttttgtaccatgttgcccaggctggtctcaaactcctggaccgaagcaatccttccacctcagcctcccgaagtgctgggattacaggcgtgagccactgcactcggcctctactttttgtttacatcttgtacttaatgctatttataagctgcttgtggtcatttgagttcactgctcctgccctgtgactgactctctccaaccttttccaccgagcaaacaacctttcccacactaaagcatccagycacctttcctttatacttgctgactgactgcatttcaactagrttgttacttcaagcaaaaacatgcattttttactttatctctggtagtgaaatgaaaggttcattctctgattataggaatctcaatttgttagccaggaagcagggggaaactgaggatgaagtgtggaggaagagaggaatccagaaacgcatgctcaacatgatttactgctttgcaggtgacttgggatgaaggagtatggaaatcagaagggcctttacctccttatgaaaggagaagcaaggattgccctcagtgtggttataagaaaggcaacttggaaattgcttcagacagcagtgtgtttccttgtgtcatggtttctttcaggcctgcttaaatactgtaaagttgggccgggcgcagtgactcgcgcctgtaatcccagcactttgggaggctggggtgggyggatcatgaggtcaggagatcaagaccatactggctaacacagtgaaaccctgtctctactaaaaatacaaaaaaaaaaaatttagctgggcatggtggygggtgcctgtagtcccagctactcaggaggctgaggcaggagaatggcgtgaacccgggaggcagagcttgcagtgagccaggattgcttccactgcactccagcctgggcaaaagagctggactctgtctccaaaaaaaaaaaaaaaaaaaaaaaaaaaaaatactgtaaagtcatcttcctctcaaccctttccttttctttccctggacaacataggacacctcttgccaacctttcctagtatttcaaccaaccctctgactgccccagattatgtgataagcttatatttgcagacattactttagtttgcattgtagacctgttttgctgcaatctttgttaaactgatggcctagaccagaggttgtccaataatagtatgtcctggctgggcacggtggctcatgcctgtaatcccagcactttgggaggccgaggcaggaggatcatgaggtcaggagatcgagatcatcctgactaacacggtgaaacaccgtctctactaaaaaatacaagaaaattagccaggcatggtggcgggtgcctgtagtcccagctacttgggaggctgaggcaggagaatggcgtgaacccgggaggcagagcttgcagtgagcygagatcgcaccattgcactccagcctgggcgacagagcgagcctctgtctcaaaaaaaaaaaaatagtatgtcctccggagcaaatccagcccaccacctattttcgtgtagacagttctattggaacacactcccatgtatttgtttacatgttgtctatggctgcttctaccagagcagagctgggtagtcgcaagagagatcatgtgacctatgaaacctaagatacttactatctggcccttcacagaaaaagtttgctaactctggtcttgacttgaagacattaatttagtttgcactgcagagtttaaaattcagtagtatttattcaattgatggcctagacttcctgtaagacccratctcttgctatgtcacccaggcaggagtccagtggcacaatcatggctcattggagcctcaacctcctggactcaagtcatcctctcgcctcattttttaaattktttttttgtagagacgaggtctcactatgttgcccaagctggtttcaaactcaagtgatcctcgtgacttggcctcctaaagtgttgggattacaggtgtgagccaccgtgcctggccctgatctctttctgtctgggcagcttcactcacaccactcactcaaatgtggtacaagctcctactattcacccagctgtttcatgtttctccgcctgggaaaaggctgtcatctggaaaactcttattcctcttttaacacctaagttaagaatctcatcctaactgaagtctttggtgcccactgaggcaaactcatcactcctttctgtgccgttgttgtaaggctgcaccatgtgattagagccccagcaaagcagaggaagcaagaaacggaacaagaaggtgcttaaaaactggtgtttgatattttaaagacaacatcaaagcagtcaccataggaaaaataagtgctttattaggattccttatggcaacttcatagtttaataactttatttttaactacatgacggtcaaggttagatatcataatcctttcagagcttaggaactctaaagatcttaatctatccctgtgttgccaaacctaacatgtggctttaatattcatttacacaaattgctaggagtccctattgggactacaagctctttgagccagtgactgtatcttttgtctctaaaaagtacatgatctcatagagagatacmcctgaaataccggttaaatgaaataaaacaactgaatacatttcctaggtcttttatgatattaccttatgatattctttttttttttttttttttgagatggagtttcactcttgttgcccaggctggagtgcaatggcatgatctcggctcactgcaatctctgcctcccaggttcaagcgattctcctgcctcagcctccctagtagctgggattacmggcatgtgccaccacgcccggctaattttgtatttttagtagagayggggtttctctatgttggtcaggctggtctcgaactccagacctcaggtgatctgcccgcctcggcctccccaagtgctgggattacaggcatgagccaccatgcccagcctctttttttttttttttttttttgaggtggatcggagtctcactgtgtcacccaggctgcagtgcagtggcgtgatctcggctcactgcaacctccrcctcctgggttcaagcgattctcctgcctcagcctcctgagtagctaggactacaggcacctgtcaccacgcccggctaatttcttttttatatttttagtagagacagggtttcactatgttggccagactgatctcgaactcctgacctcgcratccgcccacctcggcctcccaaagtgctgggattccaggcatcagccattgcacccagggkgatattcttatatattattacctgacattggaggaaatgtttcatattagaagtgtgactgaattgttgcttttttttttcccattttttttttttttgagacagggtctcactctatcgctcaggctggagtacagaggtgtgatcacagctcactgcagcctcagcctcccaggctcaagtaatccttccatctcagcctcccaagtagctggaaccacaggtgtgcatcatcacacttggttaattttttttgttgttggtagagatgaggtctccctatgttgcccaggctggtctcaaacttttggactcaagtgatcctcctcagcctcccaaagtgctgagattacaggcatgagccaccgtgcctggccagttttcttattctttcaacaagtatttatttaatatctactgtggatcaggctctatcgtaggtgctatatgttaatggaaggaaatggaatgtaaacaaatgaataaatagactctttatagaaagtaagaggtgttttttaaacaataattacactgtacttagaaaataataaataactaaaagaaaaataatacttcagaagggaaaattctttgaactaagcattttaaaatggtagtagctttgctgtttagagaaacatcaaaccaggctgaaggactatacaacgtattgggaacttcagtacaaagtaacacagtccaattttgtgaccgaatgctactcattgtcatctctttaaaaaactctgtggcatttgtacatacaatattgtacttaacacttcattaattagggccgggcatggtggctcatgcctgtaatcccagcactttgggaggcagaggtgggcgatcacttgagtccagcctgggcaacatagggagggcaacatggcaaaaccctgtctcaactaaaaatacaaaaattagctggacatggtggcacacgcctgtaatcccagctactcaggaggccgagtcacaagaccaggaggcggaggttgcagtgagccgagattaagccactgcattccagcctgggtgacagagcaagaccctgtctcaagaaaaccccaaaaaaccaaaaaactttattgattagagagagtttatgatagatgctagcatctataaagaaagatcagttactactggaaacaaacacagcattttcttagctgggagagacttgtggcatttcagttcccccaatttcagggaataaaccagaatggtgctctgtgcagaaaatgattttgaatgaattaattagatacttaattgggaaaattagcatatggcatgttggaaataaaaaatgtgtaagtcccccctcctttttaaaaaacttctgagttaaccattggattccatgtttcaattactgggagaagggcatggggaaactcacaacaggaatgacagtacaaattctcccagaaccggcatctgggttaatgaatactcaagggataccttggcagtctttcaagaatatctaatactggccttcattaacctcctgagtccatcagtctccacatgcggtcagggaaggctctccagggaggctgctgatcgtgctctcaccatgctctagagagcagtgaggagtgtaggaatcrggaaggaagggccactttaaatagttgcacttcaagtaaatttgtttcaaatcctctatgtgtttcatcaataaccaaaaaaaggaccacaagaaaatacccttcttaggtcaggcgtggtggctcacacctataatctcagcactttgggaggctgaggcsggcagatcatgaggtcaggagatcgagaccatcctggctaacacgttgaaaccccatctctactaaaaatataaaaaattagccaggcgtggtgatacatgcatgtagtcccagctactcgggaggctgaggcaggagaatcgcytgaacccaggaggcagaggttgcagtgagccaagatcgcgccactgcmctccagcctggtgacrgagcgagactccgtctctcaaaaaaaaaaaamaaaaaaaaaccccttcttattttaaaaagtattcgagaagcatctttacaaatgtatttttctaagtctacatttctccactgtgagctcacttatcccagccaaatcaagacctggggagcctctggaatggccagccctcagcacacatatggggattcagtgcttacggaaggaatgaggcagaaacacatggggatactccagtagcccttttttgatggactgaaactgtccccttacatgccttccccccagcactccaaatctgggggaagtggcaatgatcagaaatcaaattttggccagacgctgtggctcgtgcttgtaatcccagcactttgggaggctgaggtggacggatcacttgagctcaggagttcaagaccagcttggccaacatggtacaaccctgtctttactgaaaatacaaaaattagctgggtgtggtggctcatgcctgtaatcccagctactcsggaggctgaggcaggagaattgcttgaaccaggaggtggaggttgcagtgagctgagatcatgccactgcactccagcctgggcaacacagcaagactctgtcgcmaaaaaaaaaaaaaagaaatcaaattttaattgtgccactacatggatttttctcttctggattttttttcttttccctcttaacccttatatctatcaatcaatcaatcaatcagtgtatcatgtagataccaactcaggaagggagtgaggtaaaagcatacatctgggctggcttctaagtttacagaggacaagaatcatgccctrtggattcttgtgtctgtccaacctagcacagcacctggcacataggctgttsatctgaactgagaggtggcaacagcgtttagaccagaatagaggtgtcgctgaggaagcaccttgaaaagaactcgaacatccaattcacctttgcttaattaactactygattcaactgtattcataaataaattcttctaaaattacagattcaataattattaatagttctgaaaatccacaatgcaaaccaatcaggaaaattaagctatcaaacccccattacagcaaaaaaatcatttaaatgtacgaatgtaatctttgtagtcaggttacagctgaaaaagaaaacaggcattttctttttcttttttttttttttttttcgagacggaatctcactctgtcacccaggctggagtgcagtggtgtaatctcggctcactgcaacctccgcatcctgggttcaagcaattctcctgccttagcctcctgagtagctgagattacaggtacccaccaacatgcctggctaatttttgtatttttagtagagacggggtttcatcatgttggccagactggtctcaaactcctgacctcaggtgatccacccgcctcggcctcccaaagtgctgggattacgggcrtgaaccaccacgcccggcctctttttcttrtaattttgctyttcttgatttawacttcataatccattcccctctacgatttgaaagcaatttacagaaaaaattttaagggagtgagagaccagtgattgtagggagaccctaagctcatagacaagcttacagacccaggctttttttttttttttttttttttttaagacggagtctcactctgtcaccaaggctggagtgcagtggcacaatctgggctcactgctaccttgacstcttgggttcaagtgattctcctgcctcagcctcccaagtagctgggattacaggaacacaccaccatgcccggctaagactcaggcttttaatgaraagttgtcaggttaaatttgttacgatacatttgacttatgaaataaatgaacacagagctaaaataaaaactaaaattctttttcttattcaatraaactttagtgtacactatactacttacaggtgtattttttccttctatattttagctgaaataggagggttgggacattgcagtacataaatgttatagagagaagataaaagagtaacaataaattctgacaagtttggagatttaaccctagtggtcagaagatgtagatccatcttcagtataacaaaaaatttcttaaaccttacctggttctgcttcaacgtggacactagtttctgcaatgtgatattttcttcttccaattcagtatagtcctgaaggagccgtgcctcccggaacttatattctcggatttcatccttcatccgtattctctgtagctccaccatctcattgttctgaaacaacagagtaaacagtcaatrtataactctcttattgtagattttacaaggtgtaaagtcctggtagttaaaaataataataaaaayacctcatggggtgtaaattgttactgcattttttcgaatggcaatttagtggtatctgtcaaaaacttaaaagcacatatatattacccagcaattcaacatctaaaaatcattcttaagtatgttttcatagaagtaaatagaaacagaaacaaatccatgtatacttacacaaaaaattggaaacagtctaaacgtttgctatttggggaacacattatcatgcatccattgaacggaacattataaaattattttaagaaacgagaaaggccgggcgctgtggctcayrcctgtaatcccagcactttgggaggtcaaggtaggtggatcacctgaggtcaggagtttgagaccaacctggccaacatggtgaaaccccgtctctactaaaaataccaaaaaaaaaaaaaattagccaggcgtggtggtgggcgcctgtaatcctagctacttgggaggctgaggcaggagagtcacttgaacctgggakgcggaggttgcagtgagccgagatcaggccacttcactccagcctgggcaacagagcaagactcyatctcaaaaacagaaaaaaagaatgaggagaaactttattgtactaaaatggaaatgtagtcacaatatattattaaatgtraaaagcaagtcatagattagtatgcatattaggatcccaggtatgttagaaatacagggaacacacacatacacagatacatgcacacttccatgtcagaaaaaatatttgtaagaatatccagaaaactgtcaatagcggtgacttataaagaattagactgggcaagccacagggataaggagaggagcctattcgtttgattttatgtccttctggatcatttcaattttttttttaacaacaagcttgtattaccaggacttatgtgtaaagttacaggatataaatcaatcaattaagtaaaatatttaactttttccataaacttatatggcaagtataagctatgttttagttcaaaatgtataatgaccacataacagatataaacatttatacatgtaacatattcatagtcatggaaagatgggatataaaagttttcttttaattaaggattaattagatttgtttcctattcaaacaaagagaaatatgggaagaagtatcatagaaaccaaaaaccacattttcttatgtaatacctagatatccatatgcgaaaaaaataagtcatgatgcatttggccttcacaccataatttgcagagccttgatatagtggtaggtaggactgacaatgaatagaaactgctattgcaacacagatgaatctcactaatatattgactgaaataagccagatgcaaaagactacatacaatatgattctgcatgtaaagttcaaaaacatgctatgtaggttcaattgtctcccaaaaaagacatgttgaagtcctaactcccagggtctttacaaaggcaaaaattaaaatgagatcattagaggaggcccaatccgatagggctgctgtctttataaaaaggggaaattcagccacacagaaactgacacatacttctgcatgtgggatgggaagactatgtgaagaaacacagggaaaagatggccacgtgaccatggaggcaaagaccgaagtgacccatctacacgccaaggaacatcaaggattgccagcaaacaccagaagccaggaaggggcaaggaaaggcctttccctagagctgccagrgggagcatggccctgccgacaccatgatttctgacttttggcctccagaactgtgagacgataaatttctgttgttttaaagccacccagactttgttacggcagccctaagaaaagaatacctgggcaaaactaatctacagtgacagaagtaaatgcactgttatctttgcaggagggtagggtgacatctgcaagcactagaaacattttaaaggtctctatcctaacagagagccagctctagaagtatacctgactttccgacatatgctttcaaatgtctctcatcttgcttcatagtccacagattttttttttttaaagacatgktctcactctgtcacccatgctacagtgcagtggcatgatcacggcttactgcagtcttgacctcccaggctcaagtgattctcccacctcagcctcctaagtagctgggactacaggtgtacaccagcacaactggctcatttttgtattttttgtagagatggtatttcactatgttgcccaggctggtctcaaactcgtgaaggcaatccttctgcctcagcccccaaagtgctgggattacaggtgtgagccactgtgcccagacttctacaaatttaatatatattttttttttggtagaagcagggtcttgctctgttgcccaggtgccttaatcacagcttattgtagccttgacctcccaggcttaagtgatcctcccacctcagcctcctgagtagctgggcctacagatgcacaccatcacgcccagctaatttttaaattttttatagaggtggggtctygccatgttgcctaagctggtctcgaatgcctgggctcaagcaatcctcctgctttggcctcccaaagtgctgggattataagcgtgagccactacacccggcccatattctatagatgttaactgtaaataactccctttgtctctggttttcagaggcatgttcagttgtctatttgaacatggtgatgttttttcttctgacttgactcctgagtacagctcttcctagttctgtttatgcatatgtgaaaacaacaaattataaacacataatctttcatgtaaaaaatgaaaaattcaactccaaaatcactgatgcagttccagctaataaaataggcagacactgtaatctctaagtagtggcgttagctcagagttttggggaggataaggggttgttgactgtggtgtaaagacagatgttaaaaaaattattctgacacttgttaaaatggtaaggaagacttcattcaaaaccattgcaattggagggggsaaaagaaggggctcaactctgaaacagcaagagcaagtgaagatttatagccaagaacagcatgaggatgtcaaaggatgggaaattgctaaaagaacacatcaagggcaggggaattcttgctaagctggcctaacaggactcttgctaaaggcagtccaaggacttagacatcaaaaaggtggaggatgaagaacttgatcagatatcaagggtaattagatatctagggttgggagatgacttagcagaattccttgctaaggctgggctgggcaagccaaagctgggggtggagcaagcttgaagcctggtccaaaagagacattagcagagcatgactgaagcttggttaaggagagagtctttgacacctcacagtcatgaactgcagtctgataggaatgaaagctaagaaagtttgcaagacactttacctggtgataatatgaatatagatcctaacttgggcagggccaaagcttttttggcatcagaagatttttatccattctgtatcttatcatcataaaagctcactggctagcttgtaaggagttccccagagacgtgcagatttcatcaatttaatgtaatatcctatggaatgtaatcatcaatcctgaagctgaagctatacaaactaattggttgttttggaaacctgctttcaacctactatatgtaacctcatttatatataaggggttggagctccttgttattcagaatgcttctaggctgtctggcgtttttcactttagctctcattataataaactggtaactccaacagagtcatttcatcaacactttagtaattcacctatgcctactccaccagttgactttagcctaatcctccctttacagcttccctctgtttttatcagtgctgacctcttaaagcaattctgtaggtcacaagtgtcaacatagaagtcttctgaaaatagagtttgccaacttaaaagaaccttaccaawggcttctatgaatttcctaaaaacaaaaaaatgggcttctgtttcttgcctctctacaggagattattttaagcaaatatgcctgaatttatgaaatagtaaatattggtatataatactgttkaaaggtggttttcccagctctagaaagctacgcccaatcatcctctataaacaacagactctggggctgggtgcggtggcttacgcctgtaatcccagcactttgggaggccaaggtgggcggatcacaagttcgagagatcaaaccatcctggccaacatggtgaaaccctgtctctactaagaatacaaaaattagctgggygtggtggcacgcgcctgtagtcctagctacttgggaggctgaagcaggagaatcacttgaacctgggaagcagaagttgcagtgagctgagatcgcaccactgcacttcagcctggcaacagagcaagactgtcttaaacaaacaaacacacaaacaaacaacagactctgatatcacaatagatatatggaatagcaaaaaagaattttcttatttctgccargataactgaaaaaagttarcaatgaccccaaaaaatcataaaatacaatttacatacaatacctactttcacactctgtgggtatggtgcagtggggaagtggaggtccctttgcaagtttcagaagctttcaaagaagtcacatgatctggccctacctctgtctccaaccactctgcccctcaatctttggctctggccgcaggagctttccttctgctcctctatcccattggacatgccagcttgcttctgccttgaggcttctatactcctctttccagaactccctgcctttagatcaagggctcctaatctcataatgtgcttgaccctctttgacaatgtgctgaagcctatgtacctcttctcagaataatattttaaaaagtgtaaaagacaaaattacagaaaacaccgaacatgttaaaattactataattttttttttttttgaaagagtcttgctctgtcacccaggctggagtacagtggcatgrtcttggctcactgcaacctccgcctcccaggttcaagtgattcttgtgcctcagtctcccaagtagctgggattacaggtgcctgctaccacacctggctaatttttgtatttttactagagacaggatttcgttgtgttggccaggctggtcttgaacttctgacctcaagtgatccacctgcgttggcctcccaaagtgctgggattacaagtgtgagtcaccaagcccggccaacttattataataatttttaaaattatgacataggctgggcacagtggttcatgcctgtaaaccccacaccttgggaggctgagatgggaggatcacttgagtccaggagtttgagaccagcctgggcaacatggkgagccccatccagaagattattttgtacaaaaaaagaacatgccaaaattagccaggtatggtggtgcacacttttagtcccagctagtcagggggctgaagtgggaggaytgcttgagccccaaaggtcaagcctgcagtgagccatgatcatgccactacactccagcctgggctacagagtgagaccctgtctcagaaaaaaaaaaaaaaaaaaaaaaattaggacttggtaggtgacaggtaagtatattaatggcccccaattaatcacacttccctgaagtcacaacccatggaattccctctcaaactgactgagctggcctttggatttgttatgacccacagaagacagtggaagtgctggggagttctgagcctgagcctcacggggctttgtggctcatgctcttgctgtcttgtaacactgtgactatgtgaagagccccagggtagcctgttggagccatgtggcccagcctgcagtcagcaccagctgctgggcatgggaggaaggccatcttggactatttggcccagtggggctgtcagatgactgcaaccacatgagcaatcctggcaagtccttaagaaccacccagccgaggccgggcacagkggctcatgcctgcaatcccagcactttgggaggccgaggcgggcggatcacaaggtcaagagatcgagatcatcctggctaacacggtgaaacctcgtttctactaaaaaatataaaaaagtaaccaggtgtggtggcgggcacctgtagtcccagctacttgggaggctgaggcaggagaatggcgtgaacccaggaggcagagcttgcagtgagccaagatcgtgccactgcactccagcctgggcgacagagacagactccatctcaaaaaaaaaaacaaaaaaaaaaacaccacccagctgagcacagcccaaattgctgaccaacagaatcatgggttattgtttaaagctcccaaattgtgggtcattcattacccagtaatacataatcaatacagtaatacatgtgcttctttattaacacaattagaatcagatctagtatcacatccaagaaatctcataatttcaaagcaatgataacatttcaagacacctgtgaaaactgagatataatttaaaaaaactatactttctactggtaacaaagtaacaagtgctactagtactactgagatttgttgtytacattcaaatagaagaaaatgctaaatttcagtctgagttgagtgaaaatacagatgtaattatttttctgatccaagtctatagacctcctgaaatctatccacagactcccagaaactcagctgaaaaactcttctgtgtttacttgttatttaagtctcatttcagatgtcatctcctcagggaaaccttccctgagcaactaatataaaatagctcccctcgccctccactcacccatcagagttactttatagattagtatttagcatggagtacatacttagaaaataagtgttgacagaatgacactgattattatttgaaactggctacttactttttatacrttttatatttattacatttccttttgcatctgaatataatgatcctttgctgccttgttatcctgtgtccctaatacctggtacattttaggccctaatgaccatggaatgaataataaaacaggtatacaagtgattaatcccccaaaaaatatatattacatggatgacagcttcctgtgttgtgttatttgagaaggaggcacaaagggagaacaatgcactttgaaataaaatacacctaaatcttcaaaataacttgacttgttattcttctctaatatattgtcaagttacttggtttctgccttctgttccttgggcaatacttgcagcatagtgtggaataattgtagaatgaaaaatagtagtgttcccctaatttggctataaagtcaaattacagtatttcattacattctttttttgtagaaacatattatcttaatttttttctttcttgaaaaatctatcaactgagtgaatgatatatatatttacttatttttccttatttaatatgtataaaaaagatatcaggaagcccaacgaactggatgacagtcatttatataaaattgtaaagaaaaatgttaagatacaagagattctgaaatgggaatatatacattgtaaaaaatataacggctaataatctggcttatatactctgggaattaaccataaaatcttatgcagtgaaacagtaaatgtcaagaaaatttaagaccacagcaaagctaatgaggatcactaacaactcgtaaaataactaatgaaaactcctgatgctaattaaggacaaggaagagcttgggctgcaacactggttaagctgaaagactcactgagatgaacagacacaaggcccagaggaagaaaactggtcttatttattttgctaaaaatccttgctttttgaattgccagcgattatattctaggggcatgttctttaatttcacaataaatttaaaagattkcaactgttgtgttttgcaccattcatcatacatttatctcctacaatttttttttcttcctgggataagatggcrctgagctctgctaaaaattcccatcaagaataaccasagtaagaaaaataatgcatgagagaaagggaagaaaatggcacaacaggggaatgctttagcytttcacctccagggagctgagtctcagctcctcaggggagaggggattagcctgagatggcagggatagagtcacctcattatttgcattgcacctgagcatagcagcattcttacagtttagtttaattaacattaaaaagatttctttatgtaggaatcataaattcccttcactattggcaagaagaaaaaatacagatgaacgcttgtcaccacacagagtcaatatattaaaaataatactgccttccagttttaatgctcttagtcttttataaattaattatacccattgtcacattagatattaataatagcttggttaggtgggtaacaaacccctgtttactatctgcaaaacaggaatcctaatacttaagattacatgataattatgaggatttaatgatataacatggtaaaatgagcaaggatgctagacatacagataatttatggtaacamragcagaagttcacacgcaaaagsctaagcaattgattacccctgggtgagccagggaacactttataaaggaagttatcattgggtagaaccttgaaggaaaagtaaaggttaactaaatggagatagaggagggcagattttccagccagagataaaccttcaaacagaagtagccttatatttgtgttgaaggcaatgctaaaattctccagttagactgagcatttccttacagccccagcaagcctggagcagtgatcaaaagaaaagagaagacagaaacagaaaaatctggaaaacagctagttattttccacatatgcctaagttcggtgctattttgtagaataaaatgttaaattagtctagtgtcgcgaacctctgaagtagtgggaggaaccaaaatatagtcagtgcttggaatctttaaagttcttaactaggctgtggtttagggaacggtgcggtttagtgtggttggagcaaagtaacttgagaaagattccgcaggaaattctacttttaaagtagaaattcctttgtttaacaaagcaayctggggaaccatcaaagacttttaagcaaaacagccacacgatcagacctacgttttgccaagtgactctgttgagagttgcgagggtggactttagcaagaaaggtcaaagagaacaaattaagcagctgctccaatgcccaacatgagagaagacatgaagaatacggaggggacagatcggggaacatctcagttagaatgaacaggatttggtcgctgactgatgtgataatacaagaaaacaaagagtaaggaacaatggcctaataacaataaaagtacctagagttgttakagaaaaagaaattttataataaagtgaatgtgagagtcaatgatgtatcctataaatamttataagtagtgttacttttgatagtcaaaccaggaattctggatcctagaggggagtaagggagaacaactgatcyggtccaggtggagaaagctggagagaggggtgtgggaacaggccttctctcccagggagtgccactggcagggagttctggcagtccaagaccctaatattcattgtcattcatttggccaaaaatgaactcttcttttgttgcagacaggagtggacaacagttctccttgccccccaccccacagggatttctgtgttggggccaagaaggcctgatcttcagtagttaaggaaagtttcrgggtagagggagggcagggaaggaaaggggagacccactttagcccaagtgagcccagtgacattattggctgcacggccgctattctccataccttgggacaagcacatgctttatttgaaaattccaggggcacaggctctgagtttctcttttgtagaaaacaaraaggctgggacccctggatgtcagatccatgggacaggcccagacttctcaatcctcaaccttctcaacacaggtgatctgctcctgtacccacatgagccactcacacccatatcatttgtcatgttatcaccaataactgcacctctgattcttccaaatcaggctctgcacttcttccaatcaaaccactcrctcttccacctcatcaacgtttcctatcctttgatccccaatttgctcattatctacaacggtggttcttcacttctttgatttcaccatcatmgcatacttactgacttgcaaacacatttaattctgtctcatctctctcttttggtcataaaacctaactctstgccttctctatgcaygctcatagctgaggagaactggagaaatgacagatctgtgctgactggggactagtttcagctgtaactcgtggagaggcagtggagtggagtggagtggagtggagtggagtggtcaaatgcccagactctgagcaagacgtccccgggttcagatcctgacttcrgtattaactaaatttggtcaaaatcactgataagagtgatggacttaaaaaaaacaaatagtcctgaatctctcaaattctaataggctgtaaatactgtccagtggtcatactacatgttcacagtatagcaagttatttayttctctctcttcctacagtcagtccatcttccctccctgaaaaccttgcctcatatttccttaagggggaaaaaaaccccaaggagatatggcttctatccccaccttcattttcattagttgcttccattctactgcagacagtttaaagacagtaagtcccatcttaaaacaaacaaaccttaacctttatattcatatttccacttctacggtcatgaacatctattcttaaatcacattcctcctcaatcytcccaaagaacactgaacctggtctcgtcaaagtcatcaacaacttgcacgttgtcattggatcggtggccacctctgtatcttcctctttctgggcttcttcaacagcatgtgttgcttttggaaacactttctcgtgtggcttcccrgacatctgaactcttacctgcctggctgcttctttgcagtcccctcgtctctgctcaacctctaaaggttgagccatccaggtctgtaccaagcccctccttttgctgtttcctcacttcccaaaggcaacctcatccaggcctccagctttagatacctccttgcgtgctgatgwttctcaaatccacgtcagggttaacaaaaccctatgcgacttgccctgacctccttgaaagagctcaggaagtatccttctcccactcatccactttgctcccctccctggccttctgttggttcttgaaagacttcaaggtgcagcctgggcaacgtggcaaaaccctgactctacaaaaaatacaaaaattagctgggtgtggtggcatgtgcctatagttccagctactcgggaggctgaagtgggaggatcacttgagtccaggaggtggaggctatagtgggccgagaccatgtcactgcactccarcctgggcaacagagtgagaccctgtgtcaaaaaaaaaaaaaaaaaaaaraagaagaagacctgaagctgggtcttgctttagagtttttgcagcagctgtctcctctgcctggatttctttctccttgttcacactcttttcactaggatcctcaacctaactgtcatctccaaaagcagctttctaagaccattccttctacagcagccacttggtcacactcacataatctgattttagtgatctgaaaagtgtttatcaagatttgatttctttgtgtgtttattggctatctttcccccactagatctaagagccatgagagcatgttgtcagtaacggtttaaccactatatccccaggatccagaagagcaccccatgcacgctccttgtattccacagctcagtctcatcacttccagcctggattggattggtggtgacctgaagaaagctgggaagcsttgttgggatgagcttagctgggcagccaaaagaaggagggtacagacatatttcatatatttgagttcatagattgaaaaaaaaaaggatatctacaaagcaggcccatataaaattctccagtgtttaaaaacccttattggtgacatccattccatgtgtatttatactttattctatctctttaaaaaatatgcactaaggaaagtatctgacaaacttatccactgtaaggtrtacacatgcctgatacaacttaactctcttagggttggttacaattaatgagggccagagaaacacatctctgtggtgccagccaataacaagctgatggacgcaggaggattgtcttctgaaattgcaatgaggcaagcccaattctctgttgggcagtaatgtatgcatcacaaatctttaggagagctactggcaaagaacgcaaggtattcagagcaccatgtaatcagcatcttcccagggcaatccagacttaacaactgggcaataaccaggaaaaagtaaatgtagcaagtttgaattgtggcttaaaacaaacatgttcgggaagaaaaaaagaaatataaaaagatctgtcatagctgggaaagagtaataaggtaataaagggggagataattatgactccagaacaccatttcccatagggtgttctgcagaggctagttctacggagtgtttctgtgagtcactaaaaaaaagtttgggaaatattaggttaaataaagttacatacttgttttttcttctggatttctcagaamctttaatatgttagtgtgcactgagactctgtaagagcaagatatggtatgcaccattcgctaaactgatttgaccacaagacctttgtccttttaaaaaagcattttgaacaatmcaaaggtagcccaagctagacccttccaactgtagagaactgaatggaacatcagatttaaataatggcataaaataaaaagcatagggctggacggctgtaaaaaggggtgagacaaagatgatcaagtcctgattagcaacgagtgagtaaacaagtgaaggacttcaggacgtgccaccccaaaatatgccactttggcatactgattatttagagctgaaagcaatggagaaatagcagatgcaggaaagccttttgacctccccctttctacttaaaaacacaccattaaaatttccaggagaaaggtgccctccctgtaccaggaagaaaagaacatctttatcacctgagacttggaattgactctgaaatagatctgtacaaacttactaaaatatcccttatcttccattagtttccccctctatatttttagtgacttcctcacaatttactgcctataatccaaactgctttgtcttatcacttcttcacaaatttatcatttcttcatctaaaagatatataagtttactacttctggtcacttcyttgggtcttcattgtcttgtgaggactttcatgtgcaagtaaaattataataaaatttgtatgcttctcttctattaatctgtattatataagtttaattcttaggcctagccagagattgtaagaaggtagaggagaaatttttcctcctctatacaagagtagtaaaactacagtgaaacccatactgcataattttcactttatttttawttatttatttatttatttagagatgcagtttcactcttgttgcccaggctggcgtgcaatggcatgatcttggctcactgcaacctccgcctcccaggttcaagtgattctcctgcttcagcctcccaagtagctgggattacaggcatgtgccaccatgcctggctaattttgtatttttagtagagttggggtttcaccatgttagtcaggctggtctcgaactcccgaccccggtgawccacccgcctcagcctcccaaagtgctgggattacaggcgtaagccactgaccctggcaattttcactttaattcatatgaagaaagtggcaccacgaagggttaattctcctacaatgaatttgaagcaatacaagcatctgtcccatgggatacctgcctccattagaagccaaggagagcctgtctcacaaccagttcacatttcagtgtcacttcaaacatttatcataagcaaaaccttgacagcagcataaaatcggcccttttattttaaacagttgaaataaatggtgcaaaataaatcataaatgacttgtcttcttacattctgatttctattttttcttctttgtgcaaaagaacacattattttaagcaataaaataaacgaatacgtattgacattgcattttaattgggtggaacatgtatttttacgggaaagctttttggggaagatctttcttttggtatcactttatcgagctataactcatatatttacaattctctcatttaaagtatacaattgaatgatttttaatattgtcacatagttgtgaccaccaccgcaatcaatttagaacatttctatcacctagaaaataaattctgtatcttttagggaaggtcactgccctgaccctgtaatgcttctatccccgcaagtcccaggtaaccactaatctattttctatctttatagatttgcctattttggacatttcatataaatggaatcatagaatatgtggtcctttgaaactgtaagattttaaacagtttggttaatgctcatataacctttgttttttgaagtctatagacagctttgctgcagcacaaaatctattccacactatatcagcaaagtactgcattgtgctggcatttgtccagcacacaacagatctagtaatgtgatattctatttcacaaagtagcatgatcatttaaagttcactcaatgggctgcaawttatttatttatttatttatttattttatttctttgagacagggtctcgctctgtcgcccaggctggcgtgcagtggcgcaatctcggctcactgcaagctccgccctccgggttcatgccattctcctgcctcagcctcctgagtagctgggactacaggygcccgccaacacgcccggctaatttttytttgtatttttagtagagacagggtttcactgtgttagccaggatggtctcgatctcctgacctcgtgatccgccggccgcggcctccgaaagtgctgggattacaggcatgagccacctcrcccgggctgctagttawtttttattagtaaaaatgtgactgtctgacctgggtattttaacctggatttactgatttgttttggaataagttttgcagatataaaatactataatcttttctcttttctataatctaccctgaaatcaagaaccattggtcatttcccaaagtagattggttatctcttgcttactagcttgactgttctttctctttctctgtttaaaattcaaagatgcaaaacaccataatgaatgatggcatgacaattttcttctatgataatatcttcttataactatgaatatccatggtgccctgataccacaattactacaataaaagaattcattatatggaaaaaggaaatattggtaatacactaaacagatgtgaaatctagatggtgcaataatggtgaaggctggattcacaaatattccagaagtagttcaatctctggtaaatattgtttcatctcaccttcatagacttacctgtgacctggctgcaaagagaggcctaacccaagagataagcagcagcgacaatataaaaaccattgattataagtaattttagttcccatcaccatgggaacacactacatatagacttttattgagaagaggtgctgtgaaagggaaagaagtgagcaaaaatggagataatggtttgcattaaggtaatgtgttaaagtggaattatactcaaataaagaatgaaaatatatagggatgagaaaggagaaggtattcaagacagcaaaatgctagatgagcatcatccgaaaggaaaggtacagaaaggggggaattaatatagtttacagcttgatttgcaaatcaagggactaaaagttaatccctcaagggactgagagwtattagcaatagcatttttgtttattctttgggtatgtgtgtatagcagagatcattctgatccagagtctttgaagctttaacagggtacctggacggattgacttagctgtttgtttttgttgctataaaacacctttaccatccagaaaataaaggttagcccaactattggtaatgaaaaagaaagcttaaaataatcgtgaatatagttacccaaatgaagtctttgatatatgtaacaggataaaaaataatagcttcagagaagtaactgttactgtttgtttttgttttttaagacagagtcttgctctgttgcccaggctggagtgcagtggcatgatctcagctcactgcaacccccacctccccggttcaagcaattttcctgtctcagcctcccgagtagctgggattacaggtgcgtgccaccatgcccaactaatttttctatttttagtagacatggggtttcaacagattggccaggctggtcttgaactcctggcctcaagtgatccacctccctcggcctcccraagtgctgggattacaggagtgagccaccgtgcctggccacagttaccgttttataaagaggtgagtggtaaacagttctggacatggacctgggttcatatattgacttacaccaaaacatttttgggactgttagttttcttctaaaagtagggggggacgtccagagttgtcagaaaaaaatgagaaagaatgtttgaaagcactttgtaaatagtaatgaggtaccctcttgaataagaggtcatttttttacctattgcttactatgctcactacctggatccaatatacccatgtaacaatcctacatatgtacccccatatctaaaataaaagctgaaatatttttaraaaagaggcagttttttaaaaaatcacttaaaatcttctgtaggaaataactgcattggagaatgctccttcagaactttctttagcatcaatagccatttgaagattctttttttttcttttttgcagttgcaagatttaatagagtgaaacagtgaaaacagagctcccatacaaagggaggggacccaaagggggttgccgttgccagctcgaatgcctgggtttatatcctgatccttgtccctcccgctgtgctctcaggcaatagatgattggctatttctgtacctcctatttttgcctaattagcattttagtgaactctctggttgggtgtgagctaagttgcaagccccgtgtttaaaggtggatgcggtcaccttcccagctaggcttagggattcttagtcggcctaggaaatccagctagtcctgtctctcagtcccctctctcaacaggaaaacccaagtgctgttggggaggttggccaatgactgctctaacagcttcctgctgaattggggcatagtaggtgttgtgtagttgagatttcctccggaagggtgccttccatgtcattaacattggagcatgggctagcaggccrgtccaggggtctgcggtggatcttagtcatggactgcatctggggctccatttgaagaaccatttgtagttttacagtttcaattctggaagagacaaacgcttcggaggtcccttcrtggtcgccaaaatgttaccggggatccttgctcacagagctcccaaaatggtggcaagcsgcttccaagatggtggtgggcggcttccaagatggtggcaagcctcgtgttctctgacctggggttcttggcctcacggattccaaggaatggaatcttgggccatgcgatgagytattagaagctgtgggtcatggaagagaaccgtggaacccagtgactagtgttcagctcgattaggacgaacccaggcacttagccgtgcaggaacaatggcaagcttttagcacaatcgggagtggcaatgggagtctcgctggatcaggagcacagcggacaccctgcyggatctggagggatgggagtcagcggcgatgggaatcagcggcgggtctgcgacagtggcaaacagcagtggtggacggcaagcgaaagctcagctccagccgtaacaaacatggaccagaagagtgcagtagcaagatttaatagagtgaaaacagagctcccatacaaagggaggggacccaaagggggttgccccatttgaagattctttgaaaaaactaacagcaggcagatatgactctaactcatcatatgaacaagttaggatgaggagatactgattccagacccagaaattataaaaatatagacggtgactaaaaaaagtctcactcccatcttgttccacatcagtctacttcccatcctcactcccaaaccactgttcctagtatcttatctatcccgccagggttcctttataccttacttattttcaaactttatttatagagccagcttatgcctacatgaaaaccaacatagttagcataattttataatgaacgaatcactacaaaggtattttatttatacgtgtaatttacaacttgatttgcaaatcaagggattaaaagttaatccctcaggggactgaaatatgagtgtgtgtatatatcatatatctaatgataaacatatagatcactagaatgtgtatctcatatggcgatcttcaattacaagcatgaatttatttgtttaataagcacttacacaatgtttacaatgtgccaagactattacaagcacattgttttagaaatataaaactcttttaaccttttagcctacatagcaatcctgtgagttggacaccattattagtcccattttacagcttggccaactgaggcaagggaggttatgtaataatttgccaaaagttttagaataaaataagtggtatcaggagtcaaactcagactgtctagttctagaacatatgttcttaaccactatgctttgctacttctaaaaatgccttattaacgtgatttgttgttggaatggggtggctaatgctaatcagattattgttatctctgtctttaggtcatagtttccctttctgtgtaaaataacaaattaatataaatataaatataaacgcctcagtaaagtggcctcagattatgatttagtggatactatttctgaaaaatatattgctttattattttcaagatgacttcctacaaattcttcagaactgattctggagctaatggtagcaatagctgctcacattttgaatattcattgccttttaaataactttcataagtagaaaacctggttactgaaacagagcaatatctgtgaccctgactatcaaaatgtgtttccagaatctttcctgttctgtattccatgactgtgagtacaatagggtaactaatatagaatttcagttctgatgttcttattaaagttacagacttcgaggtattgatctgtcttaagttggctgccacgctgattttctacaatcatattagaagtctagaaaactcaaagatgtgtttttaagtaactatatgttaaatgtgatcaatttttttctacctcttacaatctacattaaagtgtcgaaaagaactcttcttaccaaggtcccccacgaaaccctgccttcaagcctaaaagagcctgaaggctgaagaactggactgctggtcccggataaagcctgccctttctcagctgattctctctgaataatgcccacctgcacactgggggaagagggtggagccaagagaagtttacgcttgttcagcggggaggagcctggcctcttcagttcctgtgtggtggcctggtgttcagtctgtgaggtggagggcctgttggcaagactccctctcgctttgctgagagttctttttcctttttccttttcacccaataaattctgcccctcacccttctatgtgtccctgagcctaatcttttccggttgtgtgacaagaacccggttttagctgaactaaggagaaagttctgcaacaatgataaggatgaaatggactagctagtgatttctactatgttatttaaagtctgaaactgccttgaggcaccctctactagctgatcattattactgaaatttagacaccgcttggtacgtggtttaatcatccagtttcagcaatgtgacgggggtataatggcttttctgtacacttgtatcttggcttccctgaaaacagatatcatgcatgcatcttggtggttcacacccaaacacagagcacayccagtgagcctgaggaaaggcgctgcttgcaggagtctcagccccctctgtgtctgctggtacttgctttctcccgctgtaccttatcctccagtttatactctaccagtataccctttggaatcttgtgagtcttttcaatgatctgactctgtgtcactactccaatttcagtaaaagcaaacaaaaacagaaatcgaggctatgagagtagagtgcaataatgatgaattctggcagccacccaggaagacaccattgaaaagacaaggtcctgcctcccttacgtcttgcacactcatgatgctgagcctgtcagtgaccaaaaatcagactacacaagtcagccaaaagtgaaacagaggtgtcaagcatatgaactgcatctgaaagtttttgccttcctaagaatattcttaggcctcttcttcacacactccagagcaatgagaaacatttggaattgaattttcctataaactatatctttgcagatagacttttaaaaccaaataaagtcctgtgggtttttcttttctttcttttatacgaacataacaactgcttcactgtcattacttattttccaatctaaaccctccacaagagtctagaacaccatgtgactcaaaataaacttttcaatcaattacaaggccattgaaatggaaaatcttgatttttaaaaatgttttaatatgtttccttaaccacattgtggcaggccaggtctcactagtagctgagattacaggtgcacgtcaccacgcccrgctaactttttggtatttttagtagagacagggtttcaccatgttggccagactggaataaacaagttttattgtcagtctgaagaaattccccaggcctccacacacaagtttattggaggtctgaaggaactccccaaacctctgtgatttagcaggagacaagataagggtaatcaccctagcacctggacccatttagattaagtaaatttactgaggctccagagaaaggtcttcaggactcagatcttagttatagattaaaagaagttaatcacttatgtctttagatgaatgcacacttatatgtagacatacagcttggaaggtttataagctctggaaaactttgtaattttgagttggtgtggtgacaatttctaggccttctccctgtaaccaratgcaaaaataaaacctctcttccccagtttgtctgcatctcattattgggccasgagaagtagcagcctgaccctcagttttgtccaggagcaacatgtatatgatttatacattgaaaagaaatttctcagtcataaaagaaatagtgaaagaacattatgatttaacaatatataactaatatgtaatattagtggttgggaattaaatatggcataagtagttaaataaaaagtaacttgtagtacatgttttactacaataatgggtaaactgaggcccagagagattaaggaaacaggtagatcatagagctaagaaatgagagatgtaggttttgacccaggaacccttaagtatgagctcctttcactaagacaccttgacattgtctcttggcttcaggcagtaagtaaaagaaaaacagatggaaaggaaacaataaaatatgcaaagagaaaatgaagaattctctgaaaattatcaactttaaatcgagatccaggcaataggattaaaatactgagcacaaagtttgaggagggtcacccaggaggactccaaaaagatggggttagtgctctgaagcagcgaggtttgaggattgtttatacaggcacggtatggggaagcttaacaggatgacagcattttccacacaaggttagtgcacagtcgcagcaatctgactggttttaggcagtgattccttgggggaagggagtatttaacattccacattaaggatgtaataatcaagggatcttttatctcaagtgctatcwggtctgggccaggaacaataaaataggaaggaagttaatctataacaaaaggtcagtaattaaggtcatggtctgtcactccccactcagtctcccagtcaaccttcttcagggcctaacatctttcagaagccccaaatagacgaactgtgcattttctttcacaaaatcaaagagataagcgcctcatttygggggcctccaaactggggagagggctggaagcactgtggaaacagaactaaggggccatagcctccagctctgagcgaagtctcatctggttcaaagaaaggacactaattcagggagaaaatggagtgtttgtaggatgagaacatgctttctttccttggagactaagttccacataggggctccaagtctggctcccttcccccagccctgggaaagaattttggaaagtgtgarcatcttcttttggtgcctaattgcctgggggtcatacagcctggagctgctctgttgaggacagcgcatggtggcttccggctggccagcggctgctctctatgttgttccttgaagaccccactgaacacacttcacacacagggtccctttcagtttgcagagaagagaagcctttatacggagcaaggtcccatcagaaggcctttcaaagatatacaaaggccaatgatgtatttttgcctgccctgaatttcaattagcatcttaggcaataaacctgaaaatgactaattgagaaaatgtctgtgtttagtttgtgggtcaaggccaatgaaatattataaaatacatattcagaatcaataccagccaaatgaattcagtgtgtatgggtggtgtttcactttttaaaaaatcttatcatagttttacgtaaaaacttgtaataattgcctttttgtcttacctgtttaacattttagtgacttgaataatgagattaaaacaagttcttattcaccatttaattaatcaaagtatgtgtgagatatctttaattcttcagtggtacctcacttaatcagttcyacccataacaaactttttcttcttttacttgtttttattaggacctggtgtctacaacaacgaaacttttatactttcagtaaagctaacattctccagaaaaaatgaaactgatcgacttttaaaatgtgaattttccagtaagccaagactgctttttgtaaagaatcagctataatacgaatatagtaccattagattcagattttggagatacatcttattatattattttattactattcatataccatattaaaatgttttcttcatcattattttagtctctctcattaacagatagagaagataaaactaaataataataattttttttttttttttagagggagtctggctttgtcgctcaggctggagagcagtggygccatcttggctcactgcaacatccgcctcctgggttcagcaattctcctgcctcggcctcccgagtagctgggactataggtacgtgccaccacgcctggctaatttttttattgttagtagagatggggttttgctacgttggccaggctgggcccaaactcatgtgatctgtcyacctcggccttccaaagtgctgggattacaagcgtgagccaccctgctcagcccgatatgataattgtgaatgatcatatgtgtgggacccgagatattaccaggccaaaacaaaccaattttaagcaaacataaaattaagccatattttaaaaactgaaagcaacaattttagcatatattcctaatgggtgatcgaccagtgtctcagccrtcaggtttataatggcatcasaaagcaagttataacccagagaacttaaaatttcatctataaaactgttgggaatactacaatgattccttaaatatttacctatctttttgattttagcatttcttactaaaatcatttctctaattctcttcctttyggataaaagcaaatttgcaagttgttaagtacagactagtaaaaatgcttttttgcatatggagaattactgttaaagttctcacttaatagttcctatacagtacttaggcctgaggaagaatatgctctaagttttcacaatgtaagaaagtaattcacattaaagaaacaaaactctatcatcaaagttttggaggacaatattcatattactttaataaaaatcactgaaacatttattttaagttcaaaatattcatgtgcctatttccaatattatcttttaaacaaatctatctttctaacttgtcattcagtattaatatatactactatttaaatctgatgacattaattcttgggaaaataaaaaaaaaataatgcagctgtgggcacattattgacaacaaagtttctcaaaatgtggtcccagaaccagcagtatcaacatcacatgggaacttggaaaaaagcaaattctcaagtcccatcccagacctacaaatcaaaaacttcagcaatctgtattaaactcctctgattcacactacagtttgacaagtagtccaaagaagaaaaatccacttgcaacggttgaagctcatccagaaaacagatgctcataagtaggttggcttatgagctattcaatgtccagaaattagatayaataataattattaactttttgtcaatgggtgaaaattccaccttattttattttcatttcatttatttatttttattgtcacccaggctggagtgcagtggcgcgatcttggctcactgcaacctccgcctcctgggttcaagtgattcttctgcctcagcctcccaagtagctgggattacaggcactcaccacctcacctggctaatttttgtatttttagtagagacggggtttcgccatgttggctaagctggtcttgaattcctgacctcaagtgatccacctgccttggcctcccaaagcgctaagattacaggcatgagcgaccrtgcccagctcaaaattccatcttatttttacaagcttctaatttcttgcttgctgtggcactgacttttgaatgaagttgcttatccaatgatgtatttcttttttacgatgggcagttgaacatggaccaatgacgtattttttattttgttttctccgagagaagttgcacatctgttcatatctggggctcagtgtccatagtaccctgatgggcaggaatgcaggcactctccatcctggcgcatcccttctcttcgaaggaagaaaaacaacttctgttgacattggttgtactcattgtcctttgaacaagacaaacaacccttgcaaatgggatgtgatacataactagctcaaactggacttgtcaaactgtccagcaattaaaaataaataatggtaaataaaaataaataggataggctgggtgcagtggctcacacctgtaatcccagtgctttgggacactgaggtgggaggaaggccaggagtttgaggccagtctgggctacacagtaagacaccatttcttcaaaaaaaaacactttttaaattagccagaagtgatggcccatgcctgtagtcccagtgactcaggaggctgcggcggatcacttgagcccaggagttagagggtgtagtgagccatgattgtgccactgcactccagcctgggcaacagagttagaccctgtctctaaaaaaacttattttaaaaaggatagtcagacaatgaaacaaaatagagagcctagaaacagattcactggtaataaaagttaattaacaacaaaaatgtcattgcagatcagtgggggaaagatgggttagaagaaaatataccagaacatatttatcactttgcagcagagaatttcttaaataagaaacaaaaaaatagcttaataaggattgataaatttaactacattaaaattccatacttctgttcattcaaacatcatttacaataaagtaaatgaaaagaccagcctctaactaggaatagatatttctcacacatatactaattgacaaagatttatatttagtatggattcacccagcaactatttactgagtacttgttctctgccacacactattataagtgctagggatacagtagtaattaaaatacaaaacaaaaaaactacaaagatctctgctttcttgaactcacaagaaatagtttaaaagagacctaatcaataagtaaattatgtagtttatttaattacagttcattgtatacactgtgtacatatgcagggatccagaaggagaaagtttgaaaggctagggataagatgtctaggaaagaggcaaatggatagacacatagtagtatcaggtgtgtgatctttcgattgcatggtaacacctatcagagagcatttaccaaggaagagacactaaacaatgagatagacagaatgatgtgcatgacatgtcagcctctgtcatcagccactcctgtgctggcaccatggaaccatgagcgtaatggggactgycagtacataacagaagtcaaacctcagagccagggttctgggggcagggctctaattcccacarggaggaatggtttcttactagaatgtgactgaggtattattcattaacttcgtgctcattctaaatttttttttttttttttgagacagagtctcattctattgcccaggctagagtgcggtgacgtgatcttggctcactgcaacctccatctcctgggttcaagtgattcttctgcctcagcctcccgagtagctgggattataggcatgcaccaccacgcctggctawttttttatatttttggtagagacagggtttcaccatgttggccaggctggtctcgaactcctgacctcaagtgatccacccgccttggcctcccaaagtgctggggctcattctaaattctatcttagctgtcattatcttccatttgagaccatgcattttgccaaaataacttttagatgatgcggtttaagatgattttttggcagtttgcttttagatgatgttgtggcagctcacatgaaggagtttccaagagttaggtcctaattaaagaggaaatgaatttttagaatgtggcctgttatcatatttccagcactattactgatagtcgctatattgaaaaggaaagcccctgttacataattgacaatgaccacattttagtaaaatttgaaatttccaraaaatataatttctagtgtttctaagacaagaaaattctccagtagatacaatgcatctttctgatgaaatgactcccgttcccctccttccaccattgctgcaggtttctattaaaatagacagtctatgtatgatagaactacagggctatgacctaggaagaggaagtgactgcacagaaatgacctaaatagaaatcgtgtctgtgcttagatgaggaagtctgtatatatcactattaaaagtttaaacaaatttgtgagaagcaatgaaagtctctatagactatggatataaaaatggatgcacaaataaatggagagagatgacacgcttattcatcatgctgcctaacaagccgtgagacagatgtgtaattggggcagagaacagtgtacattctttatactttagaattctcttctccattctaatttatgtaagctggaagtgaagatagaagagtctgttcttgagttaaactgccgaccaagactgaaaatttgtccagcagaagctcttcaacacagaaaaattatactgtaattttcttttctttttgtctttttttttttttttttaaataggatctcgctgtgtcacctaggctgaatgcagtggcacaattatagctcactgtaaccgcgaactcttgggctcaagggattgatcatcctgcctcagcttcccaagtagctgagactagaggcatgygacactgtgcctaatttttacttttttttttttttttctgtagaaacggggtctcactatgtttcccaggctgatcttaaaatcttggcctcaagggatcctcccgcctcagcctcccaaagttctgggattacaggtgtgagccatcgtgcccaaccctgtaattcttaacaaaagaaccaactgaattgatgtgaaagtcttagtttatagttaccttatacatttttctcctttaaccaagacattcgcatgggaactgcttctrgccatgatgaagtaagaaaggacttagctttttattgtgagcaattagagaactgaacgaagtacaggaagcagctgttttcagactgaacacgaggccttgtaagactaatctctgttagaggggaaacagatgggatgagcatgagaaacacctgggccttctgcttggaggcaatgtataaactgcaagtgcaagaaggggaaacccagagaccccagaggcctcgtggaggtaaggagagggggctctgagttcagaaggctaaggcagctggaagttgcagagtagaattctggaaaggagcgaccagcacagaaaaataactccaggaatctgcataaggatttgcttaagccctttctgtgtacaaggtcgcacatgcctattctgcaaaacatcacgcaaaatgcagcagttacaaagaaacaggacaaggtctctgcctcttaggggctaaaatatagtgaagaatttcacactggtaataatttcctttttgctctgacatcttaaaaattctatttaggctgggcatggtggctcacacctgtaatcccagcattttgggaggccaaggtaggtggatcacttgaggttaggagtttgagaccagcctggccaacaatggtgaaaccccatctctactaaaaatacaaaaattaggagggtgtggtggcacgtgcctgtagtcccagctacttgggaggctgaggcaggagaattgcttggacccaggaggcagaggttgcagtgagctgacatcatgccactgcactccagcctgggcgacacagcaagacactgtcttaaaaaaaaaattctatttaatttctaaaaacattttttactgtaacaaatgttagaatgttatcaattctatatgtattttttatggagaaggtattgtaaacatatagccaatcattcattccttttagtagttcaacaaatactcactgagtgcacacaatatgcaagaaattgtgtagatgccgggattttaaaaaggataggatcttgcctcttcctcagagtttataatttagttgaggagatatacttaagagctaataacaatatttaagatttattgaatccgtacatgcaagtaatgttctaagtatttagtacataataattcatttactcctcacaacagcattgtgagataggtattaatatcacaattttatagacaaataaattgaagcacacagagattatgtaaatttgcttaatgatttgcattctgtaagtggcagagccaggatctgaagccttgcaatctgactctaaaacagctgctattaaatattagtgtatggtgctttaaaaaatgaactactctacttgcagatgttttgtggtaaaaaaaattttaaagaattttttaatgaactactactcatcaagcatttattggaggccctacccatgcaaagcactctgctagacagcaagacttaaatacgtgtagaacaatccctcgcttcaagaaaactatagtccgcatatgattaacttaaaatgattattatggattaatatttgaaaacatccataatatatcacatgactcctgcaggaaaaatatgcattctgagtctcaatttacttatgaatgaacttttggagtaccttattgccaggtgagaactggctctatgatgtgttgcaaataattatttagcatgcattcttttatttgttaatacttgaaacatgttctcacattcttttctgtaatactttttttttttttttctttttgggatggagtctcactgtcacccaggctggagtgcagtggcgtgatcttggctcactgcaacctctgcctcccgggctcaaccagttctctgcctcagcctcccgagtagctgggattacaggtgcccaccgccacacctggccaatttttgtatttttagtacaggcagggtttcaccatcttggcgagagtggtcttgaactcctgacctcgtgatccacccgcctcggcctcccaaagtgctgggattataggcgtgagccaccatgcctggccttttcttattttaaaatgttcaccaatcatgaaatagaagtcctttggtgctgtatggtcacccattgtctcagtttcctagggctgctgttataaattaccacaaacttagtggcttttttgtttgattttgagaccggctctcactctgttgcccaggctggagtgcagtggccagatcatagctcactacagccttggctgcccgggctcaggtgatcctctctccgaagtagctgggactacaggcgtgcaccaccacacctggctaattttttttttttcaatagagacgagatttcaccatgttggccaggctggtctcaaactcctgagctcaagcgatccgcccaccttggcctttcaaagtgctgggattacaggcgtgagccaccactcacagcctaaatttggtggtttaaacagcagagtttgttctctcacagttctggaggccagacacttgaaattaaggtgctggcaggggccatgcaccttcagaaagctcctgcttctggtgcccctggcattccttgtcttatggcagcagaattccaatctctgtctctgtcttcacatggccaccttctcctttgctgtctcttataaggatacttgtcattggctttaaggctcactgtaacccaggagatggactcatctctagatccttatcttaattacattggcaaagacccttattccaaataagtcacattctgagggaccaagggttagtatgtgtggagctctgtggtgtatcttttgggggccactatgcaatctactatactcaccttatttattcttattttttgtcattttgctaatgtgaagggtggcaggtgtctgaaaggaacrgatggtgaagacatcagggagggacttgctagtaccagggatggggctggagaaggaaatgggagactgaatagggaaagcaggaagtagaagactcagattatagagtagccaaggactctccaatttcaggctcagatgtagacacaagatcaagagcagagtggccaaaaaaagagacagaattaagaaaaagccaatgtcaaggcaatggggagggtttgaagacagtgctcacggattctggtaatgagctgcatttgcactgtgataaaagtttaaggacatttataggtaatgcacataaagcatataacaagcataaataaccttgttatataaacccacgacttaaaatggggtcacgtttaatagtaacaacccatatattactgggtcttgcccctgtcaggtactgtaacatctctatccaagtatgcactcacctcaccccacaattatttctgagagctcccatgagttgtcttcctggactcacaaacatggcctgtcaaggcattcgccatttccttcctctcctgcttcaaccctttctggtaaaatccacttttgggtctctgctgccccctaactggcacaagggggcctcactactgtctctgatggccccagtgagctcctttctgccaagttccaccaggccttgctacctgattttgctgggtacacctgctgccaacaccacttcagtagtagaatctcttccaggaaacaacaccacaaaggtggtggaatcctccagcatcaaaatggcactggtcctcaaaatgcaattcactgaattccatgaaaatatgacaatacggttttccttccctataatatcacctttttccactggagtttatagcaatgctgcttgtgtcttagtgggcggcagactttcacttattgtcttcacatccccatacactgtccctacaatgtgatgcagacatccattctatatgcatacgaacaccagtgagagcccacaaagacctgagcagaagggcacatccaactgaccaacaagcactaagccggaacagccctagggcaattgatgaatttctgggtcaagggaagaaaagaagaaataggaagggtaaaacacaggaagaggtaattactattcatcgtctgtgcatctaggagaaatttttgtaagttttggatgagttccctagcacagggtctggcacatgggtcatccataagtatttgttaaatgatcagtgagatggaggaatcaatcctgtgaaatcatgagcttgggcctccttcggtaacaaagtccccatgaccatcctcatcatctgagaactctccttcctgtacaacaggactcactttcatttgcccttgattgcctagcccagtcaggaaactgagattctccgaatcagtggcatattcgcctacaaggctatttttattgaaataggaaatcagacaagggaaaagtcagcggggaaactgccagatattcaagcagtttaagttttaagacccttgggcaaaaccagtaattgcccaggtttaagtgaagggaagcagatgctgctcacccacacagtgaattgtcctgaaaccctaaagggcttagacaggaatccaggctagaaaactaaccaatagcatttagaggagaaacagacaagtaacatgatagacaaccatgttttcaacctatgggctatgacccagaagtggtttgtgaaatcaatttagggagttgattccagcattaaaaaaaaaaaaaagtactagaatacaataggatagaatagaacagacaatttcaatgagtaatggtaagcactgtttccttgatgtattttactttggaatgtatatgtatatgcatatctatacctatatatgaatgcagacacacacacatgcatgcgagtccttggtagcaatgtaaaatgtattgtttattgtgagctacgtaaaaaatgtttgaaaggcactgctgcagagaagacaggcagatacagtcatggaaaaccagagagtgcacatcccaccagaagggcagctacaactcagttccaaatgattcttgctatagcttaggatttccaaaagaagccagaaatctgcatctttgttaaatgtcataatttttaaacgttggcaaccagttcaacaaaacaaaagaaaaaaagtgaggctgggcgtggtggctcatgcctgcaatcccaacactttgggaggcggaggcgggtggatcatctgaggtggggagttcgagaccagcctgatcaacatgaagaaatcctgtctctactaaaaatacaaaaattagctgggcgtggtggtgcatgcctgtaatcccagctacttgggaggctgaggcaggagaatcacttgaacccgggaggcagaggttgtggtgagccaagatcaagccactgcattccagcctgggcaataagagcaaaactccatctcaaaaaaaaaaaaaaaaagtgtgtagtgtatatatatgtgttgacaacagcccacagacacacagcttgttttctctatcctacagtaatactcttataagcctactctgcagaaagatgttactgatcattctcttgttcacaaatattgactgcctcttcctacaagcccttgcctttagattatataatccactcactaacatcagtcttggacatctgatctcctttggccaatgaaatgtgagtgtaagtgaagtgtgtgccacttctgagccaaagttctaagaacttgtgtgtggcccattgtgttgccatctctcctttctctctgcctggagaccagcaatgccccatattgaggctgtcccttcacagaagctgccagaatgatgctgatgtggagcagacccactgactgttggaaatagacatgcagcaagaacaagagttaaaccttgccttaagctactgagattctcaagtcatgtgtcactgttaggataaccaagcctcagtccactgatacattgctttacatagatcgtaatcaatcttattaagtaatttttccaataatcctttatttatttgtgggtggaggattacccaggtgccaaggcaagaaactgaaggcacaaactgtttcagtgtaataaagaaaacagttagaatagttataatacaaattagatatagagatgatcgtggacattattaatcattaacttttaatattactctttgttgtgttactaatataaccaaggaataacggcgggtatagggtcaggtgcygaagggacattgtgagaagtgaccaagaaggcaagaggtgagccctctcttacgcccacataagggccacttgagggctccctggtcaagcggtaatgccagtgcctgggaaagcacctgttacttagcagactgtgaaagggagtcttcctttccttggaggactcagggaacactctgctccaccagcttcttgtgggaggttggatattatccattcctgcccgcagtcatccggaggcttaaacccctccctgtggtgctgtgcttcagtggtcacgctccttgtccactttcatgttcctcccgtactcctggttcctctttgaagttgttagaagatagtggtagaagaaatagtgaaagtcttaaagtctttgatctttctgataagtgcatagaagaaaatgctgatgtatgctgtcttccctctctgcttcagctacctataagggaagggccccctgtcctatgatcacgtgacttgcttgaccttatcaatcacttggatgactcaccctccttaccctgccccgttgtcttgtatacgataaatatcagcacgcccaaccattcggggccattactggtctctgcgtcttggtggtagtggtcccccgggcccagctgtcttctctttatctctttgtcttgtgtctttatttcttagatctctcgtytccacacacggagagaacacccgctaagccccataggtctggaccctatatttattactttaaaataatagcatatcaaatgaccaacacacatattaaaaggtcttcgatttcattagtcataaggaaaatacaagttgaaaccatagtacaatatcactatacactcactagagtgactacaatgaaaatgcatcaaaatgaactaaaatactgaaatgaaagttttgaaatgaaatataaaatgaaaatgaaagtaagtattgaaatgaaaaaataccaaatgttggtgaagctgtggagtaagcaaaccctcacatattgggcctgtctactggtacaaccactatggaaaattgtttggcagtctctactaaagctgaacaagcatactctgctgcaattctacctctaggcgtataataaacagaaatgctcatatacatgctccaaaatacatgaacaaggatgttcatagtagctctttcataatagctaactatctgaaactgaaacgtcaaatgacaacagaatggaaaaattaaatgtagtatagtcacacaatgaaatatatgtatacacacatacatgtatcatctatatattatatatattgagaacaaaatgaactgtggccacatgcaaccacttgaataaactgcacaaacataaggttccattgtataaccatatttactgtaattcattctatttactgtggatagtaatttccgttgtttttagttttctctgttacaaacagtgctgctgtgagttttgttgtctacatcttctgactcaaaagtgcaagsctttctagggttcatacctccaactggaattgctagatcttaggatctatacatctttagctttactagataaggccaaacagtttttcaagatggttgtaccaaattacatgcctactctcaatgtttgagagttcctgttgactaccatcttgaccaacatttgatattatctatacctttctaaagtctttgaagtctccaaagagatatggaggcttgataaaatgctacataagttcttacaatcmctagatctatagtgagcaatacaaataacatattttatattccagaacaaatataattttatatgtatatgcttttacttccctaacaaaatgtccaaccttttctccacatttttgaaatttctgaaaaatttgcatttctgatcctagtgatgctttaaaaagattttttttttttttttttttttttgagacrgagtctccctctgtcaccaggctggagtgcagtggtgccatctctgctcactgcaacctccgcctccccggttcaggcaattcttctgcctcagcctcccaagtaactgggactacaggcacctgccaccatgcccagctaatttttgtatttttagcagagacggggtttcaccatgttagccaggatggtcttgatctcttgaacttgtgatccgcccgcsttggcctctcaaagtgctggtattacaggcgtgagccactacacccagccagaaaagattttatatcattaaaaagaaattaagtgcttatttgtgtctgatgatgaactgcataattagatactgtaatttgttaatattattcaataaaatcaaactaacattgaatgagaatctgttcatgtcagtgtttatttcgtgtaatgctcataacttcctttttacagataaaaaacaaagataagagaagtgttgaatccacagtgacacagccaattggtggctgggtcagaatacaaaccagggtctgtctgattacaaaacaactttatcttcattagtcatcactgtctctttttacaattttccttcttatctattatttgttcaatttttcaaaataaaaaaacttttctttatcattttctaaaagagaaatctttctggctttaaaacctgaagctcaacaaaactgggtaaatctcagctctatcactttcctgtgtgtggcctttggcaggtgagttgacctccttaaggttcggttttatgatctgacccaaagtggggatgataatcatatgtatatcagaggatggctgtgagggttaaattagataaataatggcaaagggcagggcgtagtggctcacacctgtaatcccagcatttttgaaggtcaaagcaggaggactgcttgaagccagaagttcgagatcagcctgggcaacatagcaaaaacccgtctcaaaaaattaaaaaattagctgggcatggtagtgcatggctgtagtcctgcctactcaggaggctgagacaggaggattgcttgagcccagggggtcaaggttgcagtgagctatgattgtaccactgcactccagcctgggccacagagtgagaccctacctctaaaagaataaaaaataaaataacaataattataataatggcaaagacttagcataatgccttgcaaatagtaagtgttcaatatctgctctattgataaattaataataattaattaataatattatcattaatatgctctattattaatgtcgagtcaacattgattaagggtaatattttaatacgcctggccgcactactgatctttgtgtcttcatatccagcaaagcatctggcacaggccagctggccaagggagtaattctgattgggtatcagggatgtcctatgaaagatgacacttaagtgagacctgaatgatgagaatgagccagctatctggggcaaagcaccacaaggagaatgaacagccagagcaaaggccctaagggagaaagcagcagcacgcaggccagtgtggctggagcagtgtgagaggtaagcaggtgcctgatcacagccttgcagaacatggtagaaactttgggtggtttctccaagttccatgcctcatcattagaagatttttaagccagtgagtaatatggcataaacaaggaatatctgtagaataaatgagcatttttaaaggttcacattagcagtatgcctctactaccttaagaggtaagattttggcatggatagggctttttcaacctctgtccagatgactggcacatggtggctgttatgaactgaatgtttgagttcccccaaactcctatgttgaagccccagttcccaatgtgatggtaattggagatagggcctttgggaaktaaatgggattggatgaggctatgaggctgggggatgatgggatcagtggcctgatggaatcagtgcctttatatgaagagacatcagcgaatctgtcttgttgtctctttctctccatgcaagcacagaggaaaagtcacgtgaggatgcagcaagaaggtggctgtcacaagcaggaagagggccctcagcaggaaccaaatcagcagasacctygatcttagacctctcagactccagractgtgagaaatcaatttctgttgtttgggccacctggtctgtgatattttgttatggcagcccaagcagactaatacagtggccaagatcttgtccaagaagaatgaatgaatctcatgaaaacactgaatgcatcttacttaatgcttctgctttgggagaaaaaatgcctctcgagctcagggagaacaaaacagactaattaaacaaggagaatagtaaaggaaattgctttttaagcaaggttatatattggttcattgctcatttctaattgcaccagagggaaactagataatagtagtcactaaattccagaagacttggcccaaatttccttcatctaattcaaaggctcgattcagcaaggggcagatgatgcgactgtcccaattgaatgagacagtgaccacacaatgtgctgctcttgacacagcatgctgaacagaggaggaaagatcttggggaaggtcaggtttttatttatgtgcttgtgctgcctatggatttctaaatagatgttacaagtgattatgtcaaaacgtggtacctgttaagagatttaaattttctattttgctaattcagcaaatattcactgagcacctacaaatgctagagcctactctggaagcttgggatacagcagtgaatatggtaggtggggtatggcagtgaatatgacaggtgggatacggcagtgattatggcaggtgggatctgccagtgaatatggcaggtgggaatatgggcagtgattatggcaggtgggatacggcagtgaatatggcargtgggatatggcagtgaatatgacatgtggaatatggcagtgattatggcaggtgggattcggcagtgaatacggcaggtgggatatgggcagtgattatggcaggtgggatacggcagtgaatatggcaggtgggatatggcagtgaatatgacgtggaatatggcagtgattatggcaggtgggattcggcagtgaatacggcaggtgggatatgggcagtgattatggcaggtgggataccgcaatgaatgtggcaggtgggatacggcagtgattatgacaggtgggatacagcagtaaatatgacaggtgggatacagcagtgattatggcaggtgggatacggcagtgattatgacaggtgggatacggcagtgattatgacaggtgggatacagcagtgattatgacaggtgggatacggcagtgattatgrcaggtgggatacggcagtgattatggcaggtgggatacggcagtgawtatgacaggtgrgatacggcagtgattatggcaggtgggatttggcagtgaatatgacaggtgagatacagcatgaatatgacaggtgtggttccagtccacaagagcttgtattgcagttagagggaaacagaaaataaaacaaatctaggaaatctcacatagtgaaaaatgttaaaaataaaamagaagtgtgctagagagtgactaaggaattatttctgtcattatttacttactatttgtgatgaataagcattaattggaagcttaatattgacctctgctttctttttcttcttaaaagaggaaacagtctgatcacttttactataaaaataaaaaaaaaaagaatccacggcctttcttgagctcttatcatcaaattaaatttgtatattttgagtccttttgaaagggaaaatggaaaatgctgttagagaagtccagtggggcattaaagtcaaacgatgagtcagatttggaaagtaagcattttgaaagctgggaccaggttttcctcaagtctgcatcttgcrtagcaactagcataattcctggcattattaataatgtaacagaaaaaagggccaatatattaacaagcagcaattcaaagaaaaaggaatccaaatggctaataaacatagtaagatgctggctgggcacgatgactcacacctgtaatcccaacactttgggaggccaaggcgggccgactgcttgagcccaggagttcaagaccagcctgggcaacatggcaaaacccrgtctctacaaaaaatgcaaaaattacctgggtgcggtggtgtgcacctgtagtcccagctactcaggaggctgaggtgggagaatcctctgccttccatatgaacccgggaggcagaggttgcaatgagccatgatcatgccactgcactccagccgggatgacagagtaagaccctgtctcaaaaacagaaacaaaaaacgaaagaaaacaaaagtaatcaacaacaaaacgatagtaaaatgctaaaaccaactgtgtagcatcctataggagacatatcatgactacaagattaatgatagctataaggcattaacaagctctcacaggactgacactatgtgccacttagcagcgtgaggccacctggcctggggatttccaagctggcccagggatttccaggacataaggccacctcatcacggatgcaaatctcgtaaacctttaacaaagcttacccttataagactagcttaacctcctcttatgaaagaaacgcctgataattgactgaactaaatgcaggtagaagaaatgggaagaatctcccaaactctgagaatagtctccagatggagaccctcctggacaggcagtcatctgacctctgattgaatctggcccatgccacccacctgctcccactatccgacttgtaagaccactgctaaaataaatagcttgaacatcagatggtattgaagtcacatctttgatgtgaatcggactgaagggaagttgcttctagggaaactggttygctaggaccatcgaaaacctccaaacatggcaaatttataactcaagtgaaacgaagtaaaaagagaagttatatatataatatatacaagatatataatatatatawaatatatagtatatattatataatatttattataaatatataatatrtaatatakaatatataatatttattataaatatataatatakaatatttattataaatataatatttataaatatwtattataaatatataatatataatatttattataaatatatattataaatatatgatatttaaatatatatattataaatartattataaatatattatatatatagtggtaaagttttaaaagttttgtaaaaaaaacaaactcccgagcgccccaaaaccgtgtggaaatatgaactcttactcatcactggagggaaagataatagatgtcttttgagaaggcaatttaaaaagaagtatcaaaagtgtaaatgtacatcctgctttacctggaaactacaccaagaacaacttatcccatggatctgtttgtcaaaatgcataaatatgaaagtataaagatattatttatgatgcaatttatgaaaataaaaacttgaaaataaaccaagactccattaacacagggagctggacacataacatctggtgcatccatatagtagaacagtatgtagctgtatataaaagaatggagagttctagaaaatatacaattaggtgataaaaatcaaggagcattaaacatttctgaaacaatatatgagtgttaatagtggggtctagaacgtgagaagggcaaggaaaaggattcttccctagagcctccaggaagaaaccagtcctgctgatgccttaatttttcacccagtgagacgcatttcagaatgctgagctacacaactatgagatggattcgtgttgctttaagccacaaagtttgtggtaatttgttacagcaaactaatttaagtatttacttctatagcatgggactggaggttgaggtagtgaggaggaagattttatttttatgtcattcctatttcacttaaatattttaacatatgcatatataacttaaaaatatatataagaacaacaagaagatatttttaattggcattttaaagaagtacaattccctttgtaatggcaaactttaaggataattttctattatagtcagaaaataatgaggtaaacattagaaaaataaaattccaaaaggagaaaattttatataggttctaactcactcaaaagaactaggacctaagcttatgatttcatccttatacttcttcttttttttgatacagggtctcactgtgtcaccctggctagagtgaagtgagtggtatgatcacagctcaccgcagcctcgacctccttgggctcaggcaatcctcccaccttagcctcccaagtagctgggactataggcacatgccaccacatctggctaatttttgtattttttttgtagagacaggatttatccatgttgtctaggctggtcttgaactcgtaggctcaaatgatccgcccacctcagcctcccaaagtgctaggattacaggcatgagccactgcgcctggcttcatccttacacttccatatggtggcctcaatttactgagaatatgtctgtatgyaataaagattaaaataacacaattttgaaaagtaggtggatacctaatgagaggcaaaaataaaacaaaacaagataaaacctgtctcatttttcatccctgagcattcaatgtctgccaccactgtcccatcactacctctttcaattaactggatgataaatgtgcattacaaattgcatgatgttttctagatagccatcctattatagcacagtgcactaataataaaaatatacaatgtttaatgagcagtatgtatcccaggcaccattctaattattttctattaatcgcattttatcctcacaataaccccactgaggtaggtattatcgtcatctccatttctttgaggcacaaaggagttacctgcccaaggtccacacagctaatacatgaggagacccagaytggaacggaaacagtgtaactgcagaatggcccatctcaaccacttaatcctgtactgaatacagttgagaaagtttaactcaacgtctaaacagaatttctttgtgatgaacgtggtgtaggacaagctttagttttggcagtcctttcagcattgcagatctagggtgctggaattaacataataatatgcttcttgtcttttcattccaacagttcagcctctccaccatacagctttcccaacatcctttcttttgtctcctatttgagctcaaaatgatctggtatgccaaccccagaagcatttatgatcaaatcccttttatttccttttcaagcctctgttctaggacctgtgcttcagcattcctgggaaccaaagtcatgctgcaataaaatcacttgcaaattgttggcattatcaaatcacattggaagacacttgtacaaaagaatgaacaaaatataataatggaacaactttggcatactgctgctaattaacgaaatacattttaaaatactaaaaaaaaaaaagagagagagagaaaagaaaactccatctcaaggagtcctgaagcccttagtgatctccaggaagacactcccgaacccagagcattttaacttaggctccatgtgaatggtttcaggacacctgggaaacacaagaatcctccccttacagccataatgatctgtatcaccttcctccatgaaaatcagatctggagttctcttctctcttgtttacattctaggtragggggaaaagagacaaggaaagacatattcacagacaaactaataaattactttgaagtacatttatccattattaatgacagtatagtggtataattaagctatttcaaataactcatatataagaacacgttctgttgtaaagagatccctgtacaccttgggcttcttgtgatttaaggcccagcctcacttttccatcccacatctgctccctagggcaccacagagtttgtttcttcaaatcttttttttcttgccagctattgctatastctaccctacccacctgaagttcctttccctaaagactggtgctgtataatacacaggtgtaagaagttagccagcttgctttaggcagacagtaagggaagggtccctggagaacctccaacccgccccacaaatgcttacaccagatattttgtgcagatgtgggaacttgcacagggggcttgcctaaacatgcccgcagtggaaaattccattccttaacacatgtgcagtaagggaagtaaatcaatatggagtggctcaccctaagggcccacatgcgcactggaaggatggggtggagccgccaggaatttgtgccttaagcacagtattcaactgtgaagggggcagccaacaacctgcttttccagacccccctctttgctgagagctttccttttgcttaataaattctactctactcaccctctggtgtccacgtgcctaattcctcctggttgtgagacaagaacctgaacctagctgagctaaagagccaaaatcctgcatcttgggctccccagcttcccagttctccccaccctcttctaacttagagttcttaaaatcagcacaagagtctgttttacattttaatgtttcatctatatgcataataaggaagcagatctcactgctcaaggacttcatttttgcaattatccctcccacctctctccttcatcaatttctccttctttaaggatcatcagtttaaaatatacatctcaacataaactaccactgcagcagaaaccaacaacaaaacaaaatgaaaataatggtaccccatccctctgctgcctttcacagcaaaatcctgayatgaactgttgattcttgccatctctgtttctccacatttgctcttcagcctactctcatcagaccttggttcctatcacctcagggaaactctcctgccaagtcatcagcaacctccatcttgccaaayccagtaattaattcttagcttcattttactcacacagttctgcatttcttccttttggaaagacatttttctctaggattctaggtgactgctctaggagacagaggtcttcttgggtttttgttttttttktttgtttgtttgtttgatggagtctcgctctgtcactcaggctggagtgcagtggtgcgatctcggctcactgcaacctccacctcccaggttcaagcaattctcctgcctcagcctcccgaatagttgggattacaggtgcgcaccaccacgtggctaatttttgtatttttagtagagacggggtttcactatgttggtcaggctggtcttgaactcctgacctcaggtgatccgcctgccttggcctcccaaagtgctgggattacaggcgtgagccatcacactcagtcttctttttttttgagacagtcttgctctgttgcccaggctggtgtgcagtggtgcaatctcggctcactgcaacctctgcctcacagttcaaccaattttcctgcctcagcctcctgagtagctgggactactggctagagtgaagtgagtgtgcaccaccacacccagctaatttttgtatttttagcagagacagggtttctccatattgtccaggctggtcttgaactcctgacctcgagtgatctgcccacctcggcctcccaaagtgctgggattacaggtgtgagccaccatgcccggcccaacagaggtctttaatggtttctccttttctctacctgcttctgtacaccagagtgtctgaggctggatcttcagatgtattctcgtcattccttaggttatctcctccaagcccatggcttaaaatgtcayctattcactgatgactcccaaatttctttctctagcccagcctctaccctgagcccagacttgtgtatccaattacctacttgtcttcaccacttgaaggtctaataggcattttttttttttttttgatacagggtctcgctctgtcatccagagcgaaacccagagcgagtctgttaccatgactcaagtgatcctcccacctcagcctccctagtagctgggactacaggcacacaccaccataccgggctaatttttgtatttttkgtagaaacaaggttttgctgtgttgcccaggctggtctcaaactcctgaactcaagggatccacccacctcagtctcccaaagttctagattacaggtgtgagccacggtgcctgaccataacaggcatcttgaactaaacatgatcaaaacagaactmttgatgtcatactccccacccccaaaccaacccagcttctcaatgagaggtcccattttacaacatgacagcacagtactatgtttatgtccatctcacacacttgactgtaagtttcatgagagcaagggttttgtcttgttttttgctgtatctcttgtgcctacagcagtctctggcaaaaagacagtgttcaatgaatatttgatgaatgcagaatagtggggcaaggaaagtaaaaacaataaacactgaaaatctgcaaataatmaaataactgtaaagatgattttttttgagacaaggtctcactctgtactgcaggatagagttcatygacaccatcacagctcactgcagcctcaaccccccaggctcaagcattcctcctgccttagcctccaaagtagttgagactataggcacacggcaccatgtctggctaatttttaaaatttttatagagatggagtcctactatgttgtccaggctggtctttaatcactggcctcaagcgatcctcccaccttggccacccaaaatgctgggattacaagtgtgagccaccgtgcctggcctcttttgtttttctttttttaatcaacytttttttttttttttttttcctgatgggttctcactatgttccccaggctgttytcaaactcccagtcacaagtgatcctcccgcctcagcctcccaagcagstgggacttcaggcacacaccactggacctggctataattcatatttcttgataagaaaagttgatggatgctttttctttccagatgttaaaacttgttttaacccaatacrcaaatctttaaatatgcctttgggtttttttgctccaagttgtgatttcatcctttttccttttttttttttttttttttttttttgagacagagtatcattctatcacccaggctgtagtgcagtgacacgatctcggctcactgcaacctctgcctcctgggttcaagcgattctcccatctcagcctcccaagtagctgggactacaggtgtgcgccaccacaccyggctaatttttgtatttttagtagagaaggggtttcactatgttggccagactggtctcgaactcctgacctcagacaatccgcccacctcagcctcccaaagtgtgggattacaggcatgagccaccgtgcccagcttatcctttttcttaaactatggttaattggacacttatcctagtaactactctaagagctttgcattacctcatttaattctcaaagtaacactatattgcaatattatgctcatctaacagatgaagaaactcaggcagagagaggcacgtaacttgtcagggccatgattcaaatccaagtctctctgacttcagatcccatgccttaattgctaagctatatggcctcctttgttcctgctgatgatttggattacattcaatacactgtttgctttaggaaaatcacttgatcttagtcctgggcaaacagcttgtgttccaaataacagcagatatcctgaccaggcctcaaatagtcacytgaattgagcttaaactaagctctttgagaatggcgtgaacctgggagggggagcttgcagtgagctgagatcgcrccactgcactccagcctgggggacagagcgagactccgtctcaaaaaaaaaaaaaacaaaaaacaaaactaagctctttgattcccagcaaacaagtaaaaaataaagcacatagagttatataattctagttatctgatttttaaaatactactagatattcaaaagaaatacatttatttgtttactattatttttatccctattatacagatgaaaaaactgaggcttggaaagattacaagattcagacaagattccattgaaaataagtggtggggcctgattctgagcccaggtctttgtcttcagagtctatattttaaaacatcatattatatggttcagaagagcttgcattttaaaaaatagcctatgtcggccgggcatggtggctcacacctgtaatcccagcactttgggaggccaaggcaggcagatcacgagattaagaaattgagatcatactggccaacatggtgaaaccccatttctactaaaaatacaaaaattagctgggcatggtggcacgtgcctgtagtcccagctactcaggaggctgaggcaggagaatcgcttgaacccaggaggtggaggttgcagtgagccgagatcgtgccactgcactccagcctggcgacagagtgagactccatctcaaaaaaaaaaaaaaaaaatcctatatcaagagaaaactaagacttaagaaaaaatggagagatttayggattacatgtaatttgggctatgccccttgtgtacctgtcagctgggtttttgataggaatagaataagaagtaggcaattggaggtaactccaattaatgacagcctgcctcaagtgctgtgtgttgcagcctgaagagagattatatgtattgggtaccaggcaagcaggtggcaaggctgacattccataaaaaatgatgaaaaccttgctatgatgatttgattggatgtaggggtcagcttattttcataaggggaaaggcaaagagagacacagggtcaaatggtcctcaagaaaagctccgtcatactgagcacctattagcagacaaaaaactagattggaacgttttaggcctaggtattattggctatcttgtatacaaaagaaacttagtattgatttttttccaagtctcattgtaaaaataattgttttccatatttcatttcagaaaatatctatgaaagacaatgattttaattttgaaatagcagataaagaatgagtcttcttacctataaacaactgaactaatgatttcttaaatgccactggtaagtttgaataagaaataattaatacggataagaatgtaatattcttattacaggaggggtaccacactgtaaatggcactgggacatttagccatttaggggaagatttttaatttaaactctcttgctgttccacacatcaaactaaatctcatgtagatgaacacatygaaagtataaaagccacraaaacaggtagaaatgagtattatatttttatagttttgagaagagtgaagggaagaggaaggagagggaaagatattctctgcttaaagggcactctaaggaatctcctaagaaacaatcagtasatttaaaaacaggaacactaaaccttcagggtgtcaaaagtaaaataaaatcaaaaggaaaataacaaaccagtggaaaggatttctactcatagaaaacgattaagaaaatcaataattttttggcacacacaagtagtagaaacattaaaacctaacaaatgtgtaaaattgatgaaatataaatttaaaaagtcttctaccatttgatcaattatttttaattatatttctggatcaataaattttaattatatttctggaatgctatccctaagaaataaccctggccagacgcagttgctcatgcctgtaatcctagcactttgggaggccaaagcaggcagaccgcttgagctcaggagtttgggacaagcctgggcaacatggcaaaaccctgtctctaccaaaaatacaaaaaaaaaaaaaaaaaaaaattagccaggcatggtggggcgtgcctgtaatcctagctacttgggaggctgagatgggaggatctcttgagcctgggaggtggaggttgcagtgagccaagatcgtaccactgcactccggcctgggcaaagagtgagaccctgtctcaaaaaaaaaaagaaaatcctaaatacattttaaaaatatatgcaaacagcaatgaaataataatayaatagctaacactcacccagccctaactctgcaccaggtactatttcaagtatgtcacatgtaaggactcatttaatcctcacaacasacccttgagttaggaattgtcattattcccacttaatagctaacaagatcgaggcccagagaggataatttacttgcctaaggttattcagctaacatgtgcatagccagtgttaaaccctggcaaataagaaaatgaatgcatttgcaaaatctgtgcatacttaaagggcactctaaggaatctcataagaaacgatcagtagatttaaaaacaggaacactaaacctttagggtgtcaaagtaaaataaaatcaaaaggaaaataaaccagtggaaaggatttccacttacagaaaaggattaagctctaaaaacaaaatccaaagcttctaacttcaattatttgcaaagttttaggtaataaacttgtaagaaattatattaaattgtacttaatacaatttttcttttgtgaattttttttttttcttttaagacagagtctcgctctgtcggccaggctaaagtgcagtggcacgatctcagctcactgcaacgtccgcctcctggggtcaggcaattctcctgccttggcctccctagtagctgggactacaggtgcctgccaccatgcccagctaatttgttttgtattttagtagagactggtttcacaatgttgaccaggctggtctcgaactcctgacctcaagcgatccacctgccttggcctcccaaagtgctgggattacagacatgagccactgcatatggccttttttttttttttttttttttttgagacagggtctcactctgtatcctaggctggagcgcagtgrtggaatcatggctcattgcagccttgacctccctgggctcaggtgatcatcccacttcagcctcccgagtagctgagactaaaggtgcacaccatcatgcccagctaatttttgtttttttgtttgtttgtttgtttgttttggagagacagggtcttaccatgttgcccaggctggtcttgaactcctgagctcaagtgatccacctgcctcatccttccaaagtggtaggattacaggtgtgtcttaccatgtcccgtcttgtgcatcttctttatccaacatgaaatgctatgctgttagccttcaataaaatttcctggaaatctagtttaaaaaaaaattcaggtgcctaggtcctatctggccaagaataaggggaaatagactgtttttagtctgtgatttgatgggatacactggggaaagtctgtctccaaaagcagttagagcagagcactaactctagttatacttcataaaaattcttgttgaattcaaccttcatagctctgacctctactcaatttcagacaggagtacaattcacagattgctaatggagaacagatcaatttcaaggccatctaggacatgcataaccatacacagagaagaacctggctttaagtttttaattaataatacttcccttaggctggagagccaagtagtatctgcctccatgtttcccagagggcactaatcagactgtgtacttggaggatatccagcaggtgttttctgctctgattcaggccactatcctgaaaggtgcagtccatggggagagaactgcattctagtattagaataaattgtaacttcattttattcccctgaacagtctaataaaggtaggcatgcccttatacatgcagctattcccagcagtgtttgcaaagcgtttgcacagagtaggtgcttaatggaatggtaatttctgaaggaaacattttgcagccaattaaaatacagcacagagtttccatttctctttgccrctgtctggaaaattgtagatacatatgactttctgcacgtacacatcgaaagcatttgccaactcaatggtgtttctctcaatctgaagcttaatggtggatttgcccatcacaataagagggtaataatactgtctgaccttggagtgactcactgccctcctctgctgactggccccaggcaggaagggtaatgcaaaataaatgaatgggtgagtacatcgcaatgaggtgaacatcatcaactctactcttctgaatcctattaattttaaatatatcttctctctttgttctaatagcaagtgccccaaatagaatgagatataataaagaattcatttgtagccaaagttacatatttattatcttttactcttctttcttattttctttcttccttactggtgtagaacatgcatttttaaggggtggggagtggtatcacctctgtggctgagtattggtccccaaagatatccagttcctaatcctgggaacctgtgactcttaccttatatggtaacacaagctttgcagatacgattaaattaaggattttgagatgcagagattatccggaattagcaaggtagaccctaagtgtaatcacactgtcctcatgagaggcaggcagagggagacttgacagaagaaaaaggcaacgtgacattgaaacaagatgctacacggctgctggctttgaaagatggaggaagcagacatgagtcagtgaacacacagaatgcaagtctggaagccagaaaaagatggaagctggaagaggaaatgtacgcttccccagagccttcctgggggtatggccctacaccttgacattacccccagtgaactgcatttccggcctctagaactacaagggaataagttcgtgctgttttcagccataaaattcatagtactttggtatagcagccataaaaaattaatatggcccccaaaggggtgaaaattggtccttggggaatcaaataatgcttaggttattacagtggtttgtagtctttccaagattaaactctaactgacaaaatcttactcttcagtacaggcatatcttggagatattacaggtttggtttcagaccactgcaataaagcaaatatctcaaaaaagtgagtcacatgaaatttttattttctagtgcatacaaaagttatgtttacactatactgtagtctcttaagtgttcaataccatatctaaaaaatacataccttaattaaaaaatgcttgagtgggccaggcatggtggctcatgcctgtaatcccagcactttgggaggatgaggcgggcagatcacttgaggttgggagtttgagaccagcctgaccaacatggtgaaaccccatctctactaaaaatacaaaattagccgggtgtggtggtgcatgcctgtaatcccagctgcttgggaggctgaggcaggagaatcacttgaacccaggaggtagaggttgcagtgagctgagatcatgccagctcttgttgcactccaggctgggcaacaagagcaaaactccaactcaaaaaacaaaaccaaaaacacttgagtgttaaaaaacgctaacgatcgtgagccgagatcgcaccactgcactccactgcactggagtgcaatggtgcgctctcggctcactgcaacctctgcctcctgggttcaagtgattctcctgcctcagcctctcgagtagctgggattacaaacatgcgccaccacgcccggctcattttgtatttttagtagagacagggtttctccatgttgatcaggctggtctcaaactcctgacctcagatgatccgcctgcctcggcctcccaaagtgctgggattacaggcgtaagccacagcgcccggccaacaatttcctttcttttctttttttttttttttttttgagacggagtctgactctgtcacccaggctacagtgcagtggtgcaatcttgactcactgcaacctccgcctgccaggttcacgccattctcctgcctcagcctcccaagtagctgggactacaggcacctgccaccacgcccagctaatttttttgtatttttagtagagacggggtttcgccatgttagccagcacggtcttgatctcctgacctcatgatccacctgcctcggcctcccaaagtgctgggattacaggcgtgagccactgcgcccagccttttttttttttttttttttgagacagagttttgctcttgttgcccaagctggagtgcaatggcgcgatctcggctcactgcaacctccacctcccgggttcaatcgattctcctgcctcagcctcccaagtagctgggattacaggcgtgccaccatgcccggctaattttttgtatttttagtagaaatggggtttcagcatgttagccaggctggtcttaaactcctgaccttaggtgatctgcccaccttggcctcccaaagtgctgggattacaggcgtgagccaccacacccggctgacaatttcttaaaataagaaaattaattttgctgcaccaattgttccttttgtgaagaaagatttctctgaagcatgcaatgctgtttgatcrcattttactcayggtacaacttctttcaaaattgcagtcgatcctctcaaagcctgcccctgctttatcagctaagtttatgggatattctaaatcctatggtgtcatttcgacaactttcacagtgtcttctccaggaatagattccctcccaagaaatcatttcctttgctcatccataagaagcaactcctcatccattcaagttttatcatgagattacagcaattcagtcacatctttaagcttcattcttaatgctagttctcttgctatttccaccatatttacgagtacttcctctactgaagtcttaaaaaaaaatcctttttaggagatgggggtctcactgtgttgcccaggctggtcttgaactctatgcttgtgatccaccckcttcagccttccaaagggctggaattataggccaccatgcccagcctgctctactgaagtcttaaagccctcaaagtcaccatgaggtttggaatcaacttcttcgaaactcctgttcatgttgataatttgacctcctcccaacagtatctagaatkgtgaatcctttccagaaggttttcaatagactttgcccagatccatcagaggaatcactatctacagcagctatatctttataaaatgtatttcttatataataagacttgaaagtcaaaatgactcctggatccattggctgcccagtggatgttgtgttagcaggtatgaaaacaacagtcatctccttatactttcagagctcttgggtgaccaggtacactgtcaatgagcagtaatattttgaaaggaacctttttttctgagtggtagrtctcaacagcaggctttaaacgtttgataaaccactctataaacagacgtgctgtcattcagactttgttgtttcattaatagagtacaagtagagtacatttagtatcattcttaagggccctaggatttttagaatgttcaatgagcattgccttcaactcaaagtcacaagctgtattagcccctaacaagagcccaagggacaaaagcctgtcccttgaaactttgaagcattgacttctcctctccagctatgaaagtcctagcctgaaggcatcttcttccaatacaaagtcgtttcatctacatttgaagatttgttatttggtgaagccagctttaccaatgatctcagctagatcttctggataacttactgcagcttctctatcagcacttgctgtttacttgcccttttatgttatgaagatggtgtctttccttaaacctcatgaaccaacccattggcttcaagctttccttctgcaagttcctcacctttctcagccttcagtgaattgaagggagttagggccttgctctgaattagggtttggtggccaagcacagtggctcacacctgtaatcccagcactttgggaggccgaggcgggcagatcacaaggtcaggagatcagatcgagaccatcctggctaacatggtgaaaccctgtctctattaaaaatacaaaaaaattagccgggtgtggtggcgggcaccagtagtcccagctacatgggaggctgaggcaggagaatggcgtgaacccaggaggcagagcttgcagtgagccgagattgtgccaatgcactccagcctgggcracagagcaagactctgaaaaaaaaaaaaaaaaaaaaaaaagaattagactttggcttaaaggaatgttatggctggtttgatcttctatctagaaccactcaaattttctgcatatcggcaatgaggctgtttcactttcttatcatttgtgtgttcaacagaatagcactcctcatttccttcaagaacttttcctttgcattcacagtttggctgtttggcacaataggcctagcttttgacctatctaggctttcaacatgccttcctcactaagcataatcatttctatgttttgatttaaagtgagagatgtgcaactcctcctttctcttgaacatgtagaagccattgtagggctattagttggcctaatttcaatattgttgtgtctcatggaatagggaggtctgaggaggaggagaaagatgggaaatagctggtgggtggagcactcagaacacatacaacatttatggattaagtatcaattaagtctttattattattattatttgagatggagtcttgctctatcactgaggctagagtgcagtggcatgatcttggctcactgcaacctccgcctccccagttcaagcgattctcctgcctcagcctcccaagtagctgggactacaggtgtgcgtcaccacacccagctaatttttttgtatttttagtagagatggggtttcactatgttggccaggctgatctcgaattcctgacctcacgatctgcccacctcagcctcccaaagtgctgggattacaggcgtgaactaccacacctggcctcaattaagtgttatatggatgcagttcaggccatccccaaacaattacaatagtaacaccaaagacagtgatcacagatcaccataacagatataacaataatgaaaaagtttgggccaggcgcagtggctcacgcctgtaatcccagcactttgggaggccgagggcagatcacgaggtcaagagatcgagaccagtctggccaacatggtgaaaccctgtctctactaaaaatacaaaaaaattagctgggtgtggtggcatgcacctatagtcccagctacttgggaggctgaggcaggagaatcacttgaacctgggaggcggaggttgcagtgagccaagatcgcaccactgcactccagcctgggtggctgatcgagactctgtctaaaaaaaaaaaaaaaaagaaaagaaaaagtttgaaatactgtaagaattaccaaaatgtgacacagtcataaaaggagcatatgctgttgaaaagaaaatggtcccagtagacttgctcaatgtaggggtgccacaaaccttcaatttgtaaaaaaaaamcccacaatatcttccaagagcaagaaagcaaagcacagtaagacacagtatgcctgtgtttaattttgtggcaactaggaaaaaaaaatagccataaaggatcttttcagagatgataatgaagaaaaggttgtgaaacatcatttcattggaacgcacgaccaacaaaagactaattcaaagatgatacaagatttttattcctcttcaggcctagtttcattatcattaattgttgagggcaagagagcaggtgttatcctgacaggttattttacatccttcattctaactactgagttaactatccaagaaagcttgtgggacacctgtttttacaaaccaacctctaccccattcttagacagacacactctcctgtaagctacaataagacacatgagtaattctgcctgtaaatattgtcactctgttaatatgtgtgttttcaaaggactgtaggaatattgtgtgccaagcctatcaggaaacaaatttttatattctagatgtctataatctactgtaggctggagaatagtatatattgtgatagcctcagacgagatgtttaggctggcaacagtggctcacacctgtaatcccagcactttgggaggctgaggcaggcagactgcttgagcccaagagtttgagaccagcctgggcaacatggggtgatcctgtctctacaaaaaatataaaaattattcaggtgtgatggcacatggctgtagtcccagctactcaggaagctgaggcwggaggattgcctgagtaacctccactcaggaggtggaggttgcagcaagccaaaattgtgccactgcactccagcctgggcaacagagtgagagactctaactccagaaaaaaaaaaaaaaaaagaaagaaaaaaaaagtggtgtttagttataattctgcttttctttctttctttctttctttctttttttttttttgagacggagttttgctcttgttgcccaggctaaagcgcagtggtgcgatcttggctccccacaacctccgcctcccaggttcaagtgatttcctgcctcagcttcccaagtagctgggattacaggcatgagccaccacacctggctaattttgtatttttagtagagatggggtttctccatgttgatcaggctggtcttgaacccccgacctccggtgatctgcccgcctcggcctcccaaagtgctgggattacaggcgtgagccaccacgccctgcctaattttgctttttaaaaagctgtcttagtgaaaccaaaaatatatcagaaaactatttctaaaaaagtacttttaatgttcctgaacaagtggtgatatggaagctggctaactaggtaatcaatatatagcctgccttatgagatccatagtgttctaacttaattcaaattgaaagttaaatttggatctactaatacagctaatccagttaggtctacagtatttgtttttaaaaatatttttgttggatatgcattaaaaagtgtaatttgaggtatatataaaaattcattacgatatcactaagctcattcattaggttgctcaagtatatgtttcctataaccttcaagaagttaagtcctgagtagattctggtatccttgatttttagattaatctgtaaattcccttaggagaattaaatgcctgaacagaatcttaatcaggctagacctgccaactgggatgctctttggaaatagaggtcaagacgtaaaaaaaagattaaaattgtccagtaagcatcccagatggaatgctgactatgcattacttgcccgcctaccaggctgcacaaggaacaaaacctgaacttagggtgggagaaaaagtttgaaaccaaattgagctatttttagtccaagaatcaatatgtacaaaatggattgtgcacagatctttattcttatggtccragaagtagagaactggtgtttgaccctactcagaagataggaaaggggagggagggagggaaggaaggaaggaaggaggaggaagggggaagaacgggagggagggaggcaagagagaggacagaaatccttatatatatgctaagtacaccatacgagttccgcattttaaaaagtaggctgctttccactgcttatttttaaatggtgaacaataacagataaaaatgtaatgaccttgaaaaacagtaaagggaatatgtgtaagcytactttttttttttttttttttaaagacagactcttgctctgtcatccaggctggagtgcaatggcacaatctcagcttactgcaacctcctcctcctgggttcaagcgattctcttgtctcagcctccagagtagcyggggttacatgtgcccgccaccatgccaacataacttttgtatttttagtagcgatggggtttcaccatattggccaggctggtctcgaattcttgacctcaagtgatatgcccgccttggcctcccagcaagattacttttaaaacataatttttttaaacctatgtcagtgccagagttgccatttctacattatgtcctgggcaatgctctctgccattttccatttaattttccatttggcgctggcttaatgacaggctactacacaagaggttgatgtcactgtcatatcaggccagaagtttcggccccttcttattgtctaatgcagaaataaagcagtcatggggaaaggattccctatttaataaatggtgctgggaaaactggctagccatatgtagaaagctgaaactggatcccttccttacaccttatacaaaaatcaattcaagatggattaaagacttaaacgtttgacctaaaaccataaaaaccctagaagaaaacctagccattaccattcaggacataggcatgggcaaggacttcatgtataaaacaccaaaagcaatggcaacaaaagacaamattgacaaatgggatctaattaaactaaagagcttctgcacagcaaaagaaactaccatcagagtgaacaggcaacctacaraatgggagaaaattttygcaacctactcatctgacaaagggctgatatccagaatctrcaatgaactcaaacaaatttacaagaaaaaaacaaacaaccccatcaaaaagtaggtgaaggacatgaacagacacttctcagaagaagacatttatgcagccaaaaaacacatgaaaaaatgctcaccatcactggccatcagagaaatgcaaatcaaaaccacagtgagataccatctcacaccagttagaatggcartcattaaaaagtcaggaaacaacaggtgctggagaggatgtggagaaataggaacacttttacactgttggtgggactgtaaactagttcaacccttgtggaagtcagtgtggcgattcctcagggatctagaactagaaataccatttgacccagccatcccattactgggtatatacccaaaggactataaatcaggctgctataaagacacatgcacacgtatgtttattgcggcattattcacaatagcaaagacttggaaccaacccaaatgtccaacaatgatagactggattaagaaaatgtggcacacatacaccatggaatactatgcagccataaaaaatgatgagttcatgtcctttgtagggacatggatgaaattggaaaccatcattctcagtaaactatcacaagaacaaaaaaacaaacactgcatattctcactcataggtgggaattgaacaatgagatcacatggacacaggaaggggaaccccactctggggactgttgtggggtggggggaggggggaaggatagcattgggggatatacctaatgctagatgatgagttagtgggtgcagcgcaccagcatggcacatgtatacgtatgtaactaatctgcacaatgtgcacatgtaccctaaaacttaaagtataataataaawaaataaataaataaataaataaataaataaataaagcagtcacaaattaaaagaattggtaccattttgaagctgtgtccaaatgatgttcaacatttggattcygggaatatttaaatatgctttttttggaggagggggtagggggcagggtcttgttctgtcacccaggctggagtgcagtggtatgatcacagctcactgcagcctcaacctcccgagtatctgggactacaggcacaygccaccatgccctgctaatttttgtattttttgtagagacagagtttcgccatgttgcccaggatggtctcaaactcttgggtttaagtgatccactcaccttgacctcccaaagtgctgggattacaggcatgagtcaccatgctcagcctaaatacgctttaatttttgaagttttctcccaaatatttgggattatggagatgcctgtccttatcatctccccaaaataacctcaaaaaggctaaagatatttttgaataragagcaastgacatcattttgtgaactattaaaaagctattacattatttctcattgacaaatataatatcactttccaaatcatggaaaaaattatttccagtccttaaaagagaaattaaatgtccatgctccttaaaataatgcttgcattttatgaccaatcaatattcactggttctatgagcagatgggatgacagcagtcatgataatttcacagatgtgcataatgcaccttcctttaacagaaacctgactctcccttggggacactgtttcccctgcaactctctgaagtgctatttcactcccatgccactgggcctgagacagatgccccttttgctccacatggctggaargtgaggtgagacagacgccgcttttgctccacgtggctgctttcagagcattctccttctctcctctctaaaaattctgtgctttaaacctcatgtcatcagattctatcatccgctatccagcactgttactgttaygtagcaaacaccaactcattccccttcatttctcattgccattgccatcatctctagaatttctggtcttaattcctggcattctcaatacccacacagatgatctcaattcttgaattcctatttatttatttgyttrcttatttatttatttatttatttatttatttatttatttatttgagacagggtctcattctgttgcctagactggagtgcagtggtgtgaccttggctcactgcagtcctgacctcctgggctcaagcaatccttccatctcagccycctaaggtgctaggattacaggcaggagccactgcatccagccctgaattcctctttttgagggatcttctctcctatggcaggcactcactcccatgactcctacggttcactctcccaggtgattatcgcccacttttgtcccttcaaatctcagcccctcccctaccttccctctcagctgctgaccttgcttccaccgcagtgaggagatggaagcagactgaagaggacttgcttcactcacatctatctacccatatgctggcatccacatccacatattctgcttttccaagtgttaccatatattaaattttctagctccttctaagggcaatccctccatttttgtactagattccatccytttctcctttactcaaggaaatcaattgctctaggctttcttctctttccttcttacatcattaaaatttcccactttatggggtcatggccattagcattcacaaatgttatttcttccatcttaaaaaggaataaaacccaacaacttgcacgtgagcccatctcgtcccctagctacctcctcatttctttggtcctatttgcaaacagactccatgaaaaacgcttctattctctgcctgcaattcctctccttttattctctcttaaacttactatcctcagcctttttctcccaacactctatggaaacttctctcactgaggtgaccaatgaccccttgttcgtaaacccaatggtcaatatatgtcctcgtcttgtttgacttattagcagcatccgcactgttgatcatttacttcctggatatcattttcttatttggctctcagaaagcattgtctaccttctttctacctcactactattttttagtctcctttaccagtttctttttttgtcccccacctctcaatgctgcagtgacccagggctcagtgcttgcccttttctctctacatatctgcccttggtgatttcaccaatgccatggccttacatagcatctatctactgatggatccaaaaattttttgtttttgtttttgttttgagacagagtcttgctctgtcgccaagactggagtgcagtggcacaatctcggctcactgcaacctccacctcccgggttcaagcaattctcttgcttcagcctcctgagtggctgggattataggcatgcaccaccacgcccggctaattttttgtatttttagtacagatggggttttgtcatgttagccaggctcgtctcaaactcctggcctcaagtaatccgctcgcctcagcctcccaaagtgctgggattacaggcgtgatcccaggtgccccgccaggatccaaaatgtatacctccattcccagacctctctcccaagctcttagcccttatcacccactattcactcaacatccacaggtggacctctaatagaaatttaaaacttaacatgttcgaaactgaacttctgaccttccttcctaaaatgtgcttcatttgaaggttttcccatctcaattgataactccatttttcacgttggtcaagctaaaccctcagactagagttcttttctcatgcctatctctcattctctacattcaacccattagaaaatcccattggggctactctcaaaaattattcagaatatgactacttttcaccacttctacccatcatcctggtccaatccaccatttttgcatatctggatgactgcagtaacctcacattcctatccttgcctcaataaagtcaggttcctcctttgcccagcaccttcctgtagctcctcatttcactcaagataaaagcctaaatcctttcaatggtctacaaggccctacatgatctggcttcctgttacctctctgacttcatgacagtgtgtattggtgaaaggatagacacacagatcaatagagcagaatacagattccagaaatagacctacacaaacatggccaataaattttgacaaaagtgcaaaggcaagtcaatggagaaagagtagtcttttcaacaaatggacaattggacatttatatgccaaaaaaaggaacctcaatctaaaccaactcctttatgcaaaaacgaactcaaggccctgcatcgagagtcttaggacccctttccaagagactatcgtgctcaacaagaatcactcaaagggtggcagagtgatcaagaacaccaagaacatcctaatgtcctacgtccatgtggaacttacattcaatgacaagaagaatgtgccagagtccttcaaagggaccaagaaaggcatcgtctaccttaccccttaccgatcatctttctgtccaagaagaagaactccatgaagccttcgtgatgccttttcacctgatgaaggactgtgagatcaactagcctgtttgctgccaactacttcaaaagaacagtgaagggtgaagcgggagatggctgggagggctggggttcatacaagttaaccttacagcagtttggacaatgaatgctccaggtggcatttcaagcctccaggggcgaggcccccaatggaggctacgggtactcttacatacccaacagagcctatgtctttcctctgccagttgccaatggaatgtacctttgccctcctggctaccccaatccacagtccccatctgagttctatccaggacctcccatgatggatggagctatgggatgcctgcaatccctgccactgccctatctgggctcatggaacctctggtcagtggccccattggcccctctgctctggcagccaaagccagagccacagaagcagttgtcagtgccaggcaacccacacaacacctacatacctaggaaccagcctctgccactacactattacagccccctcctctgaaaataagaagacccagtagactccctcccacctccctgtttcccaccctctttgcccattcttacccctccccttggggcagcatcagaggctaggggaggcgatggagggccttgttcctcctccaaatctgactgtaaagttaccagcaactggtgatgaaggaagagagaggcccctggcccccagctttccacactagctcagaatccagggcgctgctcagccgtgctccccgttaccatctttagggctgtcctctggggcacgggtgtccccccttgttctatttttgctctagtagctttacatggaggaggctctccagccacctcctccttcacagtccatccagctcccttggtctggcagccactttacactcaacctcctgagctgtgttatcttccccgaggacctccccaggccctcctcacatgccttcccctggtctgtgccaagctgtgggaggccaacatccagaaactgtgagcccacattcccttccccgccaggctccagccccaggcacactggcgaagagctccaggggttgggtgttatcaggagcaaggtcaccgcagctggggaggaagcccctgtacttacctgctagtgtttctgggatttctttcctatggcttttctcctctcccttccatctagaaggggcttctcaactgggacaggagaatgcatgtctgtcccatcatggatttgagggccactaggtgggctgggagaagggtcgctgaagcctgggtcctggcctggccctgtgggatgcccatggcctgctggccactcagcctgcactctccctttaagcttcatgcctggttggtgatatgctccctggatgcacagaaatttgctctcattttttcccagactaagtgtgaagtgaggagatggttatttaaagakaattctctatttgacaaaaatccagttaatatattaatataaaatttaaaaataggtcaggtgtgatggctaacgcctgtaatccaagcactttgggaggcygagacaggtggatcacctgaggtcaggagtttgagaccagctgaccaacatggtgaaaccctgtctctactaaaaatacaaaaattagccaggcatggtggcatgtgcctgtagtcccagctactcaggaggctgaggcaggagaatcgcttgaacccaggaggtggaggctgcagtgagccgagatcatgccactacattccagcatgggtgacagagcgagactccgtctcaaagcaaacaaacaaaacaaaacaaaaaaacttacctaggaaaagaaacacccaattaaaaatgggcaaaagtcttgaaaagacactatgccaaagagaatatatggaaggcaaacaagcacatgaaaagatgttcaatattcttagtcaatagtgaaatgcaaattaaaaccataatgagatatcactacacacctattagagttgctaaaattttaaaaatactgtcaaggccaggcgtggtggctcacgcctgaaatctcagcattttgggaggccgaggtgggtggatcacctgaggccaggagtttgagaccagcctggtcaacatggcgaaacctcgtctctactaaaaatacaaaaaattagccgggtgtggttgtaggtgcctgtaatcccagctactcgggaggctaaggcaggaaaatcmcttgaacccggaaggtggaggttgcagtgagctgagatcatgccattgaactccagcctggacaagagcaaaactccgtytwaaaaaaaaaaaaaaaaaaacagaaaaaaagaactgtcaaataccaagggctggaaagaataggggcaacaggaacttttacacattgctagtgggaaagcaaaatggtacagctgctctggaaaacttaaccatacacttaccatatgacctagtatycccactctcttaagtatttactctagaaaaatgaaaacttcacgaaaacgtaagtgtacatgaatgcttatagaagctctagttataatcaccaaaatctgaaaataactcatgttcttcagtaggtgaactgattaatgcaaccacaatgtatctatacagtggaataatactcagcaataaaaaggaacaaactattgacacatgtaacaacttatatgaatctccaaggcatcatgctgaaggacccaatctcaaaaggttacatactgttttattccacttatatgacattcctgaaaagaaaaaaataaaacaaaactatagtaatagagaatagatcattggttatcagaggctgaggtgggagtggctctgactacaaagagtagcactgaccaagggagatttctgaagtggtgaaactggtctacctcctgatagtggctgtggctatatgaatctatttacaagttaaaattcatggaactggccaggcgcagtgactcacacttgtaaccccaacactttagtgagtggatcacttgaggtcaggagttcgagatcagcctggccaacatagtgaaaccccgtctctattaaaaatacaaaatttagccaagtgtagtggtgcacacctgtaatcctagctactcaggaggctgaggcaggagaatcgcttgaatctgggaggtggatgttgcagtgagccgagattgcaacactgcactccagcctgggtgacagagcaagactccatctcaataaaataaaatcgatacaactgtatacacacacacaaaaattctatgagcctgaattgcaaactaatccttacaaacaaacccactttgttaatctgatattccccaaaagcataatcaaatcacaattattcaaaaatgaattgtctatattttgttaagactttgcttccaaattcccaatggcattaatagacatatttgtttactgtagctcagcaagtattagaaagaacttttcaaccaaaagaaatagagctctctcctgtggaatcgcatatgcgctgcaagtttgttgagagaattaaatgcaataatgaacgtagtaaagtgctaagcttcatacctggcatatggtgagctcaataaatgttagctatgatattattatcagttatgtaaatcagttaaaaacaacaacagttcttcactgtttggtgcactgcatcattccagagaggtatgaggtccattcccaacaagtatggagaggagaagagagacaggaacaggccaggaaacagaaaacttcccagcwagagccaagccatgccttcacagaagtgtccgcttcactcagctatgtgtaaccacagctcccaatgaccaattactcagaaggaaacatcagagactgtaagaaacactttggtttttactggatacattaaatgtgctcactttgtgtgtctgtgtcacattttggtaattcttgcaatatttcaagctttttcattattattttatctgttatattgacatgaaccacatccatataagacagcaaacttaacccataaacatgtgtgttctgactactccactgaccagccattccccatctctttctccttgggccttcctattccctgacataagacaatattgaaattaggccaattagtaaccccacagtggcctcaaagtgtccaagtgaaagaatcgtactttcaaggaaaggaagaaatgattaagcatatgccaaattagccaagttaagttagctaagttagccaaattgtgaatgcaaaggaaaagttcttgaagaaaattaaaagtgctactccattgacacatgaatgataagaaagcgaaacagtctcatttctgacatgaagaaaggtctggatagaagatcaaaccagccaaagcctaatccagagcaagggctctctttgattctttttttttttttttttwttgagacaaagtctctttctgttactcaggctccagtgcagtggcgcgatcttggctcactgcaacacctgcctctcacgttcaagcgattctccgcctcagcctcccgagtagctgggactacgggcattcgccaccatgcccagctaatttttgtatttttagtagagacggggtttcaccatgttggccagcctggtctcgaactcttgacctcagatggtccacttgccttggcctcccaaagtgctggaattacaggcgtgagctaccacacccggatgcctctcttcaattctatgaaggctgagagaggtgagaatgctgcaaaagaaaagtttgaaaccagcagaggttagtttatgaggtcgaaggaaagaagccatctccataacataaagtgcaaggtgaagtagcaagtgctgatgtctttaactgaatgcagcaagtgatccagcagatctagctaagatcattgataaaggtaaactaaactaaaacatagattttcaacatagacaaaataaccttatagaagaaaccttgcattagaatttwtaaaaacacacaaatttattgatcacagttctggaggctgaagatctaagattaaggtgctggcaggttcagtgtctggtgagagctgctctctgcgtccaagatggcaccttgttgctgtgtcctccggagaggatgaatgccttgtcctcatacgctggaaaggacaaaagggycaaaaggcctagctagctccctccagccctcatataaactcrctaatctcattcacctcctaagggcccgacttcttaatattatcacattgatgattaagtttcagtgcatgaatttaaaaggggcacattcagaccatagcagctatcgtattaaaacttcatatacttttctagaaatttcattgcttgaggcagggttcggaagagggaaacctatgctcttggcagctacggtgacatggcaaagaatggcacatcagagccagtgttcctgagttcagatcatggcctgtcacttggtacccatgtgctctggacaaatgatctgacctctctttgatccacgtgccccatcagtaaaataggggtataatataataggaactgcctcagtagggttgttagaaagattcagcagttaaggcacgtaaggtatttagaacagtgtctggcactcaataaatgttgttattttcactttaaattataggcttaatctctactaaggtcgataattcatttgataactccaatcttctgcattccacctgaaggggcctatcttatgtgacatctttttatcccatatataccaattctggttaggaatgctgcataattgctttgtatactttgtaaatattgcagttaattctaacatatcttatatttgagacattagctagtaattgggagaattaagtagtattaagtttcattatcctattttatgatttcattaatgtggattttagtttagtttagtataaataagtataaaagtaaatattacccaaattttaggctatcttctagtataktatacctacaggttgaagatagaaaaaatgaaattcaaacttgtttactaaatatctatttaaatcctatagcaatctgctttctttatgctcttaccaaaaataatgctgggtcaagagaactcagagatttcttcactctgcctattattggccctgtaggattaactcctaattaggttaagattaactattaatttggttctccaatttgggtgatcagtttttstttatactccctgtattttataaaattattattattatcattattattttttgagacagagtctcgctctgtcrccaggctggagtacagtggcgcaatcttggctcactgcaacctctgcctcccgggttcaagcaattctctgcctcaaactcccaagcakctagggacaggcacccaccaccacacccagctaaattttttgtatttttagtagagacgggatttcaccatcttggccaggctgatcttgaactcacgaccttgtgatccagccgcctcggcctcccaaagggctgggattacaggcatgagccaccatgcccggcctataaaattatttttatttatttttatttatttatttatttatttttttattttttgtgatacagataacgtttattaatttgttttgccacatgtcaggcactgttggaagcattttacatttttttttaaattttttaatttttaattttattattattatacttaaagttttagggcacatgtgcacaatgtgcaggttagttacatatgtatacatgtgccatgctggtgtgctgcacccattaactcgtcatttagcattaggtgtatctcctaaagatatccctccccctccccccaccccacaacagtccccagagtgtgatgttccccttcctgtgtccatgtgttctcattgttcaattcccacctatgagtgagaatatgcggtgtttggttttttgttcttgcaatagtttacggagaatgatgatttccaatttcatccatgtccctacaaaggacatgaactcatcattttttatggctgcatagtattccatggtgtatatgtgccacattttcttaatccagtctatcattgttggacatttgggttggttccaagtctttgctattgtgagtaatgccgcaataaacatacgtgtgcatgtgtctttatagcagcatgatttataatcctttgggtatatacccagtaatgggatggctgggtcaaatggtatttctagttctagatccctgaggaatcgccacactgacttccacaagggttgaactagtttacagtcccaccaacagtgtaaaagtgttcctatttctccacatcctctccagcacctgttgtttcctgactttttaatgattgccattctaattggtgtgagatggtatctcattgtggttttgatttgcatttctctgatggccagtgatggtgagcattttttcatgtgttttttggctgcataaatgtcttcttctgagaagtgtctgttcatgtccttcgcccactttttgacggggttgttggtttttttcttgtaaatttgtttgagttcattgcagattctggatatcagccctttgtcagatgagtaggttgcraaaattttctcccattttgtagattgcctgttcactctgatggtagtttcttttgctgtgcagaagctctttagtttaattagatcccatttgtcaatkttgtcttttgttgccattgcttttggtgttttatacatgaagtccttgcccatgcctatgtcctgaatggtaatggctaggttttcttctagggtttttatggttttaggtctaacgtttaagtctttaatccatcttgaattagtttttgtataaggtgtaaggaagggatccagtttcagctttctacatatggctagccagttttcccagcaccatttattaaatagggaatcctttacccattgcttgtttttctcaggtttgtcaaagatcagatagttgtagatatgtggcattatttctaagggctctgttctgttccattgatctatatctctgttttggtaccagtaccatgctgttttggttactgtagccttgtagtatagtatataaaattatttaaagcagtttaccattaaaaacatatatacaataaggctaatcaaaacgtttaaaagtgagaattagatgaaaaaaatctaggttagtttttttatacttaagcatagccgcagagcttcttaacagtcaaggcagaaataaaaatgtgtaattctactgcctgattcatatcacaagagaaagaatttttgaggtgataaattcagagatatttatctcatgtttctttaccctaagaatatagatctacataatgagtcatatcgtcaatgatatttttggagtatgcagaacattattaatgataattgcttatgtttatgtatgtactctatatcaatataatcttaacataaattttacaaatatcatgaatttaatactaaaactttcagcagagctgactagaatattgattttctaatacctaattcagcaatttttccattttccaccatactatcctgtaactactatttatggaagagaatttgacattgtaatcacacacacatgggtaaatctttcacgatgcacccaacatatatgcacgcacacacacctttgccaggaccaacaatcctactaaaacaggaaatgagtcctttcagtaaagaaaaattatcccattaattaagttcttagagacacagcatctgtcaaactgatcatttactatattttgggttggttatccttgtatatttctcatggtccatcatgtcataactgttctaagttacatgatctctcttccaatcactgtacatcagttaatgcttatagtacaaaaaataaaactgagcctaaaaggaaatcaaatctgagatttcaacttaataccaaccattaaaagtgtgtatcaatacaccaaaaaatagaatttattcctrttctccttttatgttagctctaaatgttaataataattctcttaggtacagcaaaataaaatgtatctgctggattaaaaacaaaaacaaaaactcagggttatagtaatatcaccagctctcactcatcagaaagaacattaacaaatacattattggcacacatagaagacaaagaaacacaagatcttttttttcttttagttacctgacaaatctgaataaacacattcataggctaaagtgcctcaagctgttttagatcaaaaatacctaaatgtggatataacaagttattctcttactgcaaatctactatgtaaaatgcataaaaattgaagaatcacaaccaattgatttattcaggagatcatggtgcttatagcaatgtcccaattgtgagccttcctcagctttgggcaggccaaaaaatctaaattagtggttcttaatatgtggtttccagagcagcagcccccacatcacctgggaacttgttagaaatgcaaattattgggtcctacctcgatctactgaatcagaatctctgcgagggggccccgtgttcatggtctgatgagttctccaggtgattcagatgctccttcaagtttgagaactgatctgaatgaaaggcccctcaaattttttttcttttgctgcctccattcattcctaacttgtaacttcatgcttaattaattaacttctgccatgcatcataaatctactcattggaactgccttcaagcgtggctgtgtaagtgaggatgctccattaatcatcaccacgttgactcacacagaaaagcatctgtggattccctgccccatcctcaaccttggctgttcttggctcagctgcagctgctacacacaatggggattgcagctttcaraggatccatccaactggccatcaagaatactcgactcattggtcacattcttctccataaaccacctgcatgcgtgtgcacacggtcctcacgttgcccatgccacatcctctctgccaacttgcacatgaccctgctgctcacggctgctgaggttgctccctgcaaatgtttggtgacttccttaatccagaatggtgggctttggctccacatgaccctctgtccacttctgcaatggatgctggattgtgccactgcactccagattgggcaatagagtgacaccctgtctcagaaagaaggaaccagagagtagctctgtttttaacagttgttcacgttggagggaaatgaggaggtcctggtatcctgaaaactgtctcrtcttcttcttagtactcaacactaacttccacttcattagatcctttctctgtcttcacaagtcatattgctatatttgggcatatccaaagataacgagataagtaaaccttatctcataagtgaccttgctgtcagtattcatttagttcattgtaatatggacatgtgtaaacgtaaattatctagaaaattccaataaattctggacaacttatatcttataatagtgaagccctatttgtaatatgtcacttatttcaaatgtggattgcttgtcttatactttacaatattgaagaatattttcatcctacatatttctatcactaaaatgctcaactagtgagcccacttggttgtggacctgtcaatgatcactgcattggtgtaggagttagaggacgtctgcgtctcttctatagctttcatatcaaaatacggagtgaatgattgaatrtagcttccaaaaatgttcttacaggggtttgatggatgaagctacttttggctatctctgtttccaacatcacccctccactaaaggatgactctgccagtttgaaaatgatatggcaggtgatgctgccttggaaaagctaacaaggaatactgagtttggtggatgctcaacactcacagagcaagagagactccctgacctaattcataccagccataatttgctgccttctctataaccagaaaaatcctttggggatctgcatcaccagactcaaagacttctcaggacactcgcctaggctgtcattccctatgagcagtgtcctgagccaacaccactgtcagctggaaatcaggcagatacagagcattacagccaaccgttcttctccacattgtattaaaccagctaatgcagggaggaagtgctaaggtcactgtatttttaaaatacctttgcagaaatagtaaggccaattccgaagtccgcaatacatacaaaacttaattttcaagaaacaataaaagagagaaaagctcatctcagaacaagctagctatcatttcactaaaaaagaaaagttgctagctcagtattagtagtttcgtgcttaatacagctcctctgattaaaacaaaagtgttattcctctctgctatggagagaactttcttatttctccctctcacaaatctctcatagggaatttgtttatttacctccttcagatcctgcacgactgcggtgagcctctcgttttctgcctgtacattagtgaccacagcccggctctgtttcagctcgttctgcatctccaagatcttccccagatagtaagcctccttcgatgctgactcctgcagaagcgtttcctcccgagtctctccatcttcagcaaccttccggtggatggagaaggactgcccaaatgcctgcagagtatatgggaagaaaaagagtacacamtgaaatgcatcataacccwcttttaagacttgggaaaatgtkttcttctgcttatatgtgtaagaaaagctacycygcaagacccccgaaatataacagtctagcagctctcactgatgcttgaaataattcaattcgcttaataaggaaaaataaaattttaaaatatcttgtgaaaaaaagatgtratgcrttaaagaaaacttgaaaaacattgttacttgctttatgtkctcctttttttttttttttttttttttttgagacggagtctcgctctgtcgcccaggctggagggcagtggtgcaatctcggatcactgcaagctccgcctccygggttcacgccattctcctgcctcagcctcccgagtagctgggactacaggtgcccaccaacacgcccggctaattttttttttgtatttttagtagagacggggtttcaccttgttagccaggatggtttcgatcccctgaccttgtgatccgcccgtctcagcctcccaaagttctgggattacaggcatragccaccgcgcctggcatatgttctcatttttttagacaactcttatcaagaaatagttcagtgttaataagcccatcaaaattcatgtcaccttcattttttaaaaaatctcacaaatattttacaaaaaagaaaacaatcatttagtgtgctttctaatacattggcattaaggacagatcaattataaacagtatccttaagagttaaaattaccaaacagcatttaaattgcccagtaccacacaaaaaaagacactgaatatcatctctgtataagaaaacatatatgtgcctgtttatttgtgcaaaaagaaatacagaagaaaaaagtagaaactaaactggtcacttacggggtagatgggaagaatgggagactgaaacgtgacagaagggatgaggtggaatgacacttttctgaaatgccttttcacatggttcttttttcyttttgagatggagtctagcttgccacccaggatagaatgcagtggtatgatctcggctcactgcaacctctgcctcctgggttcaagcaattctcctacttcagcctcccatgtagctgggattacagacgcccatcaccatgcccagctaatttttgtccttttagtagagaaggggtttcaccttgttggccaggctggtctcaaactcctgacctcaagtgattcaaccaccttggcctcccagagtgctgggattacaggcatgagccaccacgaccggccccttttcacagagttctgactctgagaacaataatcatgtttcacatccccctaataaagaataattaaaaccaacctctcggtgttgggggaacccaaaatggaacacgaacagtaacaaaagaacctagctgtattacaagtaaaaaacaacagccaccatgaaagaggtaagaaagaaaatatctaacctaattttggaaaccagtacttttattatataccttaagactaaagacaaaaaggactgcacctggatgctatatagtcttgttggtaaacttgtttctcatagagattatggaaatcacagttctgaaacttctttacatatatactagggttgagcaaataagtaaatatattgtagataatgaatgccaggtttctaactgttggagaaaaagccacgagtaaggaaagagatatctaaaaggaaactagtggtattgaattgtaagtggaagtattaataagtagataaacttattgtttttaataggtagatagtcataggcatatagatatggagagagagggagagagaaacatgtgtctggatatacagacacattatttcctagcactgtaagctgagagggcctagaagcaatgatataccagtagcaatgagcatatccagcacccagattttgtttctaaataccagtctacagtaaaaagaactagggtctttggagaagttactgattctagggctggagcaaaataagccagacacatcttgtgatgccagagttacaacatgcatttaaaagatratgaggayatgtcaaaaggagacaggagcctgtctgaaggggcttccaatggccaaatctgagatattttgagaaaaaaattatagtaactaattatatatccacattaacataataaatcaataaatagcagaagaaagaacagctcttccttacagtagaattacaataatatagaaggaatgatggaaataaaatatatcagcatttagcaaacactaataactgttacaggtaagaatcatcaatagtatctaaaattaatgggcaaaagtatgatgagaaacaggatgtttgcagagtcttaaagcatctccccacaaagtacttattaattctaatgggaagaacagtaactttgcagtggagaaacctggtagacaccacattatctaagtgaccaaaacttagatcaacagcaatgagacatactgacatcatgtaccctctcatataatacactgggggccgggtgcggtggctcacatctgtaatcccagctttttgggagacagaggtgggagacagatcatctgaggtcaggagttcaagaccagcctggccaacatggcaaaaccctgtctgtactaaaaatacaaaaattagccaggcgtggtggtgtgtgcctgtggtcccagctacacgggaggctgaggcmggagaatcacttgaacccgagagacggaggttgcagtgagctgagattgtgccactgcactccaggcagggcaacagatggagaccccttctccaaaacaaaaacaaaaacaacaacaacaaaaaacattgggaagggcacaacatcacttcagtggtattgttgtcaaaaatgcataagctaattcttatcctaagaaaacatcagacaaacccaaactggggacattgtacaaaatcactggtcgggactcttcaaaagtattaagtcgtgaaaattatagaaagactcctccggactagatgagactaacaagacgtgacaagtaagtgttgtatgggattctagattggatcctggactttaaaaaggacactagtaggacaatcggcaaactgaaataagttatttaggttagttagtgatgctattgtatcaacgtcaatttctgtttccttcactgtactatgattatgtaagatggtaacatctggggaagctgtatcaagggtacatgaaaatcagtgtagtattttggggcaacttttttctaagtctgaagttatcagaaagttttgttatttcaaacaaaaagttaaaaaataaataaatgtagtctctgccttaaaagagttgatagatttggtgaaacactggcacacagagttatataagaacataaggacatgaacaccaaggagatactatattcaatgagaagtacggtggctttctggcataacttgtgattttattacattttgaaatttaaaatgtcacggtaggctggacacggtggctcacgcctgtaatcccagcactttgggaggctgaggtggtggatcacttgaggtcaggcgttcgaaaccagtctggccaacgtggcaaaaccccgtctctgttaaaatacaaagattagctgggcgtgcttgtgcatgcctgtaatcccagctacttgggtggctgaggcaggagaatcacttgaatctgggagatggaggttgcagtgagccgagatcatgccactgcactccagcctgggcaacaaagcaagactctgtctcaaaaataaaataaaataaaatgtcacagcatattgcttctgggctacgctatcatctatgaaaagattaggctggaattaacctgtgaaacttagtttcacatttgttataaaccttaaggcagaaaagattatgtgttaatcattgtaagaaacaacttataaaaaacaagctggtactcctccctaaattacactcacagaaacagaaattaaaacaaaaacaaaaacaaaaaaacactgaaaacccatgtcttagttaaactgccttagaatcttgacacggatcaaaatcaaaagatggtccctaagcatcagtgagacagaaatattccagtatcgatgtccatctgtacatacagagtaaaatattcctggtgcctggcttgttcagtctctcgacagaaattcttatttgagtagtcagatttccagatgtggtgataagcacaggtactcatgaatagatgagaaattatctttgcagatgatgttgactttgctcttgcatcagtaatgatcagattctgtgaggtcaattctgaattcagtatccattaaaaggcctctggaggggaaggttctgacagcctctctccctctccccacagtggcctgctgagtcttcaacagatcatcatcctgcaaaggatccctcactatatagtcaagtattagtacaatttaaaattagcatgaactgtgtgtcaagaaccccagctggcttttttttttttttcacaactgtttccccatttctatgtacaggaaactggaaatgtctgtcacagggccattttcttcactctgcctgagtaaaagcaataatttggccattctgtggctctcgtatttttcgcagcacacaggcaatgctctcttggcagctaaaacaacccctaaagtcttaagagcaagtgaatttattgttccacccttgatttaaagttttcaaaaattgtactctggatctagcaccaaaggagataaacatttcagatrtagacccagaatagattttcaaaaaagaatcaagaattgaaattgcaaatatccaaatgttgataaatcctccattcatatttattccagtttcagaaaccttaactgaacatatgggtttccaaaattagccatgatatttatgaagaacttggcccttcactggacctgatttgaaaaacaatgaaagtatatgaggttatccaaggacactaaccatcatgttttttacttgaaatagcaaaataacaccaatcctgcccaagctagaggtgcctcatgatctgcatttgcaaatccactgagaactaagaactaacactactcagaaaatggctgcttttaagaaagggagggtgaaggagaaaacactcctattttaatctaattcctaattgtcagcaactagaattgggcatgacacccaactgacatctatcatctggctgcttgttaaagctgatttaccmgactcgtctggctccaccaggtacctcctttcaccatcacctcctgagtatctcctgacaaagccaggcccaatagaaaggaaacaatgtttttcaaggttactgaagctgcatctttggctgaaatcacaaaactagcttcaatctgtatttataggagatatagggtagtcgtgcttctagttatattttgttcagattgcaaattctttttaggtactgcaatcatttcatgggtaatttttgtttaaaataagttgaagtaaactgacatttttctatatacttttagaatgtattatgatttcctatcatgtctgtagctataattgcacaatattacttttagtatattccattgcatggagcaaatttgctttaaattagatgtgactgtaagtccagttagctatgtaataagtactttgttttctccttctacttacatgacttcttaatgcaaagaaaattgatattttctgtgttcatattcaggatgatacgttaattgataaacagaaatttcgtacccattattcttcataatataaaagataaaagaaataaaattttgactagtatatttaatatcattttatctttaaaatgttctctttgatcacagaattttcgttctttcatctcaaaaactgtggcagaacgtgtactaggtcacccagggacattagacaaaatasttttgatttgaaactgcaaaataatactaaaattcattcattcatttgttgttcattcactcggcaagtatttacaaagcactgtactatgtcaggcactgctttaggcactgaggattcagctatgttctgggaaaamaaaaaaaaaaaactctgtgatccagagcatgtattctagtggaacataaacaaatcaataggtgcatggcatggcatagtgttgaaaaagttaaggcaagagcataggctagcagtgcccartggaactttctgcgatgacgtatctgtgttgccaatatgcccagttgccacacatggctaytgagcttttgaaatgtggctggtatgaccaaagtactgaattttttattttgtcatttaattaattttaattgtcatatatggctagtgactactatgttggacagggatagagggcaacccagatgcgttcggtgggaacctcatatagaaagggcagtcagggaagaggtgacctttgggcagagactggaacaaagtgagggagtgacctagaacctggcctttccctcagagaagaaagcttagatataagtgttgctaagcaagaattacagcactgccatgacgcctctttaaagacaatcactggcagttctttacagtctcttctaaagtattttaagatctgagtgctccagaggatattcagatataatttaacttgtaggaagaaaagggttggctagtggcctgacatggtaccctatcctccccaatgaactagtttactttatttgaacatataacaaaaattatctgaccaattacctttctgttgcctcagctgccaggaaattcagcattaaatgctcaacagcaataacgaaaataccttaaggttttgtataattatctctgttttctctacattgttctgcatttttttgtgtttatcccattgtattggtttcttctacttcaaatatttttggagtagaaagcatatgagttataatcacatcaaatggttaaaatgatgcttaattactgtttgttttaaatgaagtattaataaaaatccttattaaggcatggaatttgagagtttaagaggtatgaaagctcttctaatgattcatccttattccactgaaaaacactgagcccagactgggcgcggtggctcacgtctgtaatcccagcagtttgggaggctgaggcaggtggatcacctaaggtccacctgaccaacatagtgaaaccccatctctattaaaaatacaaaaattagccggctgtgatggcaggtgcttgtaatcccagctactctgaaggctgaggcaggagaatcgcaggagaatcgcttgaacccaggaggcagggttgcagtgagctgagattgcaccactgcactgcagcctgggcaacaacgtgagatactgtctcaaaaaaaaagaaaaaaataaaaagaaagaaaacactgagcccaaatgatctgatgaagcacaaaaaataggaagaacctagctaaacrtgttagaactgactgagaagtgtctctcaaactactgctgcatattccagcagcaaagagtcttagagagtagattcaattagaaaagaagagctcacaggaggccaggcaactcagaagtacccagccaggagaaaccagtttccatgatgcgtatggctcaaaagttaataggagacatgaggcctccctgacagactcaagcctgatccttgaaagggcagatgtactcataaaaggccaaaagaggttaagagtgtgggctcctgaggtggaccaactctgccacttactgtgtgacattgggcaaattacataacattctgtgactccattttttcatctgtaaaatggggataataatagcttctttctcatactgccacgaggcttaaaagagaaaatctatgtatcacttggaacagaccttggtataaatatagtaagtactcaatractgttggctattattagcagaaagacgacgtgctttggaatcaaatccattggggtttaatgcaaatgcatctgggtttaaatctgcctcctctgaaatgtttggcaaggtttttaagttctatgtttcagttacctcatgtgtaaaatgagaataataacatctaccttaaaggtaaaaacagcctagtcctaaaaggcaaggatatcagataagagatatamaattcgtaccaaaatgccttggacacagtaaatgcttattaaatatcaataccaatcctcctctcttctgaccttggaaagtctcagattgaacactggcaagctgttgcttcctctggtgtaaaggttttccttggacttatccaagaatcaggtggccgtttacctcattatgagagcagctccctactcatttgtgaaacaytaaacctcctgctaggaaaggagtcctgatgaatcttttttctcattaagtcattaaaaatgtacaaagacaaacacagagaaatttcaagaggcataggctcttacggtttatattagcaaaggttgcagctttttcttttttctcttaatgggaattttcaattctttcttaacttcttcagtttttctagcttttaacataactccacccaattataaagtccrtccatttgagaaacacagaatatctaattaccaatttttgattctcattttgtattctgaaaaccatttttcaataatcataaaaacaaaagacatgcattttaaatgagatgtttttttaaaaaaaatctatcacatattcttaactgatttaatcatcacattacatgcctaccgagtatcattcaaataaatagcatatcatattttccatacttctyaactaaatattctgtgataacctggtgtaataccccaagtttttctaagataatagtcaatagcctattacttagatttatatttacttaaagcctggattttttttctaaccctgatggtttgtaattggtacctctatttgcttaataaactcccttgtcaactgtttagagagtttttttgtattttgtggttacatattgaatatgcacaaaaaatttatgacaaaatataaacacaaaatgtaacattaaaatgaattcctatagtttaagaacgggaccaagacccactagcctcaaaggcctctgtctgtcctccttggtcctatctctctcattgtaccttyggccactccccaagtaaacactatcctgcattttgtatcaccattttctttatagtttaccatatatgtatgtttctgtaaataaaatgctatttaatattgtagtaaaatactgtttgtaaamttcatatgatgaaatccttccatatgcactcttttgcaatttgcttttggaactcaactttaaattccgtttattcattctgattaatgtagctgcagctacattaatgtagtagataaactgcagctacatcaatgtagttttcattgttataaagtagtctactggatatatacttcatattaataatccattctcttgacaatggatgattggattgtttccagtcttttgctattataaacaatgtagctgtgaacactsttgggcatttaacttaggctagtacttttcaaaatacatttgctgaaggaagagttttctttccttctttcttttttttgagaaggagtcttgctctgtctcccaggctggagtgcagtggcgtgatctcggctcactgcaacctccatctcccaggttcaagtgattctcctacctcagcctcctgagtagctgggattacaggcatgcaccaccacrcccagctaatttttgtatttttagtggatatgaggtttcaccttgttggccaggctggccttgaactcctgwcatcaggtgatcagcccaccttagcctcccaaagtgctgggattacaggcatgagcccctgctcccggcctgggagagttttatttctaatccttgtgggctaatgctttttatttgtgaaatgcaataaaaataaattactatatgcatattcctaccatgcaatccaaccattccactcctaggtatttatttatccaagacaaatgaaagcacgtgatcacataaagatttacacacaaatgttcatagcagccaaaatgcaaacatttcaaatatccawcaattggtgaataaaaaaccaagttgtggcatatccatacaatggaatactaatcggcaataaaaaggagtaaactactgacrtatccaacaacatggctgaattgcaaaacattatgctaagtaaaagaagccagacaaaagcaagagtacattcagtaacattccatttacatgaaatgctagagaatgcaaactaatctatagtgacaacaggcagatgagtggttgcactggggcggggacaggagtggaggattatgaagggatgtggagggccaaatgggagagattacacagggatgagaaaatactttagagagtcatggatatgttcattatcttggttgtgttgatgatttcgcaagtatatacatatgtcaaaattgacatataatatattgcacatatttaaagagtgcaaattgatcacttatacatcaacaaagctgtaaaatcataaatattagaaaaatatgagaaaaaagcacaaagtacaagcctcaatttttccattataaaatttgacataaaattatatttcagtaaatttaatcagaagacaaaagattacaaaaactgtaccattattcactgaaagtatgattcatataaacttgctgcagatctgtaggaaataatttgcaaaccagcgctggcccccaggtacaatttgagtagcattatcctaagtcacatgtgcaagagtctctcaagcagtggttctcaaccttacgaacccattagaatcacttggggagctttttaaaaacaaagacatagagattccatctccattctgagttaaytaatttgggaaagagattcccaaatattctcagttgaagggacactactaagtggctcaattttttcagggttctaggcacccctagaacaaattcctaacaattccatttaagtagttaggtccaaaaaagttaacaagtcttttttgtcctaacaatgcagtagctgtttgaaaaatctgtatgaaaataccaaagaaaaaagttttatttcattcttaaataacctcaattacttattaatggaatgtgtgcactcgttgggcactatacaacttcttaaactttggaatcatattggactctatcacccttatttcctcttccatactgattttcatgatatctgctttttgttacagcaaccactgaaaatccagcttcgcataatagaaagggatgatgcgtggggtaacattgagactgaactgaagtgtcttgagctagtaattcacactgcgttcaacagatgccaagtatcactgcattcccmttgaacatttaagatatcccatcgtcttctgtgagtttgctgtggttccccagggcatcttggcataccatttgagaatcacaggtctggggtaagggccaggtgtaagtatttccaacatgctcattttgggatgctaatatattatgccaggcttgagaagcattgctgtggagtgtgggcagtgttgtggattacacacagcttcaactcttcctgacaaggctgcagagttctccaaagtggctgtactaattcaactgccaccagcagtgtctaaggattcctgtttgtgactctacattgttagggttgtttkttaagacttaaaaattttggccgccccggagagtgtgaaacagtatcacctggtgcttctcatttgcatttccctgattactaatgaagttaagtagtttcacatttttattgaccattcacattttcatttttttttttttttgacagggtctcctctgttgcccaggttagagtgcaatggcatgatcacagctcattgcaacctccacctcccaggctcaggcaatcttcccacctcagcctcccaagtagctgggaccacagatgtctgccaccacacccagttaatttatgcattttttgtagagatggggtttcaccatgttgcccaggctggcctcaaactcctgggctcaagcaatccacctgtctaggcctcccaaaatgttgggattacaggtgtgagccaccacgcccaacctcacatttccacttctgtgtagtttctattcarggcttttgttcatttttctccagagtacctttttcctttattaatttgtcagttacatgtatggcaagtatcttcctcaagtatttatgggttgtttcttaactcattttacagtgcttttgatgaagagaagtcccacattctaaaagacaggtttctgtttcctaattgttagttacatgytattgtgccagacccctattgagttggatagggatagcacaggttcgagaggccaaagaagagaggccaaagaagagaccgagagctggcaaatgagatatagggcttctcgaggggacttacatatgcagcggtccagtggtagcaggctggatggacgaaccactaccgtttctaaaaagtatgcagtttatatagcatttttacttagctcccctcctgcaaccttcacctggcaaccctcctttaatccgaaatgggccgggggttcagatgttcctcatagacaaggaatcagtctccgggttggccactaccaggttcctcagctgagaactccaaacacacattcttcttagaccatagggtcattctcagggtatgcttcggttgttgctgtcaggtgtgcctgccacacatatgtatggcacatattttctcccagtgtgtggtttttctctcccactcttttagcgatgtcttttgatgaagtaatttccttgattttaagatggctcaatgaccaaacctttgccttatagctaacactatttgtaaatccttccctcctccaaggtcataaagctattctcctatactatttccaaaagtttcaaagttttgccttttataacttaagtcccttaatctccctgaaattgatttttgtgtatgaaatgaagtacagatccatttcaattattttctgaacgaataatcaatttcccatgcaccatttaatgtattaccccctcctatcccactgatgtcgagtgccagcttagccataaatcacactgacgtgagtgtttctgtttctaggctatcctataatgtcccactaatggtcataagatatctaagtaggagccagttcccctgagaaaaaaggggtacctgacatcatccaaaccttattcaktaagttattttaactttgggcctggtgcggtggctcacgcctataatcccagcatttggggaggctgaggcgggcagatctcttgagcccaggtgttcaagaccagcctgggcaacatggcgagaccccatctctacaaaaaatataaaaattagacaggcatggtggtgcacacctgtagttccagctacttgggaggctgagatgggaggactgcttgagcctggaaggtcgaggctgcagtgagccaagatcacaccactgtacccaagcctgggcaacacagtaagaccctgcctccaaaataataataaataaataaacaataaactttgaaatatctgcatcataactggacatcattactaaggtatcctaatggcaatctgtaaatgaaaacaatgttactttgtataaaagaagcaaatacatattgatgaagcttagtcaggaatatataagacctagagttttttcctttaagtaatatatataattgttaaagaaaatatagataacaccaaaaagcagaaaaaaatattaccccttggattaccttttctcacctacccctgtaatttgggcaagttcaggacctccagattttttcccacaattgcctactgggccccttgaagtcctgaacacttgttcttactcaccaggttttgggtctcaaactaggatctgatcttgtttcctggtgaatctgtctcaaccaaacagacgccatctgcccaggctggcagctgtccatgcttcctctctctaagtcctccccaggttcctagtttttctttttgttggcacagtgataaatgtcaggaaatcttgggttcaaaaatggtgggcaaccactgttccatamgtattatatatgatcagtgttatttctgstggttcacatcagcttcttctggctgtgttaaaagctagtctcttattactaaagccaccaaccaaatacagacactttaaaaatcagcatacrgaaagtatatgtgctcagcaagcagtctaagaggagattgcttgcttagcagaatatgtctattcagaagcaaaacttaaaggcacacattttctgactattataacccgaaataaattctccagatttttcaaagattgtgttttttttttttaaacaaacacgtataaaatataggtaaactattttttctgggtcttggccaatgagtgtctttatcattaaaatgtaaatttttatttaaactttttttctgggtcttggccaatgagtgtctttatcattaaaatgtaaataaaaggaagaaaacttaaatcatcataagttatattctgggtcctcaagtttgaaagtaatacatttcacattacatttcccaattaaaaatgaaacctatccccaggaagaaaaaataatttcccccctaattttccctgctccccctttctttctttccaccatcctccttccctccaatatttactgagtgcctatgcatttagrtgccaaatcgctggaataccaagacttcattacattgtatgaagaagtctagtggtttcatttaaatgcaagttttgtataaaagcacgtctatccttttaaaggacaacttgttaagacattcatttgattcagctcaagaaaattaactgaaatcagctgaggcattgtgaccacactacaatcctcctagatcagagtatgtcagaggaaattattctagctggaagctcagagaaggaaagccttgtttcagaagaaagaaccatagaaaggagattttctttcaggaaaaaagttatttcatactatttcagaagaaaaaattacagtaggctcttttgaaagccaagatggaagtaatgagggacgattcctgatcttgcagttagtacamaaagcagtattgacatggagttaccaacatgacctcgactttcttaaaattcagttgtgactaggatataggaaacagatcaagaggcttttagtattaagcaaagaaaaatgtttcttggacatattatttcctttgttctgtatttggacacttatattcttattgtttaacaaagtgaatcaaccgtatcttttgaatgtgccttgtggtcctcatgtaaagtaatgtgatctttcacttgaatttttagaaaactgcctcagtctgaaaatcattatttataataacattattccctatgttgcatataaggttcagtacaatcattatttataataacattattcactrytgcatataaggttcagtacaatcattatttatagtaacaacactattccctatggttgcatataaggttcataacctctcagcttctaagtagcaccactgctattcaaagcctggtggccctgaatctgtccaccaaatataccatactatctactgcagaattgcagcaaaacaccagaaacgatgagcttgttaagaaacattcataaaataatatgaaagctttgctctgaacttagagaaagaaaatataaaagtagtttaaggagagggagccatgagcttgtttaggctcaactagagcaaaccatcatccagctatctctgtcctggtcggctatggtggaagggactgtgagttgcctacacaatatccactcttcccacttcctgacttaaaaatatgttatttggagtgataatgtcctcagcctaaagctttcccaacctccttggtttctggaggtgttcaaggaagtgtaagcagaagtggatggaagccaaggaagccctttaaagcaaactgattcagctgagagataggtacttttgccattatactttcttccatcttggaacgtggacataatagctggagcaccagtgtggcaggccagctctcactaacgcaggcctccataacaactgtttcagtactgactgagtggttaagttaaatattaaaagttaaaaaagccagtgcccttatacaaaggctggaatgtaacraaagcccaccaagagttttgcctaggcttttcctgggccttaaagcataacaaaataacaaaggaattcttaacaggacccatttaggattaaacgagttttattgtgggtctgaagaaactccccagacctccacaaacaagtttattggaggtctgaaggaactccccaaacctccgtgatttaagcaggagacataataagggtaatcaccccagcagctggacccatttagattaagtaaatttactgaggctccagaggaaggtcttcargactcagaccttagctatagattagaagaagttaatcacttatgtctttagatgaatgcacacttacacgtagacatatagcttagaaggtatataagctctggaaaactgtaattttgagttggtctggtgataatttccaggccttccccccataaccagttgcagaaataaaaactcttcctccccagttcatctgcttctcgttattgggccacgagaaatagcagcccaaccctcagtttggtctgggaacaccaggagcatcttgtggtcatgaggagacatttggcatgtaagccagcaccaaggatgggagaaaacaatgtgagaaggaacctgggccccctgtgaccatggagttgccatacaagccctgagctacttacctctgaacttctttcatgcttaagcaactcttatttgaattttctataaaatgtgattgaatcccaatcstaagtgatgtcytatataatttttcaactctaattatcttcaatatctttttttgccagaagtttacaaaagctattaataagttgtattctcactcataacttattttctgcctcgtatttatgcctctctgcaactcatcccccaacagcctcaaattcatgtctttatctctctcagttctacccaagaccatagtaatgctgacttctcctgggtttcacagcatataatattaacagaggaaaatggaatattaaaggtagaaatgagcagtaaatgcaaaagtcaacagcttggactgggatgtcaagggaaaaaatgtcatggaaaattaaaagttaagaaccctgtctagaatcacaacaggtccagtaattgctgaaaccagggcttaaatctaatgactcttttgtgatgtcagtctcaggaaatgactgatagtgagctggcaagaaggatgtggaaggagcttcaggttgaggatgataggtttagcaacacccttgacggcaggaggagagaggtggacagttcttgtgtacaaacagccagaagtcataagagtggaggaccattttaagaagcccaaaaaactaacgaggaagtggtaaataaaataggtaggcttggaagcacctctcaaccaccagattaawawaaaaaaaaaagagtggggataggggaagcagattaacaagcaagaacactcagctacaaagcaggatattcacacaggcctgtcaaactgtacaatggctgctttttattgccaactaatgcaacattcatccctgaccctgaccttaactctgaccatggaggactttcaggttcttcattatttttgccaatatttttggaatatatatatatatatatatatatatatatatatatakatatatgcatattattcccataatcatcccctcataagatttactaaaaagtctgtgccgtaaaaactttaagggtatttggtgctctcccccaaatcatcagtataatttttttttcttttttcagacgaagttttgctcttgatgcccaggctggagtacaatggcacgatctcagctcaccgcaacctctgcctcccaggttcaagcgattctcttgcctcagccacccgagtagctgggattacaggcatgagccaccacgcccggctaattttgcatttttagtagagacgaggtttctccatattggtcaggctggtctcgaactccccacttcaggtgatccacccgccttggcctcccaaaatgctgggattacaggcatgagccacggtgcctggcaattttttttttttactatatgcatgcttgatactcaaagctttgtgctggagagtcactcacagcttgttgataaaggtgaaggttagcaaagttcacaatatgtaaaactcgggcayactgggactataaatcctaactcttgctgggtgaarccccctttctgtcttacgtattgctgatctgtatcatatcatcataaaaatctcctagctagtttataatatcttcagatgtgcagacctcagaaatgtaatctatttcttgcagaatacagtcatagccttaagctatacatattaattggttgtcaaggaaattgttctccctcctttatatgaagcatccctggtaaagagccaaaattactttgtcagttacttcctccactttatcactaagaaaatattaagacttttggtttccttctttgggcctgattataataaactgataattataagcagattattttcttcaaacaatatgaatttatcttccacaggcccaaatatttccaccccaactcataaccctgccaatgcttttagcttctaggtagaataagaattgaaattcaagatgtagacatttaaaatataagtaaaatcttgaggccaggtgcagtggtttaagcctgtaatcccagcactttgggaggccaaggtgggcagatcacctgaggtcaggagttcaagaccagcctggccaacatggtgaaaccccgcctctaccaaaaatacaaaaatcagttgggcatgrtgaagtatgcctgtaatcccagctactccggaggctgaggcataagaatctcttgaacctgggaggcagaggttgtagtgagctgagatcgtgccactgcactctagcctgagactctgtctcaaaaaaaaaaaaaaagtaaaatcttgaaaaggaaaggatgctttgctttaaatgactgatagcttttcccaagatgagtaagtgtggcttgtaaatgtcttttgtaaaattttaaagtacttatttaacaaagaaaagttgtacatattcaaggcgtacaacatgatgatttgatatacatacacagtgtgtactgactaccacaatcaaattaactaacatatccatcaccacccagttatcatctgtgtgtggttgcagtgctgacacttaaaatctatcttcttatctaatttcaagtaaacacagtatcgtcaactatattcaccatgttgaacattagatccactgaacttattcatcttaaaactaaaagtttgtacactctgactaatatctcccctaatccctcacccccagaccctggcaaccaccattctactctgttactaagagttcaactttttagattctacatataagtaagacaaaacaatatttgtcttgctgtgtttggcttattttacttaccatcatgtcctccaggttcgtttctgtttttgcaaatggcaggatttccttcttcatggctaaataatattccattgtgtatacacaccacattttctttattcattcattggctgacagatacktaggttgtttccatatcttggctattgtgaatagtgctgctatgaacatggggtgcagatgtctcttcaagacacagattttatttcatcccagaagtgggatggctggatcatatggtagctctttttttaaattttggaagaacgtccatactgttttttgataattcctgtacaaattgatatttccaccaacaatatacaaaaattctcttttctccacatcctcgccaacacttactatctcttgtcattttgataaagtcattataacaggtgcaaggtgatagctcatggtggttttgacttgcatttctctcatgattagtaatcttgggcaacttttcacatgtctgtcagccatttgtatgtcttctttggaaaaaygtccattcaagtcctttgtccgtttttaaattgggctttatgttttcttgctaatgagttaygtgaaatcctttatgtgaattccttatatattttggatattaactccttatcaaacatatggcttgcaaatattttgtcccattctttaggctgtcttttaattttgttgattgtttcctttgttgtgcagaagtttttttagtttaacatagtcccatttcattatttttgcatttgttgcctgtgcttttgttgtcatttccaaaaaaatcattgccaagaccaaggttgagctttttgctgatgttttcttccaagacttttacgatttcaaatctcacattcagttaagtcttcaattcacttgaattgttgtatatgttgtaaatcaagggtccaatttcaatcttttgcatatagatatccagtttttccaacactatttattgaagagatkatcttttccccattgtgtattcttggcacccttgtcaaagattagatgaccatatatgtttgggtttatttctagtctttctattctgtcccagtgaccctagtggccgtttttaggccagttccatactgttttaattactagagctttgtaatgtagtttgaaaccaggaagtagtttgaaaccaggaagtggttcctccagctttgtccttctttctcaagattgctttggttacttggrgtcttttgcrattccatacaaatattaggattgtttttctgatatctgtgaaaaatgccattaaaattttgataggcatcgcattgaatctgtatgttgctttcagtagtatggacattttaacaatattaactattccactctttgaacagaggatacctttccatttatttctgtcttcaattttttttttttttttttttggtctcactctgtcacacaggctgcagtgcagtggcacaatcatgacttactgcagcctcaaactcctggaatcacgcaatccttcygccccagccttcaatttctttcattaatattttacagttttcaatgtacagatctttcaccttcttggtattcctaggtattttattttatttcattttattttgttttattttattttttgggatggagttttgctcttgttgcccaggcgggagtgcaatggcatgatctcggctcaccgcaacgtccacctcccggttcaagcgattctcctacctcagcctcctgagtagctgggattacaggcatgcgccaccacgcccggctaattttttgtatttttagtagagatggggtttctccctgttggtcaggctggtctcaaaatcccaacctcatgtgatccacccccctcggcctcccaaaatgttgggattacaggcatgagccaccacgcctggcctattttattctttctgatgctattgtaaataggattgttttcttaatttctggttagttgtcagtatacagaaatgcaactaatatttgtatgttaattttgtatcctgcaactttactgaattcatttattagttctaactgtggaatctttagggttaatatataagatcatgacatctgcaaamagagactatttagctttccctaatttggatgtcttttgtttctttttcttgcctaattgctctagctaggacttctagtactatgtataacagaagtggtgagtgtgggcatccttctcttgttcttggttttagaggaaaagcttttagcttttcaccattgagtaggatgttagttgtgagcttgtcatatatggcctttattatgttgaggtatattccttctgtatctgatttgttaatagtttttaatcatgaaaggatgttgaatattgtcaaatactttttctgcaactattgagatgatcatgtgatttttatccctcatcctgttaatgtggtatatcacatttactaatttgcatatatttgaaccatccttgcatctcagagatacatttcattgattatggtgtatgatgtttttagtgtgctgttgaattaggttcgctggtattttgttgagaacttttgcatctatgttcatcagtgatactgatctggaattttcttgtagtgtccttatctggctttggtatgagggtgttgctggcctcataaaatgaatttggaagtgttccctcctctcgaatttcttggaagagtttgagaaggattggtgttaattcttatttaaacgcatagtagaactcaccaaagaagccatctagtttggggtttttctttgctggaggtttttgatgactcatttaatctccttacttatttggtcgtttatattttctagtttttttatgattcaatctttgtaggttgtatgtttctaggaattgatccatttcttccaggttatccaatttgtaggcatacaattattcacagtagtctcttatgattctatttatttggtattagctataatacaggtatacctctgatacattgcaggtccagttccaaaccaccacaacagagcaaataccacaataaaacaagtcacatccattttttggtttcccagtgcatatgaaagttatgttgacactatactgtagtctagtaatgtgcaataataccattatgtctaaaacaacaatgtacataccttaaaaatactttattgctaaaaaatgataatgatcatctaagtcttcagtgagtcacaatcttttttgctggtagaaggtcttgtctcattactgaggcctgctgactgatcaggttggtggttgttgaaggttggggtggctgtggcaatttcttaaaataagacaagtttaatgcattgatcaactgttcctttcgtgaaagatttctctgtaataggcaatactgtctggcagcattttacccacagtagaacttttttcaaaattggagtcaatcctctcaaattctgccactggttatcaactaagtttgtgaaatattctacatcttttgttgtcacttcaacaatatccacagcatcttcaccaggagtagattccatctttaagaaggatgttcatccataagaaacaagtactcattcattcacattttatcctcagattgcagcaattcagtcacatcttcaggcttcacttctaattctagctctcttgctgtttccaccacatctgcagttccttcctccactgaagtcttgaacccctcaaaatcatccacctttactaataatcttagctagatcttctggatgacttgctgcggcccctacatcagcatttgctgcttatttgcacttttatgtaatggaaatggcttctttccttaaatctcatgaaccagtctctgctagtaccaaactctccttccatagcactgcctctctcagtcttcatagaactgaagaaagaccttgctctggattaagctttggcttaacggaatgttgtggttggtttgatcttctatccagaagactcaaactttctgtatatcagtaataggtttttttgctttatttgtctatctatctatctatctatctatttatttatttatttatttatttaacagagtctcgctctgccacccaggctggagtgcaatggcacgatcttagctcactgcaacctccgcctcctgggttcaagcaattctcccacctcagcctcccaagtagctgggactacaggcacgtgccaccatgcctggctactttttttttgtatttttagtagagatggggtttcaccatgttagccaggatggtctcgatctcttgaccttgtgatctgcccaccttggcctcccaaagtgctgggattacaggcgtgagccaccgcacctggcctgctttatcttttgtgtgttcactggaatagcacttttaatttccttcaagaacgtttcttggccttcacaacttgactgtttgacacaataggcctatctgggctttcaatatgccttcttcactaagcttaatcatttctacatttcgatttaaagtgagagatgtgtaactcttcctttcacttgaacaattagaggccattatagggttattaattggtttaatctcaatactgttgtgtctcagggaatagggaggctcaatgagagggaaaggccagtcagaacagtagcagagcccacactgtagtagtcagagaccacatgatatctattgattaaattcaccttcttacatggggacagtctgtgataccccaaagcaattactattgtaacatcaaagatcactgatcacaatcagcattgtgatataataatatcataatatatatgtattatatataatatatattatatataacatatattgcatataacatataatatataacatatattatatattatatacgtattatatatattacatattatatatacataatattatatatataatmcaataatgaaaaactttgatatattgtgtgaattaccaaaatgggacacagagacacagagtgagcacatgcgggaaaaacgttgccaacagacttgctccatgcagggttgccacaaaccttcaatttgtaaaaaatgcaatatctgcaaagtacaataaagtgcaataaaccaaggtatgcctgtatctcttctttcatttataatttcatttatttgagttctctctttttttcttggtaaagctagataaaggatttgtcaattttgtttctcttcaaaaaacaaatctcagttttgttgatcttttctactgtctccttagcttctttttgctccaatctttgtctccttctgctgactttgggcttagtttgttcttctttttctagttccttggggtgtgaaattaggttgtttaagatctttcttccgaatgtaggcctttatccctctaaacttccctcttagaattgcttttgctgcatcctgtaacttttggtatgttgtgtatccatttgcatttgcctcaagatacttcctaatctctcttttgatttcttcttcaaccaagtagttgttcaggagtgtgtgcttaatgtctacatatgtccatttttcataattcctgttattaatttctaatgttattatgatcagaaaaggtactggagatgattccaatcttcttaaatttgttaagtcttgttttgtggcccaacatataatctagcccttgtgaatgttccaagcgtccttgagaaaaacgtgtattctgctgctattggatgagatggtctgtgtatgyctgttaggtccacttggtctataatgttattcaggccactgtttcctcattgattttctgtctggataatctacccactgttgaaaggggtactgaggcatcctgctattgttgtattgatgtctgtttttcccttcagctctgttaatatgtgctttatgtatttagatgcttcaatgtggggtgcacatatatttataattgttatatcctcttgatgaactgacctctttattattatatagtgatcttctttgtcttctgtgacagattttgactgaaagtctatttagtctgatataaataaagccactcctgctctcttttgattactatttgcgtggaatattttcttccatccctttactttcagcctatgtatgtccttaagtctaaagtgaatttcttgtacacacgaatattgttagatcttgggttttcttttaatccatttggccactgtttatctttggttggggaattcaatccatttacatttaaactaattattgagagttaaggacttaactattttgttttgttttgcagttcatttgttcctttcttcctctcttacagtcttgctttgtgactttaaatttttttttgtagtggtatgctttgattcatttctttatcttctgtgtttctactaaaggtaggttctttggggttaccatggaccttacataaaacaaaacattctgtttaaactggtaacaactcaacttcaattgcatacaaaaattctacacttgccaggtgcggtggctcacgcctgtaatcccagcactttgggaggcggaggtgagcagataactcgaggtcaggagttggagaccaacctggccaacatggtgaaaccccatctctactacaaatacaaaaattagcctggcatggtggtgcgtgcctgtagtcccagctactcgggaggctgaggcaggagaatctcttgaacccgggaggcagaggttgcagtgagccgagattgcaccactgcactccagcctgggcaacagagcaagaccctgtctcaaaaaaaaaaaaaaaaaattactacacttttacttatcccccacccaccattctatggtgttgatgtcacactttacacctttttatactgtgtattcatcaacaaattatgcaggtatagtgatttttaatacttttgtcttttaacttttatactagagctgaacttctaatgtctagttatacttggctggtttgcctgatgttatttaacccttaaccttctgcacagttctctttggttttcacctcatgcctcaccccatttctgacctgccattatatccaatattgacagggcaaggatagggagtaggaggaagaggaggagaaaaagagaaagacattaccataggctggttaacagtgaggtgaagctcaggagatggtgaggttgtctgcacattgtctgataactttgaaacttaaaacctgtcagaatggctctgtcagagcaatagaatttaaatgtcatggaactatttctcagggttattcctccttaaaggcacattcttcttaagttctaactgcatgtcctcaataagctgctttcagatccattgttgaatttcctcaggtaaaactatgagcctaagggcaaagcttttcctatcaggcttcatgagaaaataaaaattataaatttgaaaatattttaattaggccttagttaaaattaaagagagaactcatgtgcgataaagatacttagtgagaaggttcaagaaaaataactttggtactggttatttaagaattcaggatgcaccagcctggccaacatggtgaaaccccgtctctactaaaaacatacaaaaattagccaggcatggtagtgggcgcctgtagtcccagctactcgggaggctgaggcaggaaaatcacttgagccccagaggcggaggttgcagtgagccaagattgcaccactgcactccatcctgggcaatagagtgagactctgtctcaaaaaaaaaaaaaggaattcaagattcagtgccaaaaacactaagttaagaattacttttatttgatggtcttcagagcccagtgaacaaagaacacttaggccaacagacacaaatttctgccttaagtttaaatgtgcacatactctgtctctcttcaaactaataagtagctcttaaatgttggcaagtaatgtcagggaacctctatgggttttgaattgtaaacttaagactacgtatttttttacagaaaactgaatttcttacaatgtatatgataaatgtttacataaagttgtaaactacgtttgacacagaaaattggttttgttcattcaccttgtcataattaactcaatgtctatgatgtgctcactaatcttgtaattaatctcaccaatatataaactatctgaagtgttgtgctagttggaaaaatacctagacttacatactaagatattctactcccagttaaatagtaaataaaattgcatttatagttggccaggcgcagtggctcatgactgtaatcccagtactttgggaggccgaggtgggtggatcacctgaggtcaggagttcaagaccagcccagcccacatggtgaaaccccgtctctacaaaaatacaaaaattagccaggcatgatggcaggtttctgtaatcccagctattcaggaggctgaggtgggagaattgcatgaacccgggaggcggaggttgcagtgagccgagatcgtgccattgcactctagcctgggcaacagagcgagactccgtctaaaaaaaaaaaaatgcatttatagtagattccagcctgcgtgacagagcgagactccgtctcaaaaaacaacaacaacaacaaaatttagattcaggggtacatgtgcaggtttgttagatggatatattgtgtgatgtgggaggtttgggttcctgctgaattccttacccaaataataaacatagtacccaataggtagttcttacatctttgtccttcttttggagtccccagtgtctrctgtttccatagaatcattttcttttttctttttccttttttttgatatggagtctcgctctgttgcccaggctggagtgcgggggcacaatcttggctcactgcaacctccgcctcccaggttcaagcgattttcatgcctcagcctcctgagtagctgggattataggagcgcgccaccacgcccgaataatttttgtatttttagtacagacggggtttcaccatgttggtcaggctggtctccaactcctgaccttgtgatctgcccgcctcggcctcccaaagtgctgagattacagacgtgagccaccgcgcccagcccatagattcattttcaaaaccacaatgcatagtgacattctttcacaaacttgtcaagctgtttgcccaggtgagcaatatattgttttaataagacaactgtttgcccagatgagcaaactgtttgtcctgataaattgatttgcaagactttcctaaagcaaacagtgaatttatttattaatttactgtcttatcttcctgggcacgaatttcgtggaacaaagagttaagttatattgacatgggtgggctcagttttaatacttcacaagaaaagacctgacctaaagtcagaaaaaagaaaagacctggaattttagaggtgggtgattaatctaagcccataaactcaccatagaagaaaccgagatccagagagttcaaataacctgcccaaattcactgagccagttagtgagagagcaggcaacrtaacccagatattctggctcctaatccagtgttctttccattatatcactcagcccctattttgaagtcttttggacctcaagaaataaagtattttataacacctctaaatggtttccaggatctcaaacatttccataaatataatgcagagatttaagcagaggcacgacatttgcaaagttgtcaagtcacatctcacacacttcacgatgaaaaaaattcagaaatgaatatggtattttattttacatcattaaagaccacaattatactttggcaaaaatgtccattccaccatttggttttctgcactccatatttggaaacaaataaaaaataataaagaactttgaccagcactccaatgtcacaactgtccccctgaaacaccatataaagactttctgttcattttatgactcttcatcatctagaaagtgtgaaatttagacatgttggttttatgtttagattgctgagacagtggaaagatttataatacatcacgtagcaaaaagcttcctactgcttaaggttctgtgrtccaatacggtggccactacccacatgtgaccacttaaatttaaattaattaaagcaaaattcaaaaatcagttcttcactcatatacttatatttttatagtagaaatggctgtgtactttcagcaatgttttaggggtatgttgtatgtggccacctcactattgaatgtacaccactctagtaaatgtgcatcattaaataaaccacaaagcaaggtcaggatagggtaacacagtaacgaagagccacagaatctcawgtgttttaatacaaaaaagtttcatttgttctaaccatgttcaaggcagatgtttctggccaggtgaggttctcctggaaacattgcctctatgcagcaatttggagagacaggctcaaggagttgggggagagtggattttgccacgtttgtgagctaggtctggaagtgccacacgtcattcctcctcataatcaactggcggtgtttagtctcctggccccacacagatgcaaaggggttgagaaggccatcttcctatcaacccagggaaaagatgaaatggcgtggtgagcacagtgcactgtctttgctactgaagtgggccatcatctggacctcatcacacaaacagatgagaatttgtttatggcaagtctcaagattttgttaactgtggtggattcaccacccctcagcataaaaggactatagatccctgcgtcattgatgccaggagtggctgtctgatttgggagcccctctcctgcacgactgcaggtccccagagcagccgtctgacttgctttgtaaagtgtgagtgccatgacatgtgctgctttgaagctgaagctttaagaaccattgtgtgtgttcccattgcgttctttttctgtctactgaaacactagcaaagcctcagggagaggatgttccttcagcccatatctcagaatgacagtgacatggaatagtgtcttagttacctgcaatgaatgtacagcatgaaagacaaacctttattgttgtaagcccttgaaattttggggtttgttaccacagcataatttagtctaagctgactaataatgtataatgtaataatttcaaaaccatagcagtggatgtggctcttttgaaataatcaagagtataaattgcttatgatttgtgattaataataaaacattcctgtgagtggtagagaatatgacaaaagcaataatttaaattaggtacaacctttyctttagacttctttgcttgtgaaattacctcccaggtcatgtgaaaggggctctaccagtggcttgaagatggcagagtctctgcttcccctgccaaatagtgaaggctgtggcaggggtggagttcttgtggggtggttatgctcccatggtttctggtactattggtccaggtacataaaagggtaaagaaacatccatctggacacagcttacacataaaacaggttcctaccaactgatttataaaacaccttctggaattgaacatatcatattgaaaaccacaaaattggttctgtaggcatatagctaataagaactaattttgtcatgtgcttatagcttttctattaaaccataaaacacattttatgagttgaagagagaatttaggtatcataaactttgaaggaagatcaagaaagcaaagctaaaagatgacttagttgtaattcrtccacctttttccaaagtttcaggcgaaaggattcctaccatcctcactttgtttttctgaacactttaagttcctttgctgttattctaaggaaattctctttagctcttcactaaggatagaaaacaattattttggccgggcgcggtggctcacacctgtaatcccagcactttgggaggccgaggtgggtggatcacgaggtcaggagttcaagagcagcctrgccaacatggtgaaactccatctctaataaagatacaaaaattagctgggcgtggtggcatgcgtctgtaatcccagctactcgggaggctgaggcaggagaatcgcttgaacccgagaggtggaggttgcagtgagccaagatcgcgccactgcactccagcctggcgacagagcaagattccatctcaaaaaagaaaacaattattttccatacatccttttggttacagtcaatgcctgactattcaaggccatagagtagcaaaaaacatcagtgttggcatgaaatcaaatcaacaaatatgttttttccttgagagacactaaattgataccttgataaatgattaaacacttcacagtgccctaaattctcagccttcttcaacagtcctgaccactgccacgccggactctaatggctgcaatagggatggcgccatgtttgagaggctttcaaagagacctggagccagtaaatgagacaaggtttactgagaggatttacatacagggtggtccagtggtgacgggctggactagacaatggcaactgcttgtaaaaagcatgcagtttatacagcattcttgcttagcaccctccccctagcaacctctatctaacccaaaacaaagggcctcaatcccctatatggcctgtgttccacaggatgggctgagggttcagatgttactcacagataaggaatgactctcccagttggccttcctggatttattagctgggaactctgaatacacattcttcttaggctacagggtcatcctcaggttatgcttaaattttgtgtcaggtgcatctgccatgcaaggtcattctcagagtatgcttaagttagctagtggtgtcagctgtgtctgccacacaactatgaaaatcaatattcctttttaaaagctattagcaggctgggaacagtggctcacgcctataatgccagcactttgggaggccgaggtgggcagatcacaaggwcaggagttcaagaccagcctggccaacatggtgaaaccctgtctctactaaaaatacaaaaattagctgggcgtgatggcgcgcgtgcctgtaatctcagctactagggaggctgaggcaggagaatcgcttgaaccagcggttgcaatgagccaagatcgcaccactgcactccagcctggtgacagagcaagactctgtctcaaaaaaactaaaaaaaaaaaaaaaaaagtaattattagtaaaatggcctaaaagcctgtagaaacacagagaaataaaattaagaaacctaagaccaggtgtggtggctcacccctgtaatcccaggatttgggaggccgagaagggaggatcacttgaggccaggactttgagaccagcctgggcaacaaagcaagactccgtctctacaaaacatttaaaaaataaaacaatgagctgagtgcactggtgcacacctgtagttccagctagtctggaggctgaggtggaaggattgctcgagtctaggtcaaggctgcagtgatctgtgatcacaccactgcattccagccttgtcaacagagcaagacactatctctttaaaaaaaaaaaaaaaaaaraaagaaagaaaagaaaagaaaaagaaaaaaacacaaattttctaacccagtgtacaaagctctgtaatactcactaaatttcatgataaattgtaacaatgcttttaattttcttttatttctaaccctttgattttctcaaagcaatttctcatacttttataaataaaaatactaccattatgtatttgccagtatatatttattatgcacaatgccagacagcagggaatgcaaagatccttttctctggaagtgaatcatctgctcaggacagaaatttacatataaaagaaatgtagaaaacagcggggcatggtggctcatgcctatatttccagtactttgggactccaaggtgggcagatcacttgaggtcaggagttcaagaccagcctggccaacatgatgaaagcccatctctactaaaaatacaaaaattacctgggcatggtgacgcccacctgtaatcccagctactagggaggctgaggcaggagaattgcctggacccgggaggtggaggttgcagtgagctgagattgcaccattgtactccagcctgggcaacagagcaagactgtgtctcaaaaaaaaaaaaaaaaaaaaaagaaagaaagaaagaaagaaaaaagaaaacaatacaatacagaatgcaatggtctgtgtcataggaaatcaggtttttctgcttcccataaaaccaaaaggatacattcagatatttaccaccacctttctgaacttggtttacaatgagaagtttcctgttttacattgatattctttaaattctgctttatttgcaatggaataaattcaggtagatctaacaagcataccctgacagtttttcatttctagcagctaattaaaagcagctgcaatgttagtctttgtaaacagaatgcatcttagagcaattactatcacaattctgccagacaccacggttttatggcccagacaaatcagctgactgcttctttccctgcaatctgctgcacagggacttctagatcaggttttgcttttgctgaattgatgaggtacacacaggcataaggagaaaaatttaattgcactaaaattacataggtcagtgtttttctctgttaaaatkataataagcaaattccaattataagcaacagttgctcagaaaatctaattatgtttcaaaagccagtgagtgaaaaatgatattttctgatagaatcactagcttagctgaatttgaaaatgcacttaaaatattacccttcatatagagcataagataaccagctgttttattgcatttatatgcataaaatgagaggctcctgatagtaacttttaatgatttcaaatgttagagaaaaaaaatcaagtttaaaaataaattgtttcattttgtagccagaactataatgcaccatggcattaaatatgacaaatttataataaaaagtaaatttttttttttttgagacagagtctcgctctgttgcccaggctggagtgccgtggggtgatctctgctcaccgcaacctctgcctcccaggtccaagcgattctcctgcctcagcctccccggtggctaggattacaggcgcatgccaccactcccagctaatttttgtatttttagtagagacagggtttcaccacgttgggcaggctggtctcgaactcctgacctcaagtgatccacccccctcggcctcccaaactgctggggttacaggtgtgagccactctgcccggccaaaagtgtaatttttttataagcacctctttagtatttgtatgcatgtctccaaatgccaaaaacattcttaagttaatttctggttctactataaaaagtaatatttcaatttctgggtaaagatggattgaaaaatatatttatttttactctcccctaaaactcctctaaagatacaataaaattaaaaaaraaaatttggtgcccacaagagaatatgataggaaagagcagtaacaaactgttaaaagctgggatacagatgggcgaggagtgactgatgttgcagacctaagaaagcaaatgctccttaatgaataacatcatcacagggttaaatgagataatctagcttacaaaaccagtattcaaggaatgctagcttttattattaacaaaatgtttacaaagtgtgatgttctggaaggcagaataacatttttgaattagtgagtgaggattaggaaagaagaaggttaggagaaaaatgsaacctgacaagaccagagctgggagtcactaaaggaaaaggcttattttagactctttaagggagccatgctcttccagttaagactagggtaactttgccgaggaaatcctttgaagaaatcaatgaagacagccaagggacggtatctttggaaatccgataaagttcagaaattaaaaatttgaccacaggaaatgccaaaaaataggcctaatcccagaatcataaatagaatgtgtacctgatgcctattttaaggcctctgagtcccccttttgatggaagtttaagtgcagctgacactcttccagaggacattcaagaagacattcatcctgaggaggtggaaaaccagagctgggaaatatgtagcggggaggtgacttcaaggtccaggcaggaaatcctctggattctttaagaggagtcgcagagctgattattgaacccagaagytcagggacatagacggccacatctatacttaactgactttgccacttcataaagggagaaaatgaaagtctaaaaaagaaattcaagtctgagctcaggctctgaataaacagggctttgcttctttacctactgcgaggaaatcctccaccttaaatcctctttagtctcatgccaattttttttttttttttttttgagagcgtgtcttgctttgttgcccaggctggagtgcagtagcgcaatgtcggctcactgcaatctttgcctcctgggttcaagaaattctcctgcctcagcctcctgagtagctgggattacaggtgcctaccaccatgcccagctaatttttgtacttttagtaagatgaggcttcaccatgctggccaggttggtctcaaactcctgacctcaagtgatctgcctgtctcggcctcccaaagtgctaagatwacaggcatgagccattgcacccggtccctgtgacaaaggtattaattacttcagtctaatacacaattgtcacataatttttaaaaatccttattactgctatgaaaaatattttgcttattcccacaattttagtaaagttagcacactgggaatcaagaaagtagagatttagattcctttactattcaattatcacatcattagactttaagcaccggctagcacaaataggaagaaaaacaatttaactyaaagtatttttgtctattttaagaagggatcaatattttgatgtcaggttcaactttagttaatatggattaatacataataataccaagtttctctttgtaatgtacacttcatctggaaattgattttatcatttatttaaaatataagtatattcttggaattatttctggtggaatagcatctggaaactggtgtaaatgggtttctccacagaactgcttcatcacttgcggcggggcctgctgtttcttcagatgcacaggcagattacttcacacrgataaatgcaaagcagcattccttccaccatgtgccataacccctcttaaacgatatcttcttacacattgatttacatatcaatggtctttaaagaactatgaaatatatagtgctcttttcagttaatactccatatatccaaaacctgtcctatcgtatgtggaaaaaggtggccgctctgttaaaagtgcaatgctgttttaaccaaggaacagatgttttccctaaaataaggtgtgaattccttaaatacaaatgtgatgcaagagcctcatgcaaaactgagtgacgtcctccaccatgaaatgatgcccggcctgcagtgtgccaggacagcctgcagcagtgcagagtaactcccaatgtcagcatgcaggacarctgccatttttaccaacccagccagccaccaggcttttgtacaaatttagaggctgctcagaccaacaagccacctgcctgaggttttaatattgctaagtcatgagatccctgcttctatggtccatccactagatagaacagcccggagcagtggctccaacttgaatcaaatgaaaggcaatcaaattctaatcaagtcaaatcctgagcttagtgctgtaaatcacagacaaatttgctgacctagccaacaggccagtcccctttcatcccattcctgccctatcttggctttctgccttttccctgaaactgtagcttagaacccagcaagaactggggccgagcctgttcagctgcaaaaggtaggcaccgagcctatgtaaatgaagagcaggccctgtcaaagtactctccaggtcaatcaagtggagaactgattgacgtcaattggagaatactctgaccagggcctgctcttctttaacactcatacctgcatctctttaatgctgagatcttactttcctatggactgtgttcaacggtgatctcttcatgttatgaatgagtcagaattattctgagctctgacggtgacaaatagaatcttgagggatccctaccctcaatcagcctaccatctaattaaagatttgactaaatcttatataattacagctatcctaagaaaagtataatttaaggaatattactgtgtttcagtgattcatacttctagaaataactcctgcttttttcccccataagattttaaaaagtaaacaaaaatgcccataatcacaatcatattagcacaaagtagtcagggccatagaatgcatactgctttgcaatctgaatttgaatttaacatacattctaaacacacgtatatcactatttttaacagctgcaaataactttggtaagctcatctttatgctggttccaatatttttatcattaaaaagtttttgcaataaatattttatattttatataaatatttatatttttataaatatttatatattaaatatatattaaaatatttatatatattttatataaatatataaatatatttatatatttttataaatatataaatatatttatatatttatactctactaaatcatttaactttaataatgtgttttctttatccctgtttcctttttttgtaaactcaaccctctacacctccccttaaccacctccgccactccagccacgaaaccatggttagcatgccagtgaacatctttcacatcttttcttttgcctatagaatcgcgaacatatacatacatgttattgtttgtcttacaaaatttggattatactatatacatttctgggcaacttgtgtgcttctttaaaaaaaaaaaaagtcccrgaaactcctccagatcaacagataaagatctaactcaaaattatacctatcagcaaattgtataataatttagaaaatcaaagacacgatattttagaaactgtcattcttttttttttttgagactgagtctagctgtgttgcccagactggagtgccatggtgtgatctcagctcactgcaatctccacctcccgggttcaagagattctyatgcctcagcctcccaagtagctcrgattacaggtgcgcaccaccacgcctggctaatttttgtatttctagtagagatggggtttcaccatgttggccaggctggtcttgaactcttggcctcaaggcatgcgcccgcctcagcctcccaaagtgctgggattacaggcgtgagccaccatgcccggccaaaaaactgtaattcttaaagaattttgtaaagtgacttaatactagataaaaaacagtaagtaacatataactaccctatgacccagcaattacactcttgggaattcacccaagaaaaatgaaatcatgtccacaaaaagactggtatataaatgtttaatagtacctttgttcctaataactacaaatgaaaaatgactcaaatgtccatcaacaggtaactggataaacaaaaatgtgggacattcatacaatggagtgctctcagcaataaaaaggaacaaacaactgagataaacacaataacactgatgaaactcgaaacccttacgatgagtgaaagaagacaacacaaaggagtacatactgtatgatttgatttgtatgaaattctggaataaacactaatctacaatgatagaaatcaaaacagtatgatagaatgatagaaatcaaaatctgagggcaaggaacaagggactttctagaatgatgcaaatgtttcgtatcttgattgacgcagtggttgtatacatgcatgtatacatgtgtccaaaaataattgaactgtacacttaagatctgagcattttatcatatgtaagttatacctcaatgtaaatgatacctcaatcatacatcaataaactgtgagaaaaatgttaagaaaagaggaataggaaccctcatacattactgctagaaatataaaatggtgtggccactttggaaaatagtttgacaatttctcaaaaaacataaaatgaaccaccaattccgctcctaggtacctacygaaaagaaatgaaaacatatgtccacacagagacttacatgtgaagttcactggagcattactcataataaccaaaaagtagaaacaacctacatgtccaaaaactaatgaacagatacacaaaatgtagtacatgcatacaagggaatattattcagcaacagaggaagagaatactgacacaggcgacaacatagatgaaccttgaaaacattatgctaagcgaaagcagtcagacacaaaagttcacatatggtaccatctcatttatatgaaatgtccagaacaggcaaatccactgaaacaagaagtaaattaacgattgcttgtgaataggggtaaaggtgcgaacagggattaactataaatggacatgagagatcctattaggaggatgaaaacgttctaaacctgaacatctatcgttacattacagttgcatcactcagtaaagctactaaaaattattgaatactaaaatcatcttgaaataggtgatttttatgatatataaaatatatttcaataaagttgcttttaaaaagttaaggaaaaaattgggggaccttcccaacgtatttggaacagtaatctaaggatgttaaaagcttagaatgggctgggattggtggctcatgcctgtcgtctcagcactttggggaggccgaggtgggtggatcacccgaggtcagcagttggacagcagcctggccaacatggcgaaatcccgtctctactaaaaatacaaaaattagctgggcttggtggcgtgcacctgtaatcccagctactcgggaggctgaggcaggaaaatcgtttgaacccaggaggcagaggttgcagtgagcctagatcatgacactgcactccagcctgggtgacagagcaaaaccccatttcagaagaaaaagaaaaaaagcttagtatgtgttagaaacacaaggtaaaaagaagaaaagggaaagtagtgtagattgttgaatctcctctcaaacgctttttcagatatccattcatgcattcattcatttgtcctgccagaatgctggggataaactagtaaacaagataaacatgatctaccttgtgcttacacattcaaaagagaaaacagaccccaaaaggtcaactaataaatgcttgcaaataataaatgctagaaaataaagaggaaaaaaatcaatagctttgtcttatagttacaataaccagatagaatgggaattttaaaattctatttacaagaaactataaaacatttaggaaaggtatagatcctacatgaaaaagacaacaaaacgcatatttaaaatactaaaagaaggtttgaataaacagaaatacatacatttcatgcttgtgaatcagaagattcactccaattagactgccaatgaggtttcagatctgaatgatttaagcgatttaaaaatatgttcattgaaaagtaaagatctggaaataaccaagaaaattatgaaaaaaataatgaaaggagtaattactattttaaaatttccactgaagacaatgctttcacaggttgtgatactggcctgtaaatacatcagtgggaatagaacagaaaatctgggaaaagatgtgaatatagacaagagatagcaactcatttcatagggcaagatagtttgattatgctgacacaatggatgtttaactagaagaaaacaaagagtaatccaatggattaattttttctcttttttttttggagacagggtcttgctctgtggcccaggctggagtgcagtagtgtgaacattgtacactgcagcctcaaactcctgggcttaagcaatcctcccacctcggcctcccaggtggttgggactacaggtgtatgtcaccacgcctggctcagtggattacactttaactgaaaaatacaatattaaaactttagaagaaatttaagaatatttctataacttaccaactggcagatgtttttgtgttaaacaaaaaataaagacgctaaaaaggaaaaaacagatacatctgactctgtagacatcatacattttataagacaaaagatgcataaagcccacagagaaagagtacagaagggaaagctattttcaagacaaagtgataatatttataatagacaaagaactcctatgaattcacagggaaaacaatgaactctccaaaacagaaatgtgatgacagcttttcatttctgtcataaacaagattacaatatgttcaagatcattatgtaaaagctgtctcagaactctgtgggaagaagcagagtggtgtgttgttttgtttttgtttcaatatgaaaatagtttctggaaatcttggtaagaratcatttgtggaataagcaattcctaaagtgttcacattcatttatccaaaaaatgttgactgaattccaaaaatatacaaatttcttagagaagtgtttgatgaacacatctggcaactatatataagtctgaatactttttcagagatgaaaatcaaagtaaattaagtggctaataatttctagaaagttgaagaatattgggtttagagtgaagaattgctgtctttgggtgttttttctctctttgagctactgaactgagaagaagcaaaactctaaagatgttaaaactaggtgaacatgactctagccattattttttcgttttctttcttagagaacatttaccagaatgatcacaatgtaagctacagctctcatagatagctgagaaataagtgaacatcacgcttacctcagctactcagcaatgaatactgagttatccaatcaggtcagcaaggcatcactttaaggaatccaggtgaaagtttctaggagtcggacaarggatggtggtcaattaaaactctgcctgggccgggcacggtggctcaggcctgtaatcccggcactttgggaggccgaggcgggcggattgcctgagctcgggagtttgagaccagcctgggcaacatggtgaaaccccatctctactaaaaacaaacaaaaaaaattagccaggggtggtggtgagccttagtcccagctactcaggaggctgaggcaggagaattgcttgaaccctggaggcggaggttgcagtgatccacgatcgtgccactgcactccagcctggcgacagagtgagacgctgtctccaaaaaaaacaaaaaaaaaaactctgcctctgcctgaacagggcgggactccggggcagtcagctgggagctgagcgggctggtgaactcaggcactttatgttgttggtattagttgggttatgttgtcaacctggtgatgctggtttaacaactgaaaaatgccgaaagagaatagaggatagcttggcttagggcataaactggagtcaagattaatataattaatgtctagcatggaatctccttaagagcaaagaccttatcagtcttatttagcagtggatccccagttctggaactgtgcctggcacatggtaagcacacaaatgaatggatgaacaacctgtcctacccaggtcagcatcttctgagagtaacactgaccattcataaaaaccctggaggactaaacactctggactcccctataagtgcatgtcaggagtgacataagggcctgagtcttgggagctttccactcctttaaaacacttaaagctgtgggaatgactgataagagaatagggggcaagagagaacaaggtgaattcaaccagatctacctgaagccttgggaaaggctctagattctggatctcttactaccttttctctggagggctttttcttcaccatcaaagtgttaagatcagagattcaagtgtgagtttagagtaagggagcaaagcagcttgcttgcaaatcaatttccctgcaagactctaagctaaggttcctttgagtgaaggaaacttgtcttttcatctctatataactagtatctggtataaaaccaaactagccaatccctgtcacaaaagatccagctacttgggaactccagttaaccacaacctatatccttcactagcactgattccctcttctttcagtaactgatcattctagacttaccacatagatacaagccagacagcaatgtgtgcattcgtgcccagtcctgagtagaagcaaacagaaaaggaacggagggagaggcagagaaaattgatgcaaagaaacaaggaaggaaaatctgtcttactgtataatgctcaatgtcagcagttttagtgtgtgtgtgtgtgtgtgtgtgtgtgtgtgtgtgtgtgtgtgtgtgtgtattttttgagaccaagtcttgctttgttacccaggctggagtgcagtggcatgatcttagctcagggcaacctccgcctcctgggttcaagcaattctcctgcctcagcctcccaagtagctgggactacaggtgcacgccaccatgcccagctaatttttacatttttagtagagaccgggcttcaccatgttggccagactggtctccagctcctgacctagagtgatccatccgcctcggcctcccaaagtgctgagattataggtgtgagccactgtgcctagcctagtttataattttttaaacataaatataaaaaccaccaacaaagaaaagcactcatattgccatctcagtcatagcaggactgtggcatagccttactgtgtactccagacaaggtgccccaactgaggaaccacagaagaagaacgccctgaaggctgtgtctgcagacttgaagtgataaggaaaggaaagcatcaccatctagctctgcataagaatacctagtgccacgctccccaggatcctaatttacaatgtgattccatttttaaaacaacagcaaagctttatttccaggtcccacagcatcgccttcggggcccagctgtgactccaagaccaggctggcagtcctgccacgccctggaacactggcagagggaaaagggcatgggacaccaggcatgtgttactaagtctcccacctgatcgtgacgtgtgtcgcctstgttcacatttcataggcccaaacaagtcaagtaaccatgtctgctttcaacaggcgggaatgtagaatttctctattgagaggcatccccaggaggagcagtaaacttctaagaacggtctatcataatagacatctttgtcttgttctcagttttgaagggaaatttctcatcattttgctatattttaagaatgaatttgggcaattaaatattaaatcttatatttgaaggtcaggtcacaaactccctggagtctgaaaaatgacaggattggctagatcagggcttctcgtcctcggcagtagtsacatgctggtgtgggggctgtcctgtacactgtcgggttcttggcagctttcctgacctccatccmtagaagccagtagcacccacctcagttgtgaccaaaaatatctccggaaataaccaaatgtctccctggttgagaatcactggaccagataatctctaatgtcatttcaaactstgaaattcaatgctccamtaatctctcctcaaamtgataagaccctttgccaaattttggtcacataaaattatgccagcccaagaactctacaatccgtacagtggcattgtgtaaaaaagacttcacctgctgaggacatakaatctakatccatgagccttctaatacgctaactacaattctataacctttaaagagttgagtacaatgcagagaaatgactaaataatattgttgtagaaggtgaggaatcaggtctttttatataagtaatgtttaggctctggcccaaraaggttttgttcataagtggctcaracatattttatttattgaatgtrtatcctgcctcattccaaaaagcatttaaggcagcttacaaagaggcatacaaaataaaatggaaaggaagtaagaaaaatagggggaaacaggtaaggaacagagaaaacaaatattccaatccaaaaagtcaataccatttctgtgactctagcagttattttttctttttcagagcatgaaactgagctcaraatttcaggatgcctaagagaaagttggaaataaaataattaatttgccttctcagagaagggaattatttgctagtgaaacaaggtttttcttaggattaaactcagggacaggtttcatgtgggccctgtgtggggaacaagtgtgaaaaggacccgtgtcaactccacattctcgcctctacagtgtcacagctaagcctgttcttatatgaactttaaatacaatttaaaagcataactttgaaacacagtttggtgaaagtgtatcttgggggccasgcgcagtggctcatgcctgtaatcccagcactttgggaggctgaggccaagtcaggaggatcacttgagcccaggagttcaagaccagcctgggcaacacagtgagactctgtctcaaaaaaaggaagtgtatctttggaagctaaagccacatgggtagaactttttaacaaaagctgtccagcgacctaggttatcraaggataatatatcattttcctacagaaataatttttcaaagtgtggttagcagagaaaacttttcttcaaagagaaccttctagaaaagtctagtatataaaatgggtccaggctgggcacagtggctcacgcctgtaatcccaacactttgagaggccgaggcgggaggatcgcttgagcccaggagtctgagaccagcctgggcaacatagcagagagctcgtctctactaagaaaaaaaaaattaatggaaaaaatgggtccaggccaagctgcttcttcccttcctttcactctctcccctcctcagaaggcctcagaaggagaactgaattctcctgtggcagaattcaaaagccactagcctgaaaataaaacttcaaatacctagaaaagattcaacagttcaataaatatttattgtgctaagtatcagagtaggtaaattttatctattatttttcttgaaaataatttttccattgatctttttacgagataattaaccgttccaggtacaattccccatcagagcctgagtgctcactgaacccagatccttaaactccacagagttaatcacagagcccaccttctactacagaaactaaagctcctgagcagattccatgcaggggcaaggctgtcccatctcctcacaacagatgggcacaaagcaagggtttttctcaatggtcaattttgggtttgtttgtttgtttgagatgaagtttcgctcttgttgcccaagctggagtgcaatcgcgcgatctcggctcaatgcaacctccgcctcccgggttcaagcgattctcctgcctcagcctcccgagtagctgggattacaggtacccgccacaaacacctggctaatttttgtattatcagggtttcaccatgttggccaggatggactcaaactcctgacgtcagatgatccacctgccttggcctcccagagtgctgggattacaggagtgagccaccgtgcctggccctcaagggtcaactttggatacacagtggacccgattaagagagtggttcacatcccaagttcctgccttgctcagcatggctgagacagtttgggcctgaaatgttttcagcacaaatgttatcagtgatcgaccgctgttaggactttctggttcctgttctcaggcaactgttctcacctcaatctcaaggacacccaaccccaccctcccatccttttcccatgaagcccgggttgaaaccactgagcagttggcttccatgccttgccctggaccctcatctgcttttgccccttagtatgaactgagggtcttcaaagaaatgactcacccaagccaagtctcaccatgtgagtagaaaacaagaaacaaaacaaaataaaaacacagaacacaatccagtgtaattgaacaaatatagaactaattaatttagagcaatctggtatttcccagtttacacaagcagtttacatgttagagaatgtctaccaaaattacctttatcaaagttgtgttttccttctttgcaaaagattgaaaaatagaaatttaaaaatatatccaactttcaatcatagtaacaagcacttatatagggcctactatgagccaggctttgtttagggatgagatacacaagtatacacacacacacacacayayacacacacacgccatctccttttaaccttcatgttacctgttgaggacattattcctttttcaaagatgaggaaaataatcacaaggaagttaaraaacttcactgaagtcaaaaagctagttagcggtagggctgagatttggtacaaggaagcctggctccagaatctgtgctgttaaccacaacacaaagctgtttctgggtttccctcaatcacttagcacccagcaatagggaaatccctgtcaaataagaatgataggccaggcgcggtaggtcacacctgtaatctcagcactttgggaggccaaggtgggcagatcacctgaggtcaggagtttgagaccagcctgaccaacatggtgaagccccatttcaaccaaaaatacaaaaattagccaggcatggtggcatgcgcctgtagtcctaactacttgggaggctgaggcaagagaatcacttgaacccaggaggcagaggttgcagtgagctgagatctcaccactgcactccagcctgggcgacagtgcaagactccgtctcaaaaattaaaaaaaaaagaatgattctcagccacttcccagttattgctatgtgctcatagaaaaagaaacaattttaaagtytaagcaaaacacaaatatgtatgaataagttcagcaaaaacaaatcctatcatccagtctatcataaatgcatcattgctttgctatctcagaatattgataagcaatttatttttcatttttatttcattctaataacagaaagccacagcattccacacactcatgagttaggtaatagctgaaaatatctgattatttcatgatctagataatctaaacttgactctggaaaatagaagggaacatttagaatttataatatakaatcagaagcttcctgaatcgacttaaaacamgtgaattatgttattataaaggcaatacgtgttatggtggaaaaatttaaaatctaggaaacaaagttaaaacccattacccaaggataaccaatgcaaacattgtgtgtgtatcttttcaattttatttctatgtkgatactagctaccacttattgggcatctaaagattgtcaggcaccatgccacatmcttactgatgttttcttattcaattttcaccaaaacctataaggcaagagacactattatgccctcktttttgtaactgagtcttagagaggttgagaacttgccttcggtcaaggattccaatctgggactacatacggtacagggattactgatgctatgatctcactgagacaggcgcctgtctgtaatcccacatcaggcactgtgcttggtagaggcttacaaatgtggacagctttattctcccctagtcttatcccttttattcatttaaatacaggttatcaggtttactttaactcaagctttctcagcctgggcactaccgacatttgagactggatgattctttcctgttggctgtcctgtgcagtgtaggatggttagcagcacctctagcttctacccactagatgccagaagcatccccccagttgtgacaatcaaaaatgtctccagatagcctggcgcggtggcccacacctgtaatcccagcactttgggtggcggaggcaggtggatcacctgaagtcaggagtttgagaccagcctgaccaacgtggtgaaaccccgtctttactaaaaatacaaaaattagccaggcatggtggcagacgcctgtaatcccagctacttgggagactaaggcaggagaatcgcttgaacccaggaaacagaggctgcagtgagccgagattgcgccactgcactccagcctgggtgacagaacgaaacgctggctccaaaaaataaataaaaaataaataaataaataaataaataaataaataaataaatgtctccagacattgccaaatgtcccagggagaaggagtaaaacagctctgaactgagaagtatggcagtttaataaaatctctacaatctctgcttcatagtatgatcaacatggtctgttcactgagataggcctttttcgtaattcacagaaacaactcaagaaagagtaacaataattttccacttagaatgagcccctttaggactcctgaacagttccacaggtacttctctatggttttgaggtgttctgcattgttttatcatgttttgcttttgaacagatgaatccttgcacatcttcaaacccgctgagttggaaatgagtttgaggcaaggtttcgttgcctaaaaccaaatcctcttgataaatgagttttgacrgagcatcaactcaaatacttttttttttttttttttgagacasagtctggctctgtcaccagactgtagtacagtggcgcatctcagctcactgcaatctccgactccctggttcaagcaattatcttgcctcagcctcccgagtagctgggactataggcacgcaccaccacgcccagctaatttttgttttgttttgttttgtgacggagtctcgctctgtcgcccaggctggagtgcagtggctcgatctcggctcacygcaagctccgcctcccgggttcgcgccattctcctgcctcaacatcccgagtagctgggactacaagcgcccgccaccacgcccgtctaatttttttgtattttcagtagagacggtgtttcaccgtgttagccaggatggtctcaatctcctgacctcgtgatccgcccgcctcggcctcccaaagtgctgggattacaggcatgagccaccgcgcccggccaactcaaatacttttaaacaaacctgtccagtaaatcctggaatctcttttcaaatatctcttctagtaactctagtctttcccctcctaatattccattttcctaatccatctttattgtaattcctctgagctctcatgtgaacctcaggctctcaaggaatattttgyccgatttatcatggtcccttctggatctttctcgagagacctccctgtgcttcagcaaagcagagcagtgtcagctaattagggcagtgtcaggcacgggcatgaccccagatgagccacttcacccgtgctgtcaggatgcgcagttgtcagggagctcattaaaaataattttgatgaagagtacaaacactgacaattggctcstgtgaccttmtaaaatccatttyacctcttgaatgtctttcttccagtagtcacactgcttcctagagtgttartggattcacttttgtccttagaggcccttgaagaacaatctttctctttaactatmtacgtgctgttgaaaggggtttctgaatccagactgtaatgtgcccctttgaccctcacaactaaggaaaagatagggagggacaggttatatttggctttctmtragtaccctacttgcctccataacaaataccataaagtttcatttacctgcaggaaataatcccaatccatttactttcctccaygcagtggaaattttgcagtctaaaatactgagtagtttgacgccaataaaaaagagaaagagacaaagataggattgcgtggtagtaaactttctttagtctttcacttttgaaccatatattctgatttattttcagtttacagggtggaaagaactgatttttaagtgcgctaatgagaattggggcataatagcatggccattaaaactgcaaagattccttaaaaaatataacaataaatcaataccattggtaaacaagatacattctatacattatcaggataattaacacaagctgctataatagacaaatctgtaagtctcaatgatttgactcaacatcagtctaggtaaagttgaaagtagactggtagttcctcctccaacttatagctgtgacattcgccatatgccacttctaagttcgtttcactaagagaagaagggaagaaaggaaacacacgggagatggaggctgcagtgagctatgattgtgctgctgcactccagcctggaagacaaagtgagactctgtcttaaaaaacagaaaataaaaaaaaaattttgaaatttgatagtttttaattttggctttagcatatttagttgaaaaagactagtccaaagcttcatgaacatctcttacacatgtgaaatgataacgcaggggtcttgggttctgaccattggcctgtgagtggtactagtggattctgttcatgggccactgactcatatcagtctcatgattctaactcaacaaaacaggaaggcaggaaatagaaagggccacatggaatatttggtgagcaccagaatctatgttccaaagacatgactacaatactggaaaacgggaaacagcaatttttatatttttatatttcatataataaaagactatcaagccattaaaatgttttccaagaatatttaatggcacagaaacatgctcataatacagtcttgagtgaacaagcaggataccaaactgaatacataatgtcttcctaaaaagtaaggatatgcaagaaaaacactagaggaaaatatcactttgctaccaacagccctgtagagtgggattataggtgatttaatgttattctctatacacttgtttattgtcaaattctccacaataaacatgtattagtcttataataaaaatattattaaagaaataagaatttatatcattcaaataaaacagaagtacctatccacctcagtaccctagtacataataaaccctcaaatgctgcataaattaatgaaaagaaggcaggaagaattaaataataaaatgttatatgaaaatctattataatgaaaatcgttctcaatttggggttgcttaggtgtggagctaataaaaagcaagtagaaatactggaacaatcctcagaactcaagacccctgcgttatcatttaacatgtgtaagagatattcatgaggctttggaagagtccttttcaactaaatatgttaaaaccataatttaaaattataaaatatcaaattttttattttttatttttttaagacagagtctcactttgtctcccagtctggagtgcaatggcacaatcatagctcactgcagcctccacctcccaaactcaagcaatcctcctgcctcagcctcctgagtagctgggaccacaggcacatatcactacgcctggctaattyttttgtttgtttttagcagagcaaggtcttgctatgttgcccaggctggtctcaaactcctgaattcaagcgatcctcctgcctcsgtctgccaaaatgctgggtttacaggcatgagccaccatacccaacctcaaattttaatttttaattaaagaatctccgtttcctgccaggaaaacaaaaatttgaagaataaggattggaagtataatagctaacctctattgatgaattaccattagccaggcactctgctaggcatatcgtactgtttttcttatttatycctcaaagccatattttgaagaaagatgatacccattttatagatatggaaatggattcccatagaggtggaagaggatttgacttcagacagcatcactctggagcccatacttaatcactgcctcatgtcatttatccatgtcagttattttttggcactgaaaaatcttcgcctatattacattcttccaaagactgttaatggaatgtaagctttaaggaagtagaatagatacagtagattggcactcaacatccattccaacttctttctgtaagccttctttccagcagaggctggaatattaaaacctgcacatttcatactcctttgcagctacatttctgagggtggtttagaatccaccaatcagacacatgcctgtgggattacaaagggggatgtgagaccgagggatggctgttgctgccatcaagcctgctcacgaaggcacttcccttctctgtgatggtgctaccagaagttgcagtgtccattcccttacttcatgggtgctgacgggtatggtaaggggcattcctttgctggttctggaacctgcraaagtatctgcagtttcctgatcttgacagcttttttttattatggcagtgttggtataactctaaaactggcagcttcccaatatgagaaaattgaacaaaaattcatgaaaagttagaaaattattcaaaaaatattcatccagtgccttctatgccaggtgatagacatggcatagaatgacaaatacaatgacaagtaaaatatatacttccctgcacttaagaagcttacagtctagttgaggaagcagaaattaacaaaataactatatgaattcaattctgattatatttacaatctctgattgctcttcaagttctgcctgcttccattacatcttattccctgggcagtggataccatcaggcatttctagaattcacaattcactgaatgtttggtccactttattgatcttaaccttcaaactatggtaagttatgatcaggagtttagatatcaaataaagacaaattgaaactggtaacgataacaatgtaaaacatccaagactttctcggccaatggctataattcaacaattacggttaagtaaaactgttctctcctaaagatgaagaaaaaaatacaatcatgatgtcagtgctgtggaaataattggtcatattgacataccattaacggagtctgtgtctctggttgaatcatattgatttcactaatgttctttctagtgtcagctccctttcatttgttatacggcatgccatctttcagcctggagagattactactcagcactatgatgggcaatgatttgacaaggagtgttttcaggctaagatcttttaccatgttgggggctcagtaagtcatgttaaagattgcatttaggtgagtctcaagacataatgacatttatatcacttttctttccggatctgaagaagttataggcaatattagatattagtgtgtcattaaggcttccagactaaaggttaagatattgctcagagagccacagagttaacctattctgtataaatgtgtgtttttaatgaagttagatatttacaaggttatatcatagtcttgctgcacataaagcaaatttagatagtgcttaagtacaattgaaatattatctaccttcatgtgttaagttttaataagaggggaaaaaacaaaacacatgtgtgtatctgtgtatgtgtgtatgatacctgaaacttaataaaaaatgtttcaacagtcacaaacaggaatatctacccaccttactaccttgtatataataaaccctaaattgctgcatgaatgaatgaatataagacagaaaagcaattttaaggggcaccactgtatttcaagatgattcagattttcatatcagatgataaggaataaaagtaatttgaatcagttagctcttatttaccacacttgatactgaaaaacactttccacctggttttcagactgtattgaggctccattaaaaaaaaaaaagtgaggcacttccatttcaagataaatgaacattgcctctccaagagtggttacatttattttagccatatttgtggaaatatttctaaagtatacaatagaatttttaagctagcttagctaacgatggctttacattttaaagataaaaccttttcttaacaacctggagaattataaacatcttgtcaaaacaggccatggaaggcatgctagcagagattcccttgctgtggggacatctctaagggattagccgaggctgcctggcaaaggtgggcttggttccagaagtgaacaatatccagagtgagctattccagtagctgggacatggccgtgggaggggtagcagctaccatttgctgaatactaagtatgtgccagactaaaccacatgctaagtatgtgttagatgccatatgcgtcatctaagggcacaacaacaggatattattatccctattttgtgggtgagaaatttgaggcttagagagttaaatatttgctgagagtgaatatgaactaggaaatggtggagaccagattcaaacctcaggctgtcaggcccaaaccatcctaaagaaggaaagctctgggtccaaggcaggcagttttgtaatttctcttgaaggagaacccaaactacaggtagaaattaattgtcttctttcctctccaggaagggtatggcaagataagtggagaagaacgttaaggcaccaggtaaacaggtgggaatccaaccagagccccagttcaggaggatggtcaacatgatgactctggcttggggacacaaacacccagtaatgacggacacaccaaataccgggtctctggcagccaaacaattccagaatcgcacctgctggcgaactgattcwctctgcacatttctcgccagaacgttcctttgggaccaagtggttggtgctgtattaatagacaaaggatagtagtggctgaagctgaacaggactgagaggacacagttcttacaccatgctattatagtgatgcctgaaaggggtcctgggatgtgcagtgtgttattgtgtcttccttaaatagccccagacaactatgctttttatagtatttctctcttccatccctcatggcctactagtagtcactttttgctgtcagcatgcctgaagagcagattctgtgtcccctactctctccacatggcttctcaaaaaaatacacatcttcgcagctagtttatatgctaggaaaccgataaatcaaacgtttgatgagccaggtgcggtggctcacgcctgtaaatcagcactttgggaggccaaggtgggtggatcacatgaggtcagaagttcgagaccagcctagccaacgtgatgaaaccccgtctctattaaaaatacaaaaattagctgggcatggtggtgcgcgactgtaattccagctactcgggaggctgaggcaagagtattgcctgaacccgggaagcggaggttgcagtgcgctgagattgtgccactgcattccagcctgggcgacagagcgagactccatctcaaaaaaaaaagtttgatggcgtacaaataaccatacaagttattggcccccctttcacgcactcactcaacaagcatttcttaagcatgcttaatcaagagtggcaagtgctgtgcaaggccctaggaaaacaaaaccaaagaacacaatttttgcctttgaagggctcacaaaccaatggagatggagaggtgggaatgtaaatttcacactgcaggatgcagcagaggttctaacaaagctctgcataagtgtgaaagccacatgagaaggaagcaaagccattcatgagaatcacagatgactgtccacaaataaagtacatgggcttctctccacacaggaagagggagcaagtctgccaccttcagagttccaagaaaaagaatagctaatatttgttgagtgtttcctatataccagaggtattctttccacatattaactcacttaatttttttttattttaaatttttaaatttttcttttttatacaggcagggtctcaccgtgtcgcccaggctgatctcaattcctgggcttgggccaggcacggtggctcacgcctgtaatcccagcactttgggaggccaaggtgggcagatcactggaggtcagaagttcaagaccagcctggccaacatggcaaaaccctgtctctacttaaaaagtacaaaaatcagccgggcatgggggtgggcgcctgtaatcccagctactcaggaggctgaggcaggagaatcgcttgaacccgggaggcggaggttgcagcgagctgagattgcaccactgcactccagcctgggcaacaagagtgaaactccatctcaaaaaaaaaaaaaaaagaaaaaaaaaacccctaggctcaaattatcgtcctgtgtaagcctcccaaagtgctgggattacaggtgtgagccactgagcccagcctcatttaattcttaagaaaacttaaaggtgttgcttttttaaaaatttcattttacatctggaacctgagccacagaaaagttaagtaatttgcccagggtctcamagctaatagtggggagccaggacctaaacaggcagtcaaattccaaagaccacaccttaaccaagaaactgtattaccacctccaaccatcagcacactgcagtgaatacgtggaaacatttaaaatatgggaataggttaaaagtaaaatctctaaggtaaaattcactaagctttggccaaagacagaaaaaagggggaagaagaggaaaagtaggaaaccagctgtcatgctgagaggatgaagggaatggtggcaaggaaatttggggttaggtggcccctgcaaccacccaacaggtatccttgggcacccaggaatcttggtagcttccagaagaagcagaaagggtggagagcacccttgattgatcacttttagtatttacacatagagtatgtggacctctgtttgcctgcttgctccagccccccagaatctttaggaatgtgtctgaaaatttgttaatacaaagtatccaaaagtaatcataataatacacctgcatttgctctaccaacatttcatcccttcaatagagggtaaactccttggcatttgtacaaatgggactggattcttcattaacgtctgcatctataataaagggyagtattaaaagacatgcattaaaaaattaaattcaaattgacacacaaaagtagggatcaagtacttatctctgaaaataagactctggacttaattataatagacaagagtaatttctagacagtttcatctcctgaatcaatatcaaatattttcaaaacttgtaccattaacatccaattttattattttttaagcctatgaaaaccagacctttgatttagaaaaataataacgagcacatgtaattatgccagtaattatatcccaggcaacagttcaaagtgttgtatatttactaactcatttagtatatgcttatatgtgtatgtatgtgttataaaatgtatgtgtgttatacatatatatatgaaaaacaattttacagaattttcctgtttggagaggagaattcaaacagttggaatgtttcttgaccactagtaattttcaaataatatatgaagaacataaaatgcagctttgcctgcttctaggattgttccaagcagttctcttggctgatctaaacatgagtgttctgcaatacacacatctcctccgtggggtaaataataccaagcatagggatgccatcatggcactatttcaaaatgtaaacttgacagccagttaacagctcttcaggaaagagtaataagtacctggagcccagaagaccaaaaagcaaatgtcagaattttaggggaaatgatctaggttgctcccaaaatgctgttcacggtgatctcccagagagtgcctcattctgagtcaatataaccctaatgtgctttccttcaattactgtaagcatatcctgagatttcagtaatgtgacagctggtaacctgagccccaactaagactgccctcggctatatctctttattaattcatcccgggagctggaattgagctatgctgaggagcagagaaagtggcattgtgtcctccctgacaaagcagggcaagtgcaggcacctcacacacagaggtatgtttgtcccaccattcaaacagagctgcttgcctgctgcctgaactgtagcgtgccttgacactgcatatgaaacgctggaggagcaataatatctatgtgtgcaattttattgcaaaaaggcctgattctgctgttgtctctttacaaatgtctgataatccactcctgtcacagactgacaagagctgctacttcatttccagctgttggggaatacctcaggagaatacttatctctcaatgggcagcaacagcagggctatttcaagacctcactccattgtaaaggtkttatgtgtccacacagatctataaatcaccatgcaacatctttccagaagtatgtgctggtctgcagaattgctagatatgtccaggtgggctgggatcactggaaaggcctggtacatcttgcctgacagctaatttaaatggctcttttagggttacgtgtcataagaaagggggagataactttaaaagattataaatcacttttataaaaccacttaatgtaaatgactatatcttaatatcttaacaaatgttgctcccaattttttttatgttttaatgcaactgaaatctgaaagcattttcttattttccctttttttctttcaggcaatttgaggcacaaacaagtgtaaaaaccaaggaaaggtgcagctgctttgctattatatagcaacaaaagcgatctctttgtattttacaagaactttcctttctctgtagcattttgttttacaataaacaagtatttttgactttgagatgttcttacttcaaggaagacggctgtactttaatctgtgagaaacctaaaagatgagtgcctgaactagatatcatgattttaaaaatttagctgaaatcctcagcctattaaaggttsaatttgaatctccatagctggacagctgaaattctcctttttgcatatcaattagatttagtctctctaccttatggcattaccattcacagatggttactccagggatggatgcatttcagtaacagtttgaaatgcccctgggtaataacaagtgtaaatgattgcttgtgccgttgaaataatgcaataagactgtcagtggccgatggagtacagctgtggacgaagtctacacttgcttctagggccttatctacactgtggatttaaaaacttaaaatacatttattaactgcaaaaataataaatgtcattcaaataactggatttttttaaaaccacaacttactgaaaaaaaaagcagcacttcagagtaaaaaaagcaaaaaggttgacttcacagatgcttayttttctgtctaattgcagaaacaatgtggggtaaaatgtttgaatcagaggaaaaactgacgagggatcattttaattggatacaggataaagcaggaggtttatcgacaacccatcaataaagataccatttagtgtatgattaaggtgactttgagtaccaggctatgctagattttgtacaggataccaaagacattcctcctcctaagaaaatgaacatctactttgatagaaaagacttcatttatacaagacaatatatagtcaagtattgggttataagcagtagagataagagaacaggaatttggaaggaaagaacaccacgagctacattcattgggaatgcttggtggaaaaggtrgttctcaaggcaagttaaggaagaattttcagcaagacctgcaaagtcataaaaatgagtacgaatgtgacagataaggagacactggctgctcagaattcaggactcacaccaagtaatggtgagtgctacatgccagactaaggagcttgactgtcaagaggaggttgctgacaaaagtgggagttkaagtggtgtttaaagaactgatctaacagtggtgggtaagaggcactgggaagaaaaccagagcagtgattcttaaccaagagcacgtatcagaatcatccacgaacagctctccaatagacctcgccttttatttttcaagattttcttgtcactccagagagtctacggagcccagaacatatacataaagtaataaaaaaagggttagacccaaaatattgagaactggaaaaatcataatattaactttatcataatgaacttagagaagtccatcaaaaaaatcttagagttgggtgagtcttttgtctgttttttgcctgcacagcaataacttgttaggcaactgggtgacatgcttaattctctccaaagtgagagtccctttcccgtctgcaactttataaaagctcatccctgggactctcccaggagtatacgacaataaacaatgttcacatggctaccgcaagcattcagtgatggtgaccagaccagagttggttagccttgattccaacccctgatttcaagcattggagggctaataaacatcatatatacatgatgtttattacatatatattatatatattagrtatgtaatatatatgtattacatatatacacacacacacayayatatatatatatgtacacacacatatatatacaaagtctggctctatcacccaggctggagtgcagaggcacaatcttggctcactgcaacctctgcctcccagacccaagccagcctcccacctcagcctcctgagtagctgtgactacaggtgcacgccatcatgcctggctagttttgtattttttgtagagatgaactttcgccatgttgcccaagctggtcttgaattcgtgagctccagtgatccacccgccttggcctccatcttaactgatttaatgttcttgggtttcctcttctgccaggtgggccttgttgactcacttaacaagaatagtttcaggtatatatccgtaagaaaacaaaccactctattaataccaaaaagacaagggcactcacatgtttatcgcagcactattcacaatagcaaagacacagaatcaatttaggttcccatcaacagtggcttggataaagaaaatgtggtatataaacaccatggaattctatgcagccataaaaaatcaaaatcatgtcctttgcagcaacatagatgcagctggaggccattattctaagcaaagaaatgcaggaaaagaawracaaataccgtatgttctcacttacaaatgagagctacacatcaggtacttatggacataaagatggcaatactaggcactagggatgcctagaggtgagagggagagaggagagcaagggttgaaaaactactgtatactatgctcagtgtctgggtgatgggaccattcatacccaaaacctcagcatgacacgatatacctcagtaaaaaacctgcacatgtaccctctgaatataaagtaaaagttgggggaaaaaagagcagttttgctactgaagcttctggaatgtaactgaacaaccttttctcagatccagstattggataagaaatcaaatccagccatacgtggctgtgtacttctttgactatattattatcatattaagtagacttgatttcttaaaaagaaaataaaaggttatgacatatgcctatagaaataattccataaataaaagaatttattctaatgttgctcaaatctctatgttttgagggttgggcctcagcagccaagtttatatatataaatgtctccctggttatagaagaatggaccagaagcaaacacctggtccctggtgggccaatcaatttctctctccctgacagctagaattgaaatttgaaaataccagyctcagccaggtgcattggctcacgcctgtaatcccaacactttgggaagctgaggcaggaggatcacttgaggccaggagttcaagactrgcctcagcatcatggcaagaaaattagctgagcatggtggcatgcacctgtagccctaggtacttgggaggctaagacgggaggatcacttgagcccaggagttcaaggttaaagtgagctatgatcatgccatggcacaccagcctatgtgacagagcaagactgttaaaaaaaaaaaaaaagttaaaaaaaactagtctctgcctgtaatcccagcactttgggaggccaaggcaggtggatcacctgaggtcaggagttcaagaccagcctgggcaacatggcgaaaccccatctctactaaaaatacaaaaattggccaggcatggtagcgtgtgcctgtagtcccagctactcaggagtctgaggcaggagaatcacgtgaacccgggaggcagaggttgcagtgagctgagaacgcgccactacactccagcctgggagacacagcgagactctgtctcaaaaaacaaaaacaaaaaacamcaacaacaaaaaaacaagtctctgctgactgcttgaactgaagacatctagtctcaggaactgtgaagcctccatcttccactatggccacagggaaggagaaaaagggaaactgggggtagggaagaaagaagcagatgtgcaggcagaggtagggatgccctgcaaccacagattccactcaggtattgctcatatgcctcagtgtactctgactcagtggctttcagtccctgctcctcttccttctgctgtccctrttatcaccactggcatttctgttcctttccttctatgtctctccaactcccagagggaggatttgaccaactgtgtttggtcatcacccaatatcaaatcaacataatgtacacttataagctagggatgcctgagaacataaccttcgatgtatctatttagtgcttgcaataaacagtgtgccatttatygtacttgggttggcacgtgcatgtctccaaattaataagaatgaaaaatgtaagtgatttagccaaagctgtaccataatccartgatcatattgcatgcaagtaattaacaagttgcacctggtgagtaggaaggcaggcagccagaggctccagagccatcagaagggctgtcagggcacaagactgccaagaaagaaggaaagtgactgtctactggaagaatctgtgcaggctccatcacaggcagctgcagctctgtatgagggcctctgggggagctgggaacctgtgcttctatrtgggaacatgctccactgtttccagctttgtatagaaatttctaatcatataaatctcagtattcttggacatcaaggaagtcttayatttttaagcaacyctgtctgctaccatcttcccaacaaccccaccaccatstgttttgatgcctacacagaagatataagccagtggatcctacatttttttcaagtatttgctgaaatacaaagatttatcaaaattgctaagaagcagggtaccattgatgttaagattacaaggaagggctataatgaaaatgacaagaaaatgctcggacagaagagtcaatgaatttgccatgagtctcacgtgccttctttacctgtggaaggggttcttgtctctgcaatatctttgaacaagagcctacagattcttatgttatttttttttaagatatcagagtatcatacactcaccgacatggactgacccaaggcccctgtgtcaggttgtgcaggtctgcactgcataactttaagggtaccatttccatccctactccccaaacttgtgccacacarcagccctggaagttacccgtctatagcatggaaaagcragtacatgaattcatagatgttaacaagcagtgcatttgtaaagctaaaaagaaacattttacctggtgtcctttcagatcatcagtctytctgctcagtcaagcacaattcttttaatccctatyttcatccacttgtctctmtmaaattgattgggcttctcctaggatcttcatgtttgtacaaagaaagcccaagctaaattttcaaggtcaaggaaaaaacatacgcttttccctgcctagataaaaccttcagacagaccaraataatggactagcattgctactgtccagatgttcatgtccycccaaaatttgtatgttggaacctaaaatccaatgtgatagtattaagaggtatgatagttgatacagtttggctgtgtccccacccaaatctcatcttgaattgtagctcccataattcccatgtgttgtaggagggacccrgtgraaggtaattgaatcatggggacaggtctttcccatgccattctcatgatagtgagtaagtctcatgagatctgatggttttataaaggggagttctcctgcacacaccctcttgcctgctgccatgtaagaygtrcctttggtcttccttcaccttctgccatgactgtgaggcctccgcagccacctggaactgcaagtccattaaataaattacccagtcgtgggtatgtctttattagcagcatgagaacgaacgaatacgatagtattacaagtaggtgctctgccttcatgaatgggattagtgcccttacaaaaaaggcttgagggagsctgtttgttccctttcaccatgtgaggatgccataagaaggcaccatctgtgaagcagacagcaagctcccaccagacactgaatctgctgatgccttgatttggacttcccagtctccagaactgtcagttactctctcttcttaagatcacatgaccagaattctcctaagtcagatagggtcaatgttttgccttaattcctgacttgcatctttttaactctgacactaatttttctcttggttcacctaagacatctataatgtaactttattgtkctacatttcagatcattttctggcaatgcttctttgacawakcatacamattttgcaacatgaagcaatatacatttcttgacttcaaaaaaatatggtttccccataatgtrtatgaaaacatatcaaaggtgggttacattattaaattctgtaacttgtatattaataacttatgaagtctatgaattattatgtaccaatgatgcaagaacatacagcaaaattaatgctatcattcatagtggaccccctctatcatcacagagaaaatcattgatgaccagcactgactccaatattacccargatctatatttagtatgtctttakgagcatcatggttccttattcagaggatgagattgtatggaaatggcctatcccatgcagttcagcacaaggagayccagtgcagtacasgaacamtgtatgaaatgcttaaaaatgactattcattgcacattagagaatgcctatgtcacatttttacaattacagaactcttttttttttttttggagacagagcctcacttcgtcacccagggtggagtacagtgacgtgatctcggctcactgtaacctctacctcccgggttcaagtgattctcgtgccttatcctcctgaggagctgggaatacaggtgtgcaccaccatgtccagctaatttttgtatttttagtagagacagggtttcaccatgttgcctaggctggtctgaaactcctgacctcaagtgtttctcccacctcagcctcctaaactgctgggatwacaggcatgagccactgtscccggcaacattacagtctatcatttttataaaaatagcagcaacctgtaaaagytcccagtggaaagctgcatggtcatacagggagggttcaccaggaaagttcctacctgcctgtctgccaagtgaccttaaaagggagcataacttggtgaatttgacatgattcaggtcatgattcatgggctgggaaactgtattccattccaggctcattcaggctcgaggacgctcttgcatgtgaattaaacccacaggagactgatgcacaaaaccagaatagagctttattttacaataagaattgtataactgccgagaggtcagagaaggacagtgggaaaatcacattctctgctcaaaggcagactctccagaaagccagtttaccgggtgcctgttgcggggaacatggaatcagaatcagtatgagatttgcctaattcgaatgtaactgcatcagactctgaaaacctagtgtgtctgtctccacaacacaggcctgtcagaaatgaccactacagagccaggcagggtgcccacccctgcttagcacctcagtgaatatggccagtatctgcttctcagattcttttttttttttttttttttttttggagacggagtctcgctctgtcacccaggctagagtgtgatggtgtcatcacggctcactgtagcctcaacctcccagactcaagtgatcctcccacctcagcctcccaagcagctgggaccacaggtgtgcaccaccacatttgactaatttttcttattttttgtagagatggggggtctccctatattgctagggctggcctcaaacacctaggctcaagcagtcctcccacttcagcctcccaaagtgctacaattttaggcrtgtgccacagcacttggcctactgcagtagagatatagatacgaatacttttcttaagggtactgtacagttagsctgccctggaaccattmtgtctctttgagtttccttctctactctgaactttaagtgtctattttcttattttctagttcatagaagacatttcactatcacaactgtgtatttactgcccacattaactaaattattgtgtacttattcatgtttctagaaaacttgaaaaagattttttaaaattatcaacataaaaactctgaaggagccttgaagatgtttttaaaaaattaagtgagcagttgaggtaaataatgaatgattttacaatcacagatcatttaactttaaaatagcataaaaattcttcttagtaaatcgtaactaacaagaagaaggaaatataatggtcgataattaatcaaatatccaaaatgacrgctaagggaaaaaaatccaccaccgccacctgaacgacctttcagtgaaatgagcgttgtggattttagaattcagaattctctgttcttgttcctgtgagtctctcaatctagctgctttccagtcctaatattacttggcctgtctggcaacattggtctctcttgttcttgaaagcttcccacagccgggcacagtggctcatatatgtaatcccagcactttgggaagctgaggcaggaggatcacttgagttcaagattagcctgggcaacatagggaggtcccatgtctacaaaaattaaaacattagctgggcatggtggctcacacctatggtcttagctcctcgggaggctaaggtgagaggatcacctaagcctggggaggtcgaggctrcagtgagctatgatcataccactacattccagcctgggtgacagagcaagactgtctcaaaaaagaaaaaggaagaagaaggaggaggaaggaggaagaaggaagaagaagagaaagaagaagaagaggaggaggaggaagaagaagaggaaggagaaggaggaggagaaggaaggaaggaagggagggagggagggagggagggaggaaaggaggaagggagaaagagaagcagaaggagaagaagaaataagaaagcttccacgctggtttccatgagccactckgtaatcctcctcatcactgctctctggccacacttcgtgggctctgtcactgcgtgcccttcctctgtctgctctgaggcctggcactccctaggtctccatctgtacctcttttccttcttcctctacttaatctcattcactcctgtgactttaagaactacttaaatacaatgatttgaaaccagacaaaatgcataagcacagcataacacacattaatagtcccttgttgttcattttcttgcttttcattagtcatcctgagattcagaagtatatttccacctgcctaccagcacctccacttgaccatagttccctttaactctttaacttcatctgctcaaaacacttttttaaaacatctcaaatctcttctcccatgatctctatctgagctcatgatatcrccatccacctgcttccccaagcccaagctttggaagccacagtgaatgtgaggcactattggctaacatgtaacagtgaccatgygacagtaattgttaacagtgtgcaagagaaaactgtaaggctggctgctaaatatgcctgataaataactgtcaacttaacgctggtagtatgattaggaagaagagtgaaagggaagaataattgggttctgagagagcctttgttcatatgtatatgtcatttctaattataaatatggaaatttgattaattctgtttttcccactcaactctaagttctataagagctggacccatccctgttttgctcatcactgcatgcccagcacctaatatagtgcctcacatatagtagatgctcagtaaacacttggttccaattccctatgaccaaagctgacaattcagactgataaagacaaacattatatgaattatttatgtacaagaattagtgtatctataaatgtattgtcatgatgtacaaatatacagaaaatagaaatctgctgtcttctggcattttgtccttttccttaaaatcctgcatttacaaaaataatattcactccagccttaaaataaactgaaagacttcctctccctaacccctcatctgatcatcaaattctatcaacttggtcctctaaaattcagctcaaaaactgctatctctgtgtaaagttattggctatgttccaaatgcattctgcatattgtcatgtataatagtaacatattgtaattattttagtgtctcctccttccttccctcttccaagtccaggagctacttaaagattttcaggatctcttgtgcaataactgggctgaacatagtacctgataactaattgacagtcaatacatcacaagtcaaaagaaaaaagaaataggatttgggaacacaaacataggattttgacagccacaatgaattctttcattcttcctactctgcacctgtctgtggccttttcctctaccatgttctgtcacatccacatmattatctygtgtcacagagccttccctgtgacttctgtgatgtatggctatgggcatggaatggatgtacttaacattatggcttttttattctttcttcctatttattctgtcccttatcagaagcaaagaccacaacatgtagaagtctaatacaaagtgctgaaatatgcaaagataatatatgcacaggggtgctgattaaaacattgacaaaaatgaaagaatgttgctttcaagacactcaggtctctttctatacctaagtatattattcaaccatcagaaaagaaccaactccttcctagataagagacaacagcacttgcccctacccatactaatgccacggctatttgtccatcaaagkaaatgaatggctttgtatttgaatagaaaagaggggcactctgagctctgaggtgacagataatgcactgatcagtcactctccagtgggggtatcagaaaagtgaggaagagaaagtgattctgagtagtttggattaatatttgaatctcaatctttatgaaagaaataggagcttaacttgctatataaaaggtttcagtagataatagattttttgacattgttatgcaagtagatagaatattaacctgcctggattaatgaaagcaattactaagtgctgttactataagtggaatagtttcactgtatcacaygtcctggtgattcttcatttagcccagatgatgccaggggctatttgacaaaatgtttcgtatatctaagaagacatattttgctggtttaaaccataatctttgacatttgtacccactgtggatttatgcctcttgtacactcattacaatttaagcagaaacatttttcatgagcagaaaaggaaaaatcttagatttcattagcgaaaaagccactgtccctactgtcctattgtgatatgctaatattcaccctggaaagaataatttaagaactcaagcctctatatatgcaattcaactactgtagattcaaagatggtcacaataatttatatactcaaagttatgaagggttaaagaactaattatgaaagacaatttttgtccttcttccctacatagggaaaaatttcttaaagacacaaaaatacataacaaagagaaaaattaataaattcaattacattcaccaaattgagaattttatcaaaggacaccacaaaaagagtaaactgcagagatgaagatatttgcaacacatacaaagaataaaggactaggggccagaatatatattatacaaagaactcctatagatcattttgaaaagacaggtaacatttgaaatggctgaagacttaaacaggcatttcataaattaggaaatcgaaataaaaatatgaaaaattgctcaagcttattagtaactagggataatgcaaattataagtaccataggataccattatacacccatcagttgagccaaatgttaaaatctgacaatatccaatgatggtgagaatasagaattctcatamactgctggaaggtaaataaattggtatgatcgctttggaaaatacaggcaggttgaagattggcaattctacaccacygtgatcacgctcatagaaattcgcaaacatgttcaccaggctatatgtacaacaggtrcagagcagcactattcataatagcccaaacaatgaaagcaagtcaaaacccatcaactaaaaaatggataaactgtggtacaatcatacaatgggatactataccataacaaaatgaaataactagcactgtgtacaacaacctggagaatctcacacacacacamamaaaaatgttaaatgaaagaaaaagcattaaataatatatgcaatattattccattcatgtaaagttcaaaaagcagacaaaaactaaattatgtgtgataaaactataaaagaaaattaagtaaattattacaacaagttgtggacaatggttgtctgggacagagaaagctacgatggagaagggcacaaatggagattstgcggtgcttatgatattctatttccttcatctgggtggtggctacatgaatarcaggtttatattatttgttaaactgtatattcatgtttgtgcactttttctgtatatatggtatatttcccacaggatgtttttcagaaaggttatatagacatatragactagatggtctggtaaaagaatgacaggtgatagacaaaaggcaaacaaaaaatataatcagraggtaataagtgctatgaagaaaagaaaagcaggataggggaataggttgrgaagagagaactatttaacggcttgtagcaccaggatctccatagttaagcctcatggagtgccactgtgaacacagcaaaggcaatgcaaattgaatgcacaatgaagtttcaaattgtgctgcatgcaagrtttcataaagtccacaagagatggctccaacaacatcaaaagtccctgacarataaagatctggcagcattagactgtcaacaattgaagaaaagaaaataagaaaagctgtctatattttgggtgcttcatgagagaataatcttaatgatgaaatwtttttaaggcttagaaaactaatgaagccctcaaatatggtgtgagatctctttataagaatgctgcaagagtcakatgtgaagcgaaggctgttgtaatatgccttttttatagaaaaacaatcatgctataaataacaataaagcatttttaatttgaaaaattagttgactgctatttttatctagatagatagaccaatagatagatagatagatagatagatagatagataggatagataggatagataggggtggttttgttktttttttttttttttttttttttttagacagagtctcactcttttgcccaggctggaagtgtggtgacacgatctcagctcactgcaacctctgcctcccaggttcaagcgattctcctgtctcagcctccccagtagctcagagtacaggcgcctgccaccacaccyggctaatttttgtatttttaatagagacggggtttcaccatgttggccaggctggtctcgaactcctgacctctagtgacccgcccaccttggcctcctaaagtgctgggattacaggcctgagccatcacgccaggctgtcaataaacttttatgttgacatacttcaatagagtttcagwcaatccctcttttccctccctaatttttcctatttgaaaagaatccgctctctcctgttttgttcagcaaaatgtaaaacattgataagatttatacctttttgaaaaaaatagactatggttgagcccatacattcgatgaacatttgttcgtcacctactatgtgctaggctctggggagaaacaaaaacaaatgaaacaagaatcaccaagactcaagaagcttacaacgaacggcgaataaaaaggctagaaaaccactggcttcgggaatctgtggtaagtgctattcaaaatgggtgtccaggccaggcgcggtggctcacgcctgtaatcccagcactttgggaggctgaggcggatggatcatttraggttaggggtttgagaccagcctggccaacatggtgaaaccccacctctactaaaaatagaaaaattagctgggcgtagtggcgggcgcctgtactccgagctactcgggaggctgaggcaggagaatcgcttgaacccaggaggtggagggtgcagtgagccgagattgcaccactgcactccagcctgggcgacagagcaagactccgctcaaaaacaaaacaaaacaaaaagtgtgtccaaaggaagggcctctaaatcagatttctcatggggcattagaaatatagaattttgtttttgccatatttttcatacaatcttagcttaataacaaaaacacaaattagtcacaggcagtcatcaggacaaaaaaaaatcagaaatataaattctgaataagctataaactagataacaaggccttgaataattccattttcttaactttaagttgatatctaataagacaggagtgcaacatcgaaacgctgtcttgtttgaattataaatcttcactttaaagcggcagatggagcgccttatgttcacagaaagcaagccaagggctcagaaaaggtaaccactccgccaaagggaaagacacaaaacagaaaacatggctctgaacttatatgccctcgaagggttaacagatgcctgaatttgtgagaattttacagaattagaatggaactagtacaaagtcctccaatgtgttttcctttctgggtcatgcaaacacgtacgttctacggaagatttcaagtacaacaaaaaaatccgggtttcccatcacagaacctaagtcgccgcatttcctctggtgtataacatgttgttgatgcagttattgtcctttgttttttttttagctctgtttccttaaatgccaaaactacacacacgaagtatgtaatacgaacactgtgacaatgaggagatgcaagtaacattttattcacctgaagaaactaaamcccaacattttgctttttgtctacagacacagttcctgtaaacacagaatcaaatacggtgcgcgtagaaaataaaaagatcctcccacactatggcacttccttcaatggaggctactcgggaggctgaggcagcgaattgcttgaacccgggaggcggggttgcattgagctgagattgcgccactgcactccagcctgggcgacagagcgagactccgtatcaaaaaacaaacaaaacaacaacaacaacaacaaacaagatgttgtattcttgacatttaggcawtttctaaaatattacattttttataaaatttctctgccatggaaaaaaaatccacctttgccagagcaaaggaagccagtgaaagaagtaattcattgggagtataattataagcatttagcattgttttgaacatgasaaaaaggcaagctttcatctaacagattttcataatctcaagaaataattcatctgccatttattttcagggaaatgtggtgcttcttggaagaagcccagaggatcctgctgttaaaccaagacccatgcaggaaaaaaaaattatccactccacaataacatggcaggtaacacaaaggcagtggtacttctccagccgggagaggccccctcaaaacaggaactcctgccggctgacttaattacagcacagcaagggaatccactacaaaggcaggagccactgaacagagagctgytgagatccgtcctcggtacacggacagatggttctgctgcttctcggctggtataagaccttatagaagactctgaaaactgaaacacgccaacaagttttctgttaccagtattttttttttaactctgtgcccaggccaggmgcggtggctcacgcckgtaatctcakcgctttgggaggccgaggcgggcggatcgcgaggtcaggggtttgagcatcctggccaacatggtgaaaccccgtytttactaaaaatacaaaaatcagctgggcgtggtggcgcttgtctgtagtcccagctacttgggaggctaaggcacgaggaatcgctcgaacccaggaagaggaggttgcagtgagccgagattgcaccactgcgctccagcctggcracagagcgagactccgtctcaaacamacaaataaacaaaaaaaccctttgtgcccaccgtatgctakcgtaaaagtaatctgaatttgaaagtcaatcagcaagtatttactgagcgacgtgtaagggataaggaaaaggtctaaagcagcttatctagtttagggacatggattaaactctgatttaattttagggcttttgactttttcatcatcacacacagacacacacaaacacacacacacaaaattagaggagaggccatgaaagcactgccttgaaaattctcagacaaatttacagaaacagagtgagtccatgtaagaaacctgaccttatacacagggacgatgcactgaaacctgtttcacagcaaagggaactgaaagtttytaaagcagtcaccacagcagccacgtggcttagaacacaaaacagacagccccctaaattatgaagtcatacacacagctgctaaataacagcactgagtaaactctatcttgtaaaaaatgtttaaacaaaatgaaaatttaactacaaacattatttatggaattaatatacatgcaaattttctgcatgcaaactctaccttcctggtcactttgaaggatataaattaatcaaaatcacaaaattcttcaatcttatrtaagaatgtacaataatgccactgaagcaatttagaacttacaatgcccatagcatagaatctattatatatagatatctaattatatctatctaaacacayacatatacagatgctcctcaactgatgatgagattatgtcctagtaaacccatcatagtttgaaaaatatcataagtcaaaaatacatttaatacgcctaacctatcaaatacagcttacttagcctcacctaccttaaacatgctcaaaacacttacattagcctatatttgggcaaaaatcacctaacacaaagcctatttaaagtaaagtgttgaatagctcatgtaatttgttgactggtgtactgaaagtgaaaaacagaatagacgtgtgggcacccaaaatatggtttatataaagtcaaaaaattataaagtcaaaaaataattataaagtcaaaaaatcattaagatgaaccatcgttaagtcagggaccatctgcatacatatataaatacatacacatacatattcctatttaatactgatatcaactctataaactaaaaatgcacagcttggtgagtctgaatgagttaatatatttaaagcacttggagaacttctatcaatacaagctttgaagtcacactgcctgactgagattttggttccatcgctagacaaattaatttatctgtgctgcaattttctcatctatgtaagtggaaataataataaaagcctctacttcataggctaatgaggcatatgctatctggcatattaaatatctagcacaatacccagtatgtggtaggcaatgaacacaagcgagctatttttaaactttatatatttggccaggcacggtggctcacgcctgtaatctcagcactttgggaggccaaggcaggcggattgcctaagctcaggagtccgagaccagcttggccaacatagcaaaaccctgtccctactaaaaacaccaaaaattaaccaggcatggtgatgcgtgcctgtaatcccagctacttgggagactgaggcaggagaatcgcttgaacctgggaggcggaggttgcagtgaactgagatcgcgccactgcactccagcctaggagacagaaggagactctgtctcaaaaaaaaaaaagtttttatatttggcctccagtaatggaggcctttttacaaagggaatccgaattaaaacttgggtctcctgataaatttgagaatactttctacagccatgctgctgggaaccatacaaaggaggcatttaatcaaactgatacgactaagtattattatgatacagtagcaaaaagtaacaatggttgcacatgatgacactaaatgccaaaatctttacatgatgtcagaagataaggtcaagtgctccttcagaacatatgccctacaacacgttaccttgttcttttctgctatgattctctttgtaaaaagttatatatctgagtaataaattgctacactaagtatctgagagtactgctttgggtcacaaaagcaaaataatttgcttataaaaacaattaaccttaggccaggtgcggtggctcatgcctgtaatcccagcactttgaaaggccgaggcaggctgatcacttgaggccaggagttcaagaccagcctggcaaacacggcaaaaccctgtctctactaaaaatacaaaaatcaaccaggtgtggtggcgcatgcctgtaatcccagctactcaggtggctggggcacaagaatttcttgaacccaggcagtgtaggctgcagtgagccgaaatcacaccactgcaatccagtctgggcaacagagcgagacactgtctcaaacaaaacaaaaacaaaaacaacaacaacaaaaaaacytaacttaaaaatactaaatattcagtgaaaactagagtcatgctaaaccaaaacagtgttttagctccaggtattaatggccacttctggagccataagcaaagctgataatatagctcctaaataaagaactggaatatggytggcaaagaatcaccttcttaatttcttaagaatgttcaactctggcacaaagtggacaaggtgagtatgggtgaatatccttctagagagatragactagaagactgaggatctacagaaggggatgcccagttattctctctccccctactctcgaaactcactcattaattcatgtatttatcaaaatggcatgtcaataccctgagcagccactcaggacaggactcctgcattgctacaataccgatcccccagcctctcctctgcccctcaacctgccttagctgctgtcattttatctacactggacaggacctgtccatttcctgtcttccttccaattatgtttgtccatgtctggacctggctggttgttccctgcagccccttgctggttaccttactctgacagtgatgcagccagaggcactaaagggttagcccaagggccccagccctgcatttggcccatgaaggggcttacgatcctcnttttctgggtttgggtgatgttagaggaaagtgccccagcccagcaccattcctttttgcttctggtttggagctctagaccasagccttagttctggtcagttgttaagtaattatttaacagtgtgacgttcagacctgcatgacatctatacagtgtccagtaaagaaagagaaagccatggtccctaccttcaaaaaagaaaaaatgccacgtaggtgcttggtgatacaaagttgagtaagacacacataatctggtggaggaaacagacctgaaaatcaataatcacagaacagtggaacattatagttgcctcagtctttacaggggaacacagaggagcaccagctaaagaatgtgtactttggacaaagttatatgccaggtactcctatatatatgatctaatacaaaaataaacatcagtcctatactgttagatgaagaaataggttccaagatttaagaggcagaactgagaatgcaagtcctgcrctatcatcctccacacgcctctcctttgtccctctccaccttccttccccctttattttcctttcctagaagggaaggagggtgtcagcatctcaatcaaragtcaaaactcacatgtcaacaggtaagtgacagatgatgtaaatgagggaagmacagagatagtgagataactcagatgagatggaatggtggggactctggtgaattagagattcacgctctttctaaaagaaaggtgaaggttcatgcctgtaattccagcmctttgggatgtaaaggcagaagatcgcttgaggcaaggaatttgagaccasgccagccaatatagtgaagtgttgtctctacaataaatttaaaaattagccaggtgtggtgatgcmcacctgtagtcccaggtactcasgaggctgagatgtaaggatcmcttaaacccascaggtctaggctgcagtgagctgtgttygtctcactgcactccagcctaggtgacagcgcaagagaccctgtctcaaaaaaaaaaaaaaaaaaaaaaaaaaaaaagccacgcatggtggctcatgcctgtaatcccggcactttgggaggccgaggcaggcggatcacctgaggtcacaagttcaagaccagcctggccaacatggtgaaagcccatctctactaaaaatataaaattagccaggcatggtggcatgcacctgtaatcccagctactcaggaggctgaggcaggagaatggcttraacctgggagatggaggttgcaatgaactgagaccacaccactgcactccagcctgggtgacacagtgagactccgtctcataaaaaaaaaaaataaaggaggggagmggggaaggggaggggaggggaatggaggggaggagggggagaggagaggagaggaggactcattcacctctagccctctgatgccacacagaaatgtggrcccaaggctctgtgaaatcttccagttttttgagactggcctgaaatcctgtttatgtgattctgtttcttgaaaaaagcagctccctaaatcaaaatgtttatcaatcaccaagcctgactgtggccacgggataycagcttgcaatatctgctgtagaccaaaggtggccaggcttgtcggcattgctcccgacactatggtgtttcacttagaaagtttaacaaccacacagtcatcgcaaaacaaaccacaggactggtgccactactgttatcaagactttattctaattctgaggtattaaggagagaggcacacaatgacagagtcgcggtgctgaaaacacctgactcacttccttgacatccctaccaagtagctttttggctctgcttaagcatcatgatgagccaacagggaagtctctctctcctcagatggcctgctcactttcactctgctcttagacattagagaaggtctttttttatattaagttgacctctgtatccctgtatctgccacccattggtctctggaccactttacctagaacacaatatcccaggagcaagaaaccaacgttatcatcacattacaaacagtgtttctgttcatacaaagatcatatcagctttttacttggactarcacacttgcctccctggccctcggggaccatagcatgatctagcagtgccagtgagttaacaaaggcttaccaagttccatggtagggcacagggagagctgttatttccatcagtcacatgttttactttaattctagctcaagaatatatttatgccccagtctccatgttcctaatctacagtgcacaactgcttcctataaataattattttaactttggtttaaaaagtactggcatccagccaggcacagtggctcaggcctgtaatcccagcactttgggaggccgaggtgggtggatcaccaggtcaggagatcaagaccatcctggccaacacagtgaaaccccgtctctactaaaaatacaaaaaattagccaggcgtggtggcaggcgcctgtagtcccagctactcaagaggctgaggcagaagaatggcgtgaacccgggaggcggaggttgcagtgatcagagatcgtaccactgcactccagcctgggggacagagcaagactccatctcaaaaaaaaaaaaaaagaactggcatccatttcagaaactggataaagttggtttcacagaatgttaaaaagtatccatggctagtttgtttgactttataggaataaaaatgacttaacagtttagctttataacagaaactaagaaatatggctccacacttaatatgcatcatgaaaggtagccaacttaggtccagtaaattacatcatagagcattataactatagaatgctgcttgtttttctggcaaagtcatgaatcccttccaaatgagaaacattttggcagactcatcttttttttttttcccagatggagtcttgttctgtcgcccaggctggcttgcagtggcacgatcttggctcactgcaacctctacctcccaggttcaagtgattcttgtgcctcaacctcccgagtagctaggattacaggtgtgcaccaccatacccgkctaatttttgcatttttagtagagatggggtttcaccatgttggtcaggctggtctcaaactcctgacctcaggtgatccacctgactcagcctcccaaagtgctgggattacaggcatgagccaccccgcctggccaggagactcatcttaaaattatttttcagacaaagtatcaatattggtatccacaagaattttcaaattcaaataagcaaatatttcgtctcctaaatttaagtgtgaaatattattttattcctttttatatctccttatcatatgatttctttacattcttcctagctccttataagaaacctaggagccatcctgatttctccaccttcttttgcctcccatatttaattaattagcaaatctttcaacatataccctgaatcagatcacttcttaccctcaagtagattctctctcagtctaagccaccatcatctcttacctgaactactgcaatagcctcctaacttggctcactcttycactgtstgcaaggartaaccasagtgatcttttaaaaacatgtrtgaaatcacatcactcaggcggcttaaaataaaatccagacttctcaccagggctcagagaacctgcttgctgactccctctccactgcccctctcacattccccctccccaacaactgccacactggagtcttttggggtcctggttgaaggcagtactgcccccttggcgttggggcgggcagtgggtgtctagaatgtgtgactgtttttgtaatgacagtgactagggatgctaaccgtcccgcattgagccacacagtcccacagtgcacagcacagttccgagccgcaaaggcttgcagtacccaaaatgccatttgccattttcacaaaaacccagttcattctcatytcaagatctttttttttttttttttgagacagagtctcgctctgtcgcctaggctgcagtgcagtggcacratctcggttcactgcaacctccgcctcccgggttcaagcaattctcctgcctcagcctcctgagtagctgggattacaagcgcctgccaccacacccagctaatttttgtatttttagtagagacaggttttcaccatattggtcaagctggtctcgaactcctgacctcatgatctgcccaccttggcctcccaaacagctgggattacaggtgtgagccacagtgcccagcccccatctcaagatctttacacttactgttacttttgacccaggaactgaaatattttcccatcttgctcaaatattttcccaccttgctccttctgaccacttgggattcagctccaacatcatctcctctgaaaggccatgcctggccctcatttctcaaatagccaccccagccagcacccccgccagtcttgttattcctccaccttgctttatttastttttagcacatatcaccctgtaaaattatgcatttacttgcttaagcttttgttgcctttctcccccacaagtgtgtcaacccgctgagggcaggaactttgtaccctggcacctaacaatggctggggtataccaagcgtttagtcatcagatatgcagtggataaatgtctccataatttttcttatttacgatcaggaatttttttaaatcttcaatttgggagtgcagtgtctcgtagttatcatttctagttattttttcctacaccaagttcccctttttgtgcaacagagttgttttacattccacaatttttatttttgcagaggacagagaggtgatggtaaacttaaaatatcccaaatcaccatgcaactgtttcacaaaatgtgaaggagggctttttatgaacacagtatttttgtaagcctcagagtaaatgtgtaaattctggctaactgaccagtaaagctatggtaggaccacttctgggggcaataatcatccgatgagagagcagctccctttactggagccaccgaaatagaaaatgagcaccaccttttgtcaaaaaggctcacaaatcttttcaagaccgagaagagctgaaatatacggcaacagaaaaataatttttttaaaaaaatcacactttgaaagcactaaatccaaagttcaaaccaggtctagaagtgaattagagataagtgataagggggatgtataggcttacaactggactttaaaatatgattttatttaaatgtcacggagcagcctggcgtggtgactcacacctgtaatcccagcactttgggaggcygaggcgggcagatcacctgaggtcaggagttcgagaccagcctggccaacatgacgaaaccccgtctctactaaaaatacaaaaattagccgggaatggtggtgcatgcctatagtcccagcttgagaggctaaggcaggagaattgcttgaacccgaaaggcagaggttgcagtgagctgagatcacaccactgaactccaacctgggcgacagaaatagactccatctaaataaataaatacataaatgtcaaggagcattatttatttaactatatagaagcctggaaagatatgttaaaaaaagaatgagcatacttcgattacttttatgttccacacacatatgatctatgctcaaacagggtctaaatgagatactagatgttaaacagtgcttctctctaacgagtggtatttgggaactgacatacaatcacctatggcttctgtgagactgctgggcccaagcactgtatgcattttagatcttaatacagactgccaatccacgttctcaaagttcacagcaattcacacttctacctctacacactttccgacactgtatattatcattatttaaaaattttggggccgggcgtggtggctcacgcctgtaatcccagcactttgggaggctgaggcaggcagatcacgaggtcaggagatcgagaccacggtgaaaccccgtctctactaaaaacacaaaaagttagccgagcgcggtggcaggcgcctgtagtcccagctacttgggaggctgaggcaggagaagggcatgaacccgagaggcggagcttgcagtgagccgagattgcccagtgcactccagcctgggcgacagagcgagactccatctcaaaaaaaaaaaaaaattttgtcactgtatattatcatatttaaaatttttgtaaattaatgggaaaaaaagtaaacttccttaatttacattcactgactactcagattgaacatctcttcccatttactgatttacttgcaaatcctctctgactagttgstctttgtccttttttcctattgcattatgttgttttcaataaactcatygtacctatattttaggaataataattgtttgtaagtcatccacatcgcactatttcttccaaactgttctttttcatttctaaaaccaaataagtcagtcctcccttttgattctaagttttgtatcttgcttagggaaatttcctcccagtgacatttaataaatattctcaggaattttctactgagtagaattcatttttttaacaaaccattaagtccttggtattgcaatgtaaagttaatgaagggaggggataaaagaagatgagaaagaaaagggtacagggttaagaaagagactggaaaagtcttatttcttaatgttgaagaaagagttttaggccaggtgcggtggctcatgtctataatcccaggactgtgggaggctgaggtgggaagatcggttgagcccagagtttgagaccagcctgggaaacatagtgacaccttgtgtttacagaatttttttttttttttttttttttgagatggartctcgctctgtcgcccaggctggagtatagttgcgccatctcagctcactgcaacctccacctcctgggttcaagcaattgtcctgccacagcctccacaagtagctgggactataggcatgtgccaccatacctggctaattttttttatttttagtagagacaggatttcactatgttggccaggctggtctccaactcctgacctcaggtgatccgtctgcctggactccacaaagtgctgggattacaggcataagccaccatgcccggcctacaaaaaatttttaaaaaattagttggcctctaacccccagcactttggggagctgagtgatgactactcgannnnnnnnnnnnnnnnnnnnttcaagaccgagaagagctgaaatatacggcaacagaaaaataatttttttaaaaaaatcacactttgaaagcactaaatccaaagttcaaaccaggtctagaagtgaattagagataagtgataagggggatgtataggcttacaactggactttaaaatatgattttatttaaatgtcacggagcagcctggcgtggtgactcacacctgtaatcccagcactttgggaggccgaggcgggcagatcacctgaggtcaggagttcgagaccagcctggacaacatggtgaaaccccatctctataaaaatacaaaaattagccaggcacaatggtgcataatcccagctactcgggaggctgaggcaggagaatctcttgaatctgggaggcagaggttgcagtgagccaagatcgtgccactgcactccagcctgggcaacagagcgagattctgtctcaaaaaaaaagaaaaaaaaaattagttggacatggtggtgcatgcctgtagtcccggctacttgtatggctgatgtgggagggttgcttgaacctgggaggctgaggctacagtaagccaagatcgtgcccttgcattctagcctgcgcaacaaaacaataccctatcttaaaaaacaaaaaaaggaataaaaagaagttttaaaagattctaaagtaacaatacatttctcatattgatatattatgacaggaaaaaaactcaagtattttggcttgaaaatataaactataaacatataggaaaaattttggtttaaaactaagcacaaattacrctggttttttttaagaaaaggaacaattatatttttcataatactaaaaatgaaataatgtaaagtgataaaaagcaattaattcctacttaggtaatatttcatctcagccttttccattaaaactttaacttttatgtgattatgaggttatttatacctaaagagaccatttatgtatatagagaattagtacaggcatttatttttccagggactgagataagaggaaaataaccaagggaagaatttgttcagcactagaggcaatatttcagatgcttaagtggaaatacgcatatgcttcctcaaaaatcacaaatagaactgttagattagaacttgtacctttttgaatactttatgaaaagcccttaaataatatttttttccaaagtgacttcttaagaattagctcaggccgggtgcggtggctcacgcctgtgatcccaacactttgggaggcggaggcgggcagatcacctgaggtcaggagtttgagaccagcctggccaacacggtgaaacccygtctctactaaaaatacaaaaattagccgggtgtggtggcatgcacctgtaatccccgctacctaggaggctgaggcaggagaatcactggagcctcggaggcaraggctgcagtgaactgagatcgcgccactgcactgcagcctggatgacasagcaagagtctgtctcaaaaaaaaaaaaaagaattagatcacagccccaataagatttctrgtaacatctaattagacaattgagttcccttgctggagcttgtctgctttgcttataaaaacatgtgcaaagtctaagacaaccacaactagaccctcaatatcctcctccttaatgcttattggggaaacggaaataaacagtgtgatctgccttcgttcacacttgtcacttccttgtaaatgttgagagctttccaaagcaaagagcctatgacagcaaggaaggtgtccaaagccagtgactcctggggaagaacaaaataagaagaattattccatcagctaccaagaacttatattaaaatggtaagagtaagacagtgtggcatttgcacaagaatagaccaacaaaccaatgtaacagaatagtccaaaaatagacccatgcatatataaaaacttgatttatcacaaaacasacattggaaattagtgcaggaaagatcaactgttcagtaacctgtggtaytgagatcactggctaattttattggggggtggggtggaatcatgggaaaaaatttaaattagatttctacctcacaccaaacacaaaamtcaattccagggagaattaaagatttaaatataaaagtcaaaccakaagatattcagaagacaatataggtgcatgtttttatgacttcatggaaaggatttcttaagaatagaaaaatacaacctagaaacacaaaasagtgataaatcaactaaattaaaattataaacttctcttcttcaaaggataccacagaaagagtaaaaagacaacccatggactaggaaaagatatttccaacatatctaaataactaaaaaggcttagtatacagaatatgagtataggtgtatactcttacaaatcaggaagaaaaatgtaaacaatccaatggtaaatgagcaaagacatgaaatgcatttcagtgcaggatagtcataaatgcctgtaaatactgaagaggcacgacctcataagcagccacaaaaatgcaaactagagccacaaggtatgaagtgatgacraggatgtggagccaaaggtgcctggtgcctgttccttgtatatttatatttttacaattttaatttctgcagggtctttttctttttttttaaacagagtctcactctgtcgcccaggctrgagtgcagtggcgtgatctgatctcggctcactgcaaccttcacctcccgggttcaagcaattctcctgcctcagcctcccaagtagctgggattacaggcttgcatcaccatgccaaactaatttttgtatttttagtagaaacaaggtttcactatgttggccaggctgatctcgaactcctggtatcaagtgatccacccrcctcggcctcccaaaatgctaagattacaggtgtgagccaccatacccggccagcaacttttttttttttaagaatactatctatggtgactatttctagcccrccatgatagcgagtgtcttcaaagagagctgcaggcatgaccaacctgcgttcactctcattctaatcttaagatttcatcctttctacacamactcggtgtgaacagtctgcaaaccgtggtgasagcccattggtggggtatgaagtctgagaagaggtatacaatttttcccaccacatccagttccccccacaatagttgtagggtcctctggagcccaaatctggggagattctaggctttatctcctatttcctctactctaagtggccggaaaactaatgctcagtattgaaccaatactgattcagcaaatgcattcaaggcaaaagtcagatttgatgcactgcttattttttttttttttttttgagatggagtcttgctctgttgcccaggctggagtgcagtgacacaatctcagctaactgcaaactccacctcctgggctcaagcgattctcccacctcaggctcccgagcagctgggactacaagtgtgtgccaccatgtctgcctaattttggcattttttttttttttagagacggggtcttgccatgttgccccggcaggtctcaaactcctgagctcaagtgatccacctgccttggcttcccaaagtgttgggattacaggctgagccactgcgcctagccaacacactgcttacttytaagagttcctgctttgattcagttttagcctctgagcatccttaccaagtagtcractcattcattccatttaagggctagttttttattgcactcagcatttttaattgttgctakcaggaaggttagtcagatgtcttagaccacaggaccactgtattgccagaatctaaagtcaaaaakccgctttaaaacataaagctaattatgtcactctcctgctttgaaactttcaatgcttttctcatgatatacagtgtaaatctgagctcctaagtgctcttgaccctgttcaagaggcataagggaaacttcccagaggagaaagaaaatggaggttaaacttgaaccagcaggaacagagagaaaagaggagagcasagaaacagccaatgaatcctaattaacaaatcaaatgggcaggagaatattcaagtctagtatggaaagagctcaacattcaagggtctgatcaaccattagaagctcagtcaagactgcagggcatcaggggctctcaaagccaagagtgaagaatcagaggggtctgtaagagatcagggacattgggagcagcatctatccaaccacgcagaaggacagtgggtgcccaaaccaaagggccaattaggcaacctggtcacartaggagttagactgaggagctgccwctccctaattcacaggagcccagaaggctcaaacagatttaaaayayacaaaggagggcatgggagcagcagatcctcccagaccccttgttagtcacaggtactcctggtctggctctcaaaagcaaggccttcccaactttgttacagtcagctatgctgaagccttggctggcagaaactgacaagccccrtaacacagctttccccatctggccccaaaccatctctccaggctcacctcccctctcaccccattccatctacctccctactgcaacaacacagacactgacaagcagcactctctccagccttccctcytctacaggctgtttcatcytcctgaatgactttgcccctcttctctccccggaaaatccctacttattcttcaaagccccctcaaatgttgcctgatcaggagattactctgattcaagctgagtttgctaccctccactcctatcgagcacagccaacayattattattttattattattactattattgtcaccatcacatccatcatttatcaagtgcttgtcatgtgtcagrtactgtattaaatccttcacatgcatttttccttaccacttatagttattatcattctccattttactgaggaggaaaccaacgttcacatcatttcaaatattggcctaaggtcacatagctgctaaagggatttcaaacacagtctgttcttaactcaaaaacycatattgtttccagtaaaatatcacaattcatttatctctgttgyctycaacaacaaataagtaacttaaaaataaagatcacgtcttcctaatttttgtatagcctgcataatacctggcatatagatratgctctctaaagatttaataaataaatgaataacagacattcattccattttctcaggaacttgaatgacaactgtagcamagaaccagtaatacaatgttgagactgtctttatgtcccctttggctagggtctactggatagctcgcattatggagaataaaggacagagagcacaagacacttaggtaaagattcaggtacaaggaaccaggcaagtcagcgcagtgtcttttgagtaaatgggtttaacctaggcaaacaagtggttatttttaaaacaagtggtctactccaacctcttttcaaataactggctgtcttttttttttttcttttcagacggagtcttgctctgtcgcccaggatggagtgcagtggcgcaatctcggctcactgcaacctccatctcccaggttcaagckattctcctggctcagcccccgggtagctgggattacaggcacctgccaccacgcctggcttattttttgtatttttaatagagatggggtttcaccatgttggccaggctggtcttgaactcctgacctcaggtgatccgcccgcctcagcctcccaaactgctgggattaccggcgtgcgccactgtgcccgaccacaactggctgtcttaataacttcatctttawttttttcccagcctaaatcagtgcaataccataaccayctattaaacacctgctatggtgggaaggaagagaatgccatatacctcatgggatactgagttaatgaaaacttcttttccctgaagggggtcttagtcgtgcttgaatgtatgcagaggttatctcaatgaaggaaaaagtgcagaacattgtgacttttctgctcaaagctctctgaaagtttcccatctcactcagagcaaaagccaaagtcctgataatctagaagctgctacatcatgtggccccctctggtctcacctactattcaccccctaactcagtcccctccagccacatggcctccttagngtgtcttctcaatgaggctttctctgatcactctattgaaaatcataaccttcttccacttcacatgccatctccctattcccagggtttttyccccccatagcattttggatgatctaacgtgctatctacttaactcattcattttgtttatcatctctcttcccccacaaaatgtaggctccgcaaatatggaccttctgttgtgtttgttctctgctgtattttcaacacccaaatctgacactgaatcattattgtaggaatgaatgaatgaaccattagttatgtttatacaatgacctatctgctcacagcattactttgaaatccatttttcaaatttctgaatcacactggcatcacaaatttaaatacatcttaagattttttcgyttggcattgattaatgatgactaaaatctcattggtctagagctttcttcgttgcttttttytgaaaagacttactgtgaccattatctaaaaatgtaattgttgttttgagaccctggtctaaattttagcaaataattgcttgtattgtctcaagcacttcaacatgatttacaaaaatatattacttattatgccacaatgaaaaatagcacctgattataaaacatgactggaaataactacagtaattaagatagaagacctgagaatgctcttaagaaagggttctacttctttttttgttatttgtttttttttttttgaaacggagtcttgctctgtcgcccaggctggactgcagtggcgcgatctcagctcactgcaagctccgcctcccaggttcacaccattctcctgcctcagcctcctgagtagctgggactacaggcgcccaccaccaagcccggctaattttttgtatttttcatagagacgggggtttcaccatgttagtcaggatggtctcgatctgtgttaggatggtctcgatctgtgttaggatggtctcgatytcctgacctcgtgatccacccacctcggcctcccaaagtgctgggattacaggtgtgagccagcgcgcccagccttaagaaagggttctacttctaaattattgtaaaatattaacaaactgaggctgggtacagtggtacacacctgtaatcccagcacctttggaggctgaggcaggtagatgtcttgagtccaacagtttgagacgagcctgcacaacattgtgaaaccccgtctctactaaagatacaaaaacttagccaggcatggtggcacacgcctgtaatcccagctactcgggaggctgaggcaggagaatcacttgaacccaggaggcggtggctgcagtgagctgagatcacgccactgcactccagcctgggcaatagggcgagactccgtctcaaaaaaaaaaaaaaaaaattctatggagccaacaattcaaaagctatttataatcagtttggagcacattatattttttccttttttttttytctctctctctctctctctaatggttgattttccttcctatattttcttgagatttggagcttaaagaatctaagcacaccaaccttagcagaaaraaagccagtttgtgatttaaaaracaaaaaaaaatggtcatgcgtgccaaararataatctgcaaracaatagtatctccagctcaacaaaagaagtcatgtacaarattaaactcatgctgtttccatccagtaacctcacacaaggtcaacttcaagatatctcctaaaaccatctagcaagtagcaatcagtgaggcttatcaacagggcccatccttcttacaatataaacctctttcagtttcaaaaattgatgactaagagctcttcaatagtggtatttgattccacattactctgcagtatgcaagagaaaaacaaagacccatcattctgaaccttctatcacagacccacgccaaactgcaacagaacattcttaaggaaattgctactgttattgtacacatattgctattgctcccataaatataaacaggttctcattttcaattctatatttaaagatagaaacacagcagttaaatattacatttgagagtagtgctttttctccttaaaatgttggaaaacagtaaagatgtacaaccaaaagaacaactataagtcaccaagaagttagagatcaatccctcaaaaaaaattctttttaaatattctatttacaaatgtgtaaagttggcataaaaactgcaaacagaataaaataaatagacacaataagagagaacttttaaaagacactttaaacagtactcaagaatacaaaattaaatgcactcaaagttaacatatatctctgtctaatgcagttaagtttttgatattttctgttttcaggaaggatttaatattttcattttcagaaagtagaaacaacaaattttaaaagactgtgcaatgaaggtttatgtattagctcataacttcccagttttttgttttgttttgttttgttttgagacagagtcttgttctgtcgcccaagctggagtgaagtgtcacgatctcagctcactgcaacctccacctcctgggttcaagcaattctcatgcctcagtctcccgaatagctgggactacaggcgcatgccagcatgcccagctaattctgtatttttaatagagatggggtttcgccacgttggtcaggctggtctcaaactcctggcctcatatgatccatctgccttggtctccctaagtgctggcattacaggcatgagccactgcacccggaactagattttcttactaaacacttctacgcccatggggtcatttagtcctcaagttggaaatatagaagaggggttctttaccctggctgcatctctaagggaagtgggattcacatgctgaagccaggctccacttccaatgagtgatttaactctcccggagtggggtccaggcagcagtagttttataaatcacccaggtgattctaacatacagtctgtattgaaagtcactagttcctacccacctcttctcagagaagacctcagggagatatccaaggtctgctcaaacatttccaatgttgagacccaatacctcattagaaaaatccagtaggcaatacactgtgttacagaatggtcatatttcaaatatgaatggtcatttttacagagcatggtaacccatcccttcccctaacaactacaacagagttcgcagatcttggcacttgtcctcttcttaaaaatcacattccccagtctccacatgactggctccttgtcatcattcaggtctgggctcaagtctcacctcctggggaagactgcctgatcacgctttccccagccagtctgtctcttccctcatggcacctctcacaactgaaatatgtgtggatgttcgttgactctcttcccagtmtgaaacataagctccacccaggcagccccattgggtctgtcttgttcaacgctgtatctccagcaagtggcaccatgcccgacacagtagccactcaatacaaatttttgaatgaataaatgaaacagatgaagaggtaatgggcaatytaaagcaaaaagaaaacatcagagtggtagataacgtaaatacagtcatccctcagtctgggtgagggtgtgggggttccaggaccccctgcagataccaaaatccacagatgctcaagtctytgagataaaatagtgtagtatttgcatgtaacctacacacatcctccagtatacattaaatcatctctagattacttataatacctaatacgatgtaaatgctatgtaaatagctgttatgctgaattattcagggaacaatgaccaaaaaaagcctgtatacgtttagtaccgatgcaattttttttccaaatattttcaatccaaggatgcagaatccaaggatgctgaacccacagattctggggcctgactagttgacaatgcagattataaaatattggactaggccaggctcggtggctcacacctgtaatcccagcactttgggaggccgaggcgggcggatcacaaggtcaagagatcgagaccatcctggctaacacggtgaaaccccatctgtactaaaaatacaaaaattggccaggcgtagtggcgggcacctgtagtcccagctacttgggaggctgagacaggagaatggcatgaacccagggaagcggagcttgcagtgagccgagttcgcgccactgcactccagcctgggcgacagagtgagactccatctcaaaaaaaataaataaaataaaataaaataaaataaaatattggactaagcgggccggtgcgatggctcacgcctgtaatcccagcactttgggaggccgaggcgagcagatcacctgaggtcaggagttcgcgaccagcctgaccaacatggagaaaccctgtctctactaaaaatacaaaattagctgggcatggtggtgcatgcctgtaatcccagctactcgggagcctgaggcaggagaattgcttgaaactgggaggtggaggttgcggtgagctgagatcatgccattgcactccagcctggacaacgagagcgaaatatggtcttaaaaaaaaaaatatatatatatatatatatatgtgtgtgtgtgtgtgtgtgtgtatatatatttgtgtatatatatatatatatgactaagcgtaaatgacaaaatataaagtcatgcacatgcacatgtgcccgtgtgtgtgaaaaagaagattctggaggctgtagacctccctcaatgcaaccacgtagcttcaaaatgtacagtttcactgaaagctctccaaatttagagatacactcatcttaaagctttatattacccattagttttcttctgaaaataaagcaaaacataaatcaaaataaagttttgagacactgtgaaaacattccaaatgtttacagtcatcaaatagtgtgaaatgccaaacattaaagcagaacaatttaaccatgttggaaacactgctctggtggtgggaaaagtataaaaaacataaacttatcaaattatttggaacacctggaatgataaaaatcaaagaaatccgaataagaatgaaccttagagatcattctagatataccccttcctaaggacaactccccatagagtattctcagcaagtggctcactagcttctcccttttggtgacagggaattcattacttcctaagaagactgcctcattccattactagacaactacacttgtcagaaagtgatttattttgatccaaaatctggctcccagtgactcacagggccttgttctgctctctgaagccaagtacagacgcatcaatgaaaacaaacgtaacatatcagttctataacataataggtgagatcagaaaatatgaatccagaagaaaagtgagtttggaccaagtgttcaaagaaaaagggaactatgaaatggttaaaaaaaaaatgtagaaggccaggcacagtagttcacacctacaatcccaacactttgggaggctgaggtgggagaatcacttgagcccagaagttcaagaccagcctgagcaacataacaaaacctcatctctgcaaataataatttctaaaaattagttgggccacctgagcctccagtaaaaacaaaatcaggttaaaaaaaaaaaatagccagcatagtggtgtgcacctgtggtcccagctactctggaggctgaggtgggaggattacttgaacctgtgaggtcaaggctgcagtgggctgtaatcgcaccactgtacttcagtcagagcgacagagtgagactccatctcaaaattacatatatatatatatatatagagagagagagagagagagagagagacagacagacagacagacagacagagacagagacatagtacaagtgctaaaataaggtggactatcttggctagaactgagtgaccagagtggaaaaacaaaggagaaaaaatacataaaagagttgatggaagatccctgaagtctaggtgaaaattactgcaactaggcaaaactattctgtactttggaaaaatattgaatgaatttgaaatgtaaaggacaggcagtaaataagcagaacatgcagctctaaaacacagccatctcagagatttagagctggtaaaaaaaaatcatagacattatgtattgcaacacctcaattttatagacttaattaaatcccaagaggaaaaggtatcaatttccactttcataatcccctccattgtaataacaccttcactgaacattttcctcttttgtacccttttctccccacctcctgcacagcatgctgaatctgagatgttgtataagatcctaactatttcaaaactcagctttcagagggcaaagaagggataacgtaataaagcccaactgcctgaatcatcctggcttgccaccaagacccagaatggacaggatgtggtcacactgcaggactggctcttgccggccatggaaactagccaggtattatgctgatacacgtatctccatcagcagctaacaagacaaggaatcaaaatcactgctaatttacccacaaaactgtccatcttttcccctggtatcattcccctgggtctgctatggggcatccaaattccatcagtttyttttatgcaaacctacaccttttcctctttcacttaccatccatgctaccctcagggtaccatttacaccaccttcccacatccccagggtcacccaaactntgagcttctcgggttttcttccctaatcggtctcattttcttcacacttcaccagtgctttaaaaatgcagctttgtctcgtaaatacctgccttttgaaaggacatactactaaatttaaaacaccaggctgcaagatcctgtttttataaaaacaaaggaagaaaaacagcaaaaaaaaaaaaamcaaaaacaccacacacacaaaaaccctgcctatatgtttaaagacatttaaaacaagtacagaagaatactcagcaaagtgttaacaacagagacagaactgtgggagaagaagggaaaactattaatttatatatgcttttctctagcttggagtactgyaataaaaactgtcataattacacaattttaattcttaaaaagcaaactcttgaaatgaaaaatagaaaaggctgggtgcaatggctcatgcctgtaatcccagcactttgggaggctgaggmgggagaatcgcttgaggccaggagttcaagaccagcctggtcaacatattgaaactcccccgccgcccacaccccccaccaaaagaaaagaggaaaaaaacccacttaaattaaaaatgctaatgcatcttcaataaagattaaataagattgataaagattagtcagtgagcagtgaggactgttgctcccagcccccataaccctaaatggtgagtaagggctaattttccacttaggctgccttcttagaccttactgtccccagtcagcttttttgcccatcgtttatttgttttcatttttcctaatttagaaagcaatcaaactaactggtgaanacattattaaattgtttatatcccatattmtagaaattaggcttctataaaataacaaccaattgcacaaattaattttttttattaaattgaaagttagcstgtaatcctagcactttgggaggccaamacaggcggactgtccttagctcaagagttmtagaccaacctggcttacatggcaaaaccstgtgtctacaaaaaaaatacaaaaattagtcaggcatggcggtgtgcacctgtagtcccagctacttgggggctgaggcatgaggattgcttgagcccaggaggtcaaggctgcagtaagccacgatcacaccactgtactccagcctaggtgacaaaatgagaccccatctcaaaaaaagaaaaaaaagaaagttgagkatctgaatccatcatgcaatgtacgcttccccagcaaagaaaacatgaattaaaaggacttatgtggctgggcacaatggctcatgcctgtaatctccacactttacgagggcaaggcaggcagatcgctckagctcaggaatttcagaccagcctgggcaacatgtttgaaatcttctctctactaaaagtacaaaaattaggctgggcgcggtggctcatgcctataatcccagcactttcggaggccaaggtgggtggatcacgaggtcagaagatcaagaccactctggccaacatggtgaaaccctgtctctactaaaaaaaatacaaaaactagccaggcgtggtggcgcgcgcctataatcccatctacaggtggctgacgcasgagaatcacttgaacccgggaggcagaggttgcagtaagccgagattgcgccactgcactccagcctaggcgacagagcgagattctgtcttggaaaaaaaaaaattattcaggcatggtggcaggcacctgtagtcccacctattcaggaggctgaggcaggagaatcgcttgaacctgggaggtggaggttgcagtgagctgagatcagaccactrcactccagcctgggtgatagagtgagattccagctcaaaaaaaaaaaaaaaaattacccaagcatggtggtatgctcctgtagtcccagttacttgggaggctgaggcaggagaatcacttgaacccaggaggcaaaggttgcagtgggctgagatcatgccactgcactccagctggggaaacagagggagactcagtctcaaaaaaaaattagccaggcatggtggcatgggtctgtattcccagctccttgggaggctgagatgggaggatcacttgagccaggatggttagttaaggttgcggtgagctgtaacagcaccactgcactccagcctgggtgacagagagaaaccctgtgtcaaaaacaacagaaactcatgtaacttgagcatcaatttcaccctctaaaactgctctgccccataataccttcctttgtaaayagaaccacctcctatccagcctgagaagattctcagctccactgtcttcctcactttccacatatagtaacatccaatgcctgttccaccctacctcccaaatagctcttagacgtgccccctcctcacgatccctactgccactgtctgtcccaccacacagcctcaatccacccactatgaccatcaccataaccttctatactgcacttgtagacttggcagagatatttcatattcaaggtagtatgatgcagtgaaaaaaaagtgggcttcttccaagtttcatcgtttagttttgtggccctgggaagagacctaaacctctctaagacccagtttcctcttctgtataatgcaagaaacacctaccttgagtaaggattgctgcatgaattagaggygaggcttgtaaagaacctagttctaaatggagccttgtacctaagtcaatgctttattatttttattatcttcttatcagtaaaaatgagcagtaagccctctgaattgttttgaagactggtgagattaaacacagtgactgtttcatttattttcaatggctccacatccccaagacaaaatgtggccatggccctttcacaattgcatctcctgccacttgactttacgtgcattctcctttagcgtaatgaattatttaatactaagactatgcagcccttcatgccctcctctcctcaaagccrtaattacaggtggaatcttatgtgtgggcaagtcctttatgtatatttcaacatgcaagtaattaattaccgtattttcaaatttggaaagcaatatccatgagtacaactatatttaaggggatgatagggcaaaatatttgcaagcagaaagttctgaagaaaycttcaaaccatcgctgtcatacatgttcacataaacatggggaatgtgataaaagatgataaattcttgctaagttatatctgagaaataacttcgccagagacgaaatcttgatttcaaataaaaagaaggggctgggcgtgggggctcacgcctgtartcccagcactttgggaggctgaggcaggcggatcacctgaggtcgggagttcaagaccaacctcaccaacatgaagaaacgctatctctactaaaaatacaaaactggccaggtgtggtggcgcatgcctgtaatcctagctactcgggaggctgaagcagaagaatcacttgaacccaagaggcagaatttgcggtgagccgagatcacaccattgcactccagcctgggcaacaagagtgaaactccatctcaaaaaaaaaaaaaaaaaaaaaagggatagtgcaagttagagcaactgggtccagaaaaaaagaaatgtgattgaaagcgatgatgtttatttgttgaggttgtttgtaaacagtttccaaaagcatatcttaatgtattttagattttaagattaatttgataataaatgtaaatattttttctttaaaaacatcgagaccatcctggctaacaaggtgaaagcccatctctactaaaaatacgaaaaattagccrggtgtggtggtgaatgcgtgtagtctcagctactccggaggctgaggcaggagaatggcgtgaacccgggaggtggagcttgcagtgagccgagatcacaccaccgcactccaggctgggtgaaagtgcgagactccatctcaaaataaaataaaataaaataaaaaaataaaaacaatgagagaagttaaaaatcatagttcagatagatcaattaagtatwaactgtctctttatgtttattcatagattggaaaagaaatctggggtttttcttgccatatgattttgtgatttasaacttaaagatataaaagaaactaacaatctttctaagcatctgaagggaaaacaattctgcttaaagatgaatctaggtaatttaagtggcattcatcaggtcaccaatgtgacaagctctaaaactgtgtaagtacatatttttgtgttgaatgatttaactataaccctgaaaaagaatagagttggctccaaaagaaaaagctgcccaatgtccagaaagtgcttcttcagcagctggtaactatccttggtgtcagggttgacaaaataagcaagaaaatgggttgaagctcattagtgcatagtttacggtatccaagctgcaaaacttttctaaagctgtctcacagatacatttcctttttaaaatgccatcagtaatgctgaatcattcctttctaaggggctctttttcaactttacaacattttaaatttcaaccatttttaagttaaaaaaaaactctttttttttattattatactttaagttttagggtacatgtgcacaaygtgcagattagttacatatgtatacatgtgccatgctggtgtgctgcacccattaactcgtcatttagcattaggtatatctcctaatgctatccatcccccctccccccaccccacaacagtccccagagtgtgatgttccccttcctgtgtccatgtgttctcattgttcaattcccatctatgagtgagaacatgcggtgtaaaaaaaactcttaagtttagatccaaggtatttttatatatgtatatttttagttttcaggttattttggagctatgactcttcttcaaacactattctggcctgggtgacaggcgcacagtgctgatttacgtacatcccaaacatataatcagccaggccctgaacataactgggcatgggtgaccctcactcaggtcactgaagagcaagtgttacttgtgaaatcacaaaaccagactcaagtattctagtggacatactgctctgtccagctgcccaaagaatcatgaaaaggagaacactttgatgatgtcagaagtcatccttttttcaaatccttagtactattctttcaagtgtgttcttctgtgagctgaattacagtagtccatgcagagcactaaacaacatcaggccaggtcaaaaaacaattgagttgagggaagaaataactaggaaaaaaatttaatgaatttcatcttcttgattttgcacatctttaggcaacactgccgacttgcattattgtcacagcagtacctagcctgggaaggaaggtagcaacattggtgggtactgactctggaaaacaaaatgatctgcaaagactgagccatgttgctataytgcaaattactaatgtccaatttggacttaatacagtagttttctgttgacattcccataaactggttcaattatttttaaataaatcatatttgttcaaaaatcctagaaataagcaaagatttattttatgcttggctttatagatataatgcaacatcatttactatacatacctgatgagcaaaactttcttttgaaaaatcaaaacactcacaaaatatttttcaaaactgaggtgttggaacacctcagtttgcacaattattttggatttacttttcatacaagaaatgttacttgaaatcaatttaactcatttaagttatatttccaactaaagtatattctatgtttaaagaataaaaataataggcctcactatcaaataatcaactataataattttattacctaaaatacatttttatataactgtrtaaaccagttttttaggaatctcgaatttcacttatgctaaatgcaactgaaaataaatatatgaacaagaatcgtttagtaaaaataatgctggtaaatttttattaacctcctgctatatakaacaaaatatatattaaaatatttatakaaaaaattttagttggtatttgcattattctgtattaagaaaccacagttacattattcctacaaaacgtttttttcacatttttctcattactgctggtgaaactaatacaggtagttttattaacatctgtcacttcctatacatcctaattttcttagtatttatctaacactaatcaatattgactagtgaacccytgataaaagtgtgccttcttctagtacaaactgattctttcataaaatatttcatgcccactgtgtgctakcttttgtgttaaagacttgggatgcaaagctcatggtgtagcaaaggcaaaacacaattgcattaaggtttgctatgcaaggtaagtgcaatgacagaaatatccctagaaggattgtttaaatcaagcagcaragtcagtaagaggyacatttcattaaattaagtccatctcctttatcaagaaggtgatggcttaccastttctggtttgcacttccctatcttggcaaagcagtgttgataggtatagacaatatcaaaacatctctgagaatgacagtcatcatcstgyttcctcayttcacaaggtttagcatcactgcatttaaacatgtcagcctaatctaagttggaaaatataaacaagtccagctgttgttaagaccagacaggtacatggtaagtaaaataggaaccagaaatttacagcctgacacacaaaaattagattcctagttgggatttttaatcataggtagtacatttattttttggtagacaggcatccaaataaaaataagacatatctaaaagtataaatgcttaccatattacacactaaattggaaggcaagttgattcagtatgtcataaatcacatcttttaactgtaacagcataaaataaataatagatttttgatattatatgccaaacaataattaacatttaaatgtcaatatgcacctaaaaataaggacttgacacacagaaaaggagtgtatattacatttaaatttgtaagtggttayttgctacccatagtgyctcaagaatcagataaaaaagaccgagttacttaaacaatatgtatgttcttaagagtgactgataggaaatcaaagcacgttcattgttttctcccatacatccgacaggctttaaaagaggccaaataccaaaaaactaaagagacattatacatcacccatttktgatattctggtyttataaatrtatcatttcaaccagaagagcctcatttgaaatgcaacactacccacgtatttgatatacaccactctttcagactatttgtaggtgagttcaattttttctagtcagggtgacctcataagacttggacatggcccagcctcgctccgaggtgaaatcaaggcagtgggatcacccagcaaagttgtttttcttctgcagcccaatgacaagaatgactaaagccaagcagaatgaagattgcctagcctttgtcaaatgggattggtgaggagttccctctctcaccaaggagtggttacatccagaggaaagctgaggtgccacacagtctaaatcctgaaattgtgggtcctcaggcacaaacctcatcacttttgtggactacgaaattgtcgctgaaacctgggtttgagataacagcggttttgagaagtttgatttatacattccaacccacttgaatgtcgtcttagagtgmtgagacttgatgactcttactaatctccctcccccgcaggccaaacagccattgcctcccaaattccagcttatatattcatttcttaggcaatttttctcttgggggaggaaacaatggactctttcaatcttctcttaccaacaaagggccctagaagaaaaaacagtcctttcaatcamctcctttatgacttcttgatcatgatgagtgggccttgcgggtggggggagtgagggccaggaaagggagaggtgacaggcaactcacctctttgagctgctccagctcctgtttgaggctgtcgtactcagcctccagttcatcatactgctgtttgagggtcagcttctcctccagcaccaccagyccgtactcggcagcctggatcttctcgtgggtggtctccgtgagctccttggttagcctctctatctcagtcttataatggtccaccgtctgcaatacctcttctgcggccatagccccggtggatggaggcaggagggggttacggggtgggrgagatggatgcgaagctggcggggaaagggagaaggaaatgggaagggatgggtggaaacggaaaagaaagtgcggccggatgaatgagcagcgcgatgccccgccggctctggtggcagcggcagctacaccgcccgagaaactgacgagaaatgcaacatggagaacagggcagagggtcaggggcgaggcggcaaaggccgccgcatgtgtcctcggggccggcccctgcgtgcggtcagcagccgtgcggcatggcccgggctgcggcggccgcgggtagsgaggggctccggattctgcttattcagagacgcccgtccgccatgtctcccgggccgcgtcactgcagtctcgccctgggtctggcgcgctcyggctcgcggctcgctctctcgctccacctgctccctctggccctgcagcagccggtgcggaatgatgcagtctcggggccggctccctcccttcccgcgtggcggcggctccgagcagggggcggggagcggatggagtcagcgcggggggcggagggaaggaccagacggaaacatcccgaggcgcctcccgcmgggcgcgcggggccgccgcccgctgcaccgtgaggcgcgccaggaggaggcgcaggcgacgggtcygggactgggaagcggtggggcgcgcgcggcgggggagcctccgccctgtccggctcgcgggggcgggagctcctcccagggctttgtcccggtggcagtagaagaccccgagagcggcgtgggcgcccgggctcttttgctacgtcgagggccgaagctcaggaaactgcctggaacgctttctcccgagaaaagcaaacaaaactatcgcggtcgcggyccgcgcatcctcctcgtcccctgggcgcgcagaaggctttttgggccacctgcccccaaaagaccgctgggtttcccaaagctttcaagacgcaccccaaggcgccctcctccgtcgtccccctctctccctgcctctcccaagtctggcctgggccacctaacactctcaccagatraccttactatcctcacaggacagtccgctaaatattgctcgccctcacccagcgtatcacaagagcgctatccactcagaaaaaaaatatctccacaatacatgcacccaggaaacctctagctaggtactgtatatcttgccccaatagtttccatcaaagcaccttactctgtgtcttcaataaaggaaaactgcttgaaattccctatataagataccaacgatgccctgtaataagcattttttaaacaataagagctaagagttcttgagacccataccaagcattcttctaagtatgtaacatgcgttctctccaatcctaacaatgctttgaggtaagagccattatcctcagtttacagggggtgaaaggcaaagggagatgtgatttgtccaaagtcaggcaactctggaatcttaactcgggagcactaaacgggatcattatgttggcttcaggttcactcattactcatacaaacccagcaactacatattacatgcttttaagataatcmcattaatccatatgaagagtgatgatgaacggttacaaaaggaggtgaaagcaaagtaagagtggagtaaatgaaagagtggagaagggtcgagaatcaagaggaagaacgcaacatgagagaaaagaagcaatttytgtgtaacgggaggctgtgagacccacagatcagtgggtctttccagttccctctcttcttctgcatggcacctattccagagctgtttytcagtgaccaggtgatgaacacacatgcgttttytaagttagaaagcaggactcaactctcccatcattgtgtacctggtaaaaaaaaaaaaaaaaaaaaaaaaaagatgattgttgaccgggcacagtggctcacgcctataatcccagcactttgggaggcagaagtggatggatcatttgaggtccggagttcaagactagcctggcccacatggtgaaatcccatctctactaaaaatacaaaaattagccaggtatggtggtgcacgcctgtgatcccagctacttgggaggctgaggcaggagaattgcttgaatccaggaggtggagggtacagatggcaccactatactccagcctaggcaacagagactccatctcaaaaaaaaaaaaaaaaaaaggacacttgttgatggcgtgggagaaaaagcatatgacagtgcccttccaaagtttccactagcaggctgtctggatrtgttttccattgcttcacaaaccagacaagtttccttctaaacgccagcgatcacaacagaatattctcatgtgattgtctgatctaaaaataaaacaaaagaataktctcttgtgattgtctgatctaaaaataaataaataaaaggagaaaacattccaaatgtgcagccaccataaattccagccttgtagagaagcggatgataatgactacaacatccgacccatctttccttatctcgcactccaggtgggaagcccctcctgtgtgctcccgtggcatctgacctctgacacgttgatgaatgatgatgaactgctgaaaagagatggaacctgcaattgcaggtagctaacctgccttcccaggaagcctctggctgttcctcactctacaaactgtaagcataggccttccaaagggatcataagactcgcactagattgcctgtgcctccctctcctttggatcaaactaagaacagagtttgcctctgtgactttcctttttgctaaatttccattgtggtccagcccctatgctctatcctgccccgtttttctgattgatacacttttgtcacttgtcacttttgtctgatttcaggcatgtcttgcacactctgacactttaagatgttgcttagttgaactttgatccttaaatgttggtatttaacgtaaagaagataaacttattttcttgttttttttctctttttttctgagacagggtctccatcacttaggctggagtggagtggcatgatcatgactccctgcagcctcaacctcctggactcaagcgatcctcccacctcagcctcctgagtagctggaactacagatgaataccaccacactcagctaattttttaaatttttgtagagacagggtctgtctatgttgcccaggctggtctcaaactcctgggatcaagtgatcctcccaccctggcctcccaaagttctgggattacagatgtgagccaccatgcccagccaaatttattttcctatacaccatgctgttccagtactgcatagttacagttccctcttttttcgtatatgccatatgtattgcatatatatcaatgacaggtatatagaaaataatttcttaaagcattcctaggctgggtgtggtggctcatactggtaatcctagcactttgggaggctgaggcagaagggtcacttgaggccagcagttcaagaccagcctgggcaacatagcgagacctcatggctacaaaaaattaaaaaatactagctgggcatggtaatacatgcctgtggtccccaatacttaggaggctgaggcagtatgatggcttgaacccaagagattaaggctgcaatgtactgattgtgccactgtgctctagcctggtgacaaagcaagactcaccaaaagaaaagaaaaaaaggccaggctcggtggcttacacctgtagtcccagtactttgggaggccgaggtgggcggatcatctgaggtcaggagttcgagaccagcccraccaacatggtgaaaccccatctctactaaaaatacaaaaattagctgggtgtggtggtgggcgcctgtaatcccagctactcgggaggctgaggcaggagaatcacttgaattcgggagttggaggttggagtgagcagagatccgccactgcactctagcccaagtgacagagtgagactccgtctcaaaaaaaagaaaagaaaaaaagcaaaaaaaaaaagcacaagctagtctacttgggtcatatccaactttgccacttactagctgtgtgtttctcagttgtgtcatatctaaaaaggagataataatataatctaattatgagattgttgtgaatagaatagtatcacacacataagcattttatatgtgctttttaaaagttttaaaagaaaaacaaggataaaatttaggtagaaagaagaaaaaaagataatcagtrgagatctctctgaagaagtgatattcattttattatctatgaggaacaaaaaggagtcggatatacaaaatgtgggggagaagcttttcagggaaaggaaataatgtgtaaaagccaaaggcagaaaagagcttgttgagtgcaaagaataaaaatctgagaggctgctgggtgcagtggctcatgcctgtaatctcagcactctgggaggccaaggtaggaggattatgtgagctcaggagttcgagaccagcctgggcaacataccaagaccccatttctactaaaaaaaaaaaaaattttaatcgaacgagcatggtggtgcatacctgtagtcccagctacttgggaggctgaggtgggacgatcccatgagcctggcagtgaaggctacagtgagccatgatcgtgccactgcactccagcctgggtgacagagcaagaccctgtctcaaaaacaaataaaaaaaaaaaaaaaatgaaagaggctgaggattaagaagctcaagggaaatggcctaagactatatcaagaagtcaggcaacatcagagagataggcgggaattatacttgccttgcaagtcagaatgaagaatttgggttttattctcaggggaggcctttgatgattctttagtcaggaaatgaaatagttctatttgtattttaagaatgtcagctggatgcagtggctcacgcctgtaatcccagagcactgtgggaggctgaggcaggctgattgcttgattccaggagttcaagaccaacctggacaacatggtgaaaccccgtccctacaaaaaaaatttttttaattaaaatttttctactgcacacacaaaaaagttggaagatatcaaaagatagaagtagggtccctagttaggaagytgttgcagttgtccaggaaaaagaaaatcatggcctagactgagrtgatagcagctgggaaaagaagtacatggatttatattgaggaaggagtggaatgggagagtagaattcttaagacctttttgaagactgaatgtgggatagggagaaaaaaggaatcataaataaattctaattttctgacttgggaagacgggccgccatttagttagatggaacagttttaagaaatcaagagttctattttgaacatattaggcttaagacacttttgaaacatttgtggggtttttgttttgtttttttgagatggagtctccctctgttgcccaggctggagtgcagtggcgtgatctcggctcactacagcctttgcctcccgggttcaagcgattctcctgcctcagcctcccaagtagctgggactacaggcatgtgccaccacacccagctaatttttgtattcttaatagagacgtggttttgccatgttggccaggctggtcttgaactcctgacctcaggtgatccgcctgccttggcctcccaaagtgctgggattacaagcatgagccaccgtgcccagccacttttgagatatttgaatagaaatattaagtcaataatttgatgtaagacaaaaattaagaagagacttcttaggaggtatgatgactttgctttgaaaatcactagcgttagagggcattgaaacccatggaaaacagatgggattatctagggaaagatgtaaataaagaagagaaaggggtctaggatctagccctgaagtatccctattaaaggttgagttggaaaggaaaagccagcaaagagagttgagagggactgggtggggggaaaatcaggagagaaacatttgaaaggtaacaaaagagaagtgtgtatgaggagcgagggaataaggaccaagtcagtgccaacaagaggtcacagccaagtactataaggacacaaaatgtcactggatttggcaacatggaggtgggtgctcttgataagattcatttgtgtggaacagagaaggcagataccaggttgtagtggattacagcatgaatagaaatttaagatgtgtgctgggcgcagtggctcatgcctgcaattccagaactttgggaggccaaggcaggcagatcatctgaggtcaagagtttgagatgagcttggccaacayggcgaaaccctgtctctactaaaaatacaaaaattagccaggtgtgatgacgcacacctgtagtcccagctactygggaggctgaggcaggagaattgcttgaacctgggaggtggtggttgcagtgagccaagatcgtggcactgcactccagcctgggcaacagagcgagactccatctcaaaaaatttaagatgtggagacagcctaatcakacaactccatgtscccagaaatgatggcagggataacacacamtgagagggtgtatctgtggggcactggggtgctctgctgtgaatggccggtgggaaatcttcccttyaagagcacttcacatastgagacctccagatgcactytcaagggagatrtgtggcttycacaccagtgccttctggggccasgacttcatctccaagctgcttggataccagctctctcagtggctgcccttgtccactttaatcacctgtaccctgtaggggtgggttgcccctacacacctgtgggtgtttctcgtaaggtgggacgagagatttggaaaagaaaaagacacagagacaaagtatagagaaagaaataaggggacccggggaaccagcgttcagcatatggaggatcccgccagcctctgagttcycttagtatttattgatcatctgtgggtgtttctcaaagagggggatgtgtcagggtcacaagacaattgtggggagagggtcagcagacaaacacgtgaacaaaggtctttgcatcatagacaatgtaaaggattaagtgctctgcttttagatatgcatacacataaacatctcaatgctttacaaagcagtattgctgcccgcaggtcccacctccagccctaaggcggtttttccctatctcagtagatggagcatacaatcgggttttataccgagacattccattgcccagggacaggcaggagacagatgccttcctcttgtctcaactgcaagaggcattccttcctcttttactaatcctcctcagcacagaccctttacgggtgtcgggctgggggacggtcaggtctttcccttcccacgaggccatatttcagactatcacatggggagaaaccttggacaatacctggctttcctaggcagaggtccctgcggccttccgcagtttttgtgtccctgggtacttgagattagggagtggtgatgactcttaaggagcatgctgccctcaagcatctgtttaacaaagcacatcttgcaccgcccttaatccattcaactctgagttgacacagcacatgtttcagagagcacggggttgggggtaaggtcatagattaacagaatctcaaggcagaagaatttttcttagtacataacaaaatggagtctcctatgtctacttctttctacacagacacagtaacaatctgatctctcttgcttttccccacagtaccctttagctgtcatcctcctatcccatccccatcctccaccccattaccccagtcctaaggaactactaaactattttttgtctctatagctttccctaatcttgatatttcatataaataaaatcacataatatgtagtcttttgtgactggcttctttcttaacataatgttttcaaaatatatctatgttgtagcatatatcatactactttccttttttttttttttttttttttgagacggagtttcgctattgttgcccaggctggatggagtgcaatggcatgatctcggctcaccgcaacctccgcctcccaggttcaagcaattctcctacctcagcctcctgaatagctgggattacaggcatgcgccaccacgcccgactaattttttgtttgtttgtttgtttgtttgtttgtttgttttttgagacggagtctcgctctgtcgcccaggctggagtgcagtggtgcgatctcggctcaccgcaagctccgcctcccaggttcacgccattctcctgcctcagcctcccgagtagctgggactacaggtgtgcgcccgccaccatgcctggctagttttttttgtatttttagtagagatggggtttcaccctgttagccaggatggtctcgatctcttgacctcgtgatccagccgcctcggcctcccaaagtgctgggattacaggcatgagccaccacacccggccaaagcccggctaattttttgtatttttagtagagatggagtttctccatggtggtcaggctggcctcgaactcctgacatagggtgatccacccacctcagcttcccaaagtgctgggattacaggcgtgagccaccgtgcccggccactgcttactttttatggctgaataatattgcattgttagatataccacctttgcatccatcatcagtttatgggcactcgggttatttccaccttttggctattatgaataatatgttataaacatcgtgtacaactttcgttgtggacgtatgttttcatttcttttgggcatacctggaagtggaattgctaagtcatgtgttaactcaaagtttcatgtttggaaggacttctggattgttctccaaagtggctgaaccattttacattcccaacaccagtgtacaaggggtctgatttctccgtatccttgacaaccatggtatcatctgaatttttgagtccagccaccctagtagatgtaaagtagcatattttgttgcgattttgatttgcaattctatgatggctaattatgttgagcacttttttatgtgtttcttggccatttgtttatctttgttggcaaaatgcctgtccagatcctttgtctattgtttgagttagttatcattttattactgaatgtatgggttctytgtatactctakatacaagccccttatcagatatttgatttggaatgattttctctcatccaggggattgtccttttacatttttaaatggtcctttagccgggcgcagtggctcatgcctgtaatcccagaactttgggaggctgaggtgggyggatcacttgaggccaggagttggagatgagcctggccaacatgatgaaaccctgtctctacaaaaataaaaaaataagccggatgtgatggtgcatgcctgtaatcccagctacttgggaggctgaggcaggagaatcgcttgaacctggagcggaggtcwcaccactgcactccagcctgggtgacagggtgagattctgtctcaaaataataagtaaataaataaagtggtcctttaaaaaatgaaagtttttaattttgatgaagtccaatttattttttcttttgtttgtgcttttagtgtcgtatcattgccaactctgaggttgagaagatttagacctgttttattttttaaattttttagtttcagctcttacatttaggtttctggttcattttgaattaatttctttaaattgtgtgaggtgagggttcaatgtcatcctttgcaggtggctatcctgttgtcccagcatcatttgtcgaaaggctattctttccccactgaatggttttgatacccttgtcaaaagtcacttgaccatagacatatgggtttatttctagactctcaaatctattccattggtctatatgtccatcgatcttagtccattcagacgtctataagaaaatgcatgagactgggtaattaaagagcagaaatgtatttytgctcagttctagaggctgggaagtacaagatcaaggtgccagcagagttggtgtytggcgagggctgctctctgcttccaaggkggtaccttcctkctgtgtyttccatggtggaagagcagaagcgaaaaaaaaaaaaaaaaaaaaaaarggcctaggctagttccccatgtcccttttataaagcrctaatcccatccgtgagggcagaacccgcatgcctgaatcaccccctaaaggtctcacctcttaaactgttgcattggggaataacttccaacatgaattctggaagggacacagacattcaaaccatcacactatttatggkgttaccacaatgtcttgtttaccattgctgtgtagtaattttgaaatcaggaaatgtgaatcctgtaatagaacttgccacacaggctgaggtttcagggaatgtcagagagtagatgaagctagaaggtcacagcttttactcaggattctaaagtaaaacttaggtaaaaaggctattgtggctgggcacagtggctcacgcctgtaatcccagcactttgggaggccaaaatgggcagatcacttgaggtcagcagtttgagactagcctggccaacatggtgaaaccccgtctctactaaaaatacaaaaattagctgggcctgctggtgcacatctgtaatcccagctactcgggagctgaggcaggagaatcgcttgaacccaggaggtggaggttgcagtgagctgagctcacaccttggattctagcctgggtgacagagcgaaactccatctcaaaaaaaaaaaaaaaaaaaaaaagaaagaaagaaagaaagggcaggcgcagtggctcacacctgtaatcccagcactttgggaggctgaggagtgcagatcacctgaggtcaggagtttgagaccagcctggccaacatggtgaaaccccatctctactaaaaatacaaaaattagctgggcatggtagtgtgtgcctgtagtcccagctactcgggaggctgaggcaggagaatcgcttgaacctgggaggtagagattgcagtgagccaagatcgagccactgcactccagcctgggtgacagagcaagacttcatctcaaaaaaaaaaaaaagaaaaagaaaaaaagaaaaagaaaagaaagcaagcaaaaaaaaagaaaagraaaaaaaaggctattgtgacttagaaaacaattcatgtatctcataacatgccctgaaggaagaattggctatttcctggttagcacagtattccacagcctgggaataagaagttggttccctaacaggaaagcatcagtcttcttttcttagaagaatagacagacctgactttaaaacttagtcatcctactcttccaagctatttgatcttatacaaattatctgctcaaagtcttggtttcctcatttgctaataaggaacaattatgcctacttcatagagaggttataaggattaaatgaagatatgcctgtaaaatacctagcacaagtgctcatgtctttctttttcccaggaccttccttctgatgatggaataatatttgtcaagaagttccggwataaaaaacaaacacaaagacaaagataaaaagcttgtggatgagaaactagatgtgcctttggtgtggaaactctgttctggatgtccttagactgtaatttaaggagactcataacggagatttgagatttaatgcatatcggaatttgtatggaagttgaaatagcccaaggagagaatctagaatgaaaagaaaggactgagaaggaatttgaggcaatacccatatttaaggagcagtagggaaaagggtaaggtgagattcttgaagaaggtgtagttcttgcagtattttgtgtatatgtgtgtgtgtgtgtgtgtgcatgctattaaaataatctcaagcttgttagtttagcctcttccccttaaatataaagagcttccccttaccggccctattttgtcatactgatgtcctagggcatggttacagaggatgctcatacagggtaatgaatgatgaacccaacagagtcttgtggtgaggcaattgtcagtttaatgcaagttcaggaaggagcaaggccctctccatatctctgtgagaagagattggggtagaccctggggtggtggtaatgggcaggttgccattcaggtgaaggcctgtctgacagggaatgaggagtcagctcccaaacctctcctggggacagaaatctcctagctctgggctctctctctcatggacaacttcagagattagctttttaggtttctaaaggcccctctggaaatccttcacattgctacgtttctccccagttttttcccccacatggkctttatgcctcatcatatacatgcctgcttcctaatcaaatcaaatcaaaactgtkttcttcttctttccccttggtttgatggkcggkcatacctagaacccaagcaattagtacctgaaaactgatgcctctttctaagatattccaacccatccagaaattgkctttcatctttctattcagtaaataaaagaaaaaaaatttctatagcaagaaaaactaaagattcagaccttgctccatatatataaattttttttgagacagtcttgctgtcgcccaggctggagtgcagtggcacgatctcagctcactgcagctccatatatatgtkaaacattgtkgagattacatattacatacagttttgtatcctgctttatttaatactatagtttgagaacattttcatattaccaaaagacatcctaaacatcatgtktaacacctatataattgatcatttcatattacaatatttttcacctttcctgtctctagtataatggtctttaatgcataaaagactgacaaaataggctgggcacagtggctcacacgcagtactttgggaggccaaggcaggcagatggcttgagcccaggagttcgagaccagctgaggcaacatggcaaaaccccatctccacaaaaaatacaaaattagccaggtgtgatggaacatgcctgtagtctcagctatccaggaggctgaggtaggaggmccacmtaagcctggcaagatggaggctacagtgagccaagataacatcaccacactccagcmtgagagcaacatcctgtctcaaaaaaaaaaggtgggggggcttacaaaatakaaaagatgaattctacatatttgttgaaaagcacaatctcagtctctcatttctcacagcatctatcaaaggctatcagtccactcactctcaggtaccctacgatcccccaagcagtagggacstgggtgcctgagccacatccttgttgcttgttaccatgttttgatgttgggccataagccmtaagagaaaagctagaagactcaacccastggaagtgattgtattcgtctgtgctcacactgctaataaagacatacctgagattgggtaatttatcaaggaaaggggtttaactgactcacagttcagcatggctggggaggcctcaggaaacttacaatatatgtccttcttcacatggtggcagcaaggataagtgcasagcaaaagggagaaagccgaaagcctcttataaaactatcaaatctcatgagaactcactatcgcgagaacascatggaggtaactgcccccttgattcagttacctcccaccgggtccctcccatgacacgtggggattatggaaactacaattcaatatgagatttgggtggggacacagccaaaccatatcagtggtcaycttgtctaaacaaggatgctgttgagctcattatccattagctcacacrgtgtctctttttacaagaacattttgtgttcygcagaataaatctatgtctggtcttactacctagaatcgttggcttcttctgagtaattggcctgcttttatcttatggatactgtaaattgtatgactgatcagatttccttttatccacaggctgctagaaagcttctagccaaatttgtggtcctcttagcaagtgtataggtcaaatgatatatatttttggcctcattcctggctctgttttatgtctgtctttgccattgtttttctctctcctacrgaatacttgagattatcttgtattttatacagctccgcctgctgccttaagcctcttctgaaactaggcagttaagcatactggttcagagcctgcctctggcattagagccactgtccctccattttttctgtacctcagtttcctcctccataaaaaggaaatacagtatttgcttcacagagttctgatgaggattaaatgacaaaatacatgtaaggacctcagatgtgtggctagcttgtggttaagcgcttaaaagaaattttaaaataattacaaagaagtcgttgtaatcattctcctattattggagtttaaccttgtataactaactcactccaagtagagttagtactaggtccaagagtgtgaatgttttgaaggctgtgaactagtttatgtatcmgttggagtggaaaagagctccasctttcccatgcctttatcaatgctgaatgctattacttttaaaactctttgccaatttgggccgggtgcggtggctcacgcctgtagtaacagcattttggaaggccgacgcgggcagatcacgaggtcaggagatcgagaccatcctggctaacacggtgaaaccccgtctctactaaaaatacaaaaaaattagccagccgaggtggcgggcgcccgtagtcccagctactcgggaggctgaggcgggagaatggcgtcaacccaggaggcggagcttgcagtgagccgagatcgcgccactgcactccagcctgggcgacagatggagaaaaaaaaaaaagactctttgccaatttgacaggtaaaaaaggagtatcatcttattgtccttccaatgtacattttattggtaactaatgagatcgaaccttstgactcaaaccactacatttatttatttattatttctatttcttcyctttccatcttttgcaatttttccattgcggtctttgtgtttcctttaatctatttaaataagatgatggactcttattttctgtctccagtcatctgctgagagggagtcggagtacaggggcttgaaagaggtaagattcacaggcagaaacagaaaaagggtgaccaagaacacgtaaacgatcagaccagcatgtgagtcctgcagagtgagctgtcatctgattagctgagaatggatgcacagttmtaaaatctaaacacagtttatagaagaacatacccataatctgtctcctcttgttcttttaaaacatgaccaattccagaaaaaaatcatcattgttttgttctttaagtgggaaataaaattccttgaatcacaaagtaattttaagatgctaatcaaacccttagctgttacaaagactgtttgcagatgagtaattatttttgttgccatggaaccccagctgatgctatgggcatggaaccagcttgcacagatcatttttatyaaaccaagtcaaaccaatcagtatagctactaaatcatttcagtttaaaacgctttctctcattgctggtggagggaagttagatggtttggcactgttttgcacacccagctcaacttcttagttctcttttttgacatttttgctttttctgttctttttatttatattttattttattttatttatttgtttgtttttgagtcagagtcttgctctgtcacccaggctggagtgcagtggtgcgattacaacacattgcagcctcaacttcccaggctcaagcaattttcccacctcagcctcccaagtagctggggctacaggtgtgagccaccatgcccagctaattttttattttttgtagtgacgaggtctcactatattgcccaggctggtctcaaactcctgggatcaagcaatcttcctgccttggcctcccaaagtgctagggttacaggcttgagccactgcacccagcctgttctttttaaaaaaaatttaataagtacaaagcacatgccataatagtattctgatttctcctaataaggaccctgggtatctcagcctattttcatgaggatactgagtaccaaaatatactgtgggcagcccatgatcacatgctggacagagcgacacaagccttatatacaacttctttaatgtgctactagagtttctgggtgactgaggagaacacagttacaaactcttggttttaatttggtaaacaaacttgaaggttgattccattgtgcttttctctaacttaaaaaaaaaataacagcagggcatggtggctaacacctgtaatctcagcactttgggaggctgaggcaggaggatcatttgagcccagaagttcaagaccagcctgagcaacatagcagaaactccatttgtagaaaaatttaaaaattacccagacatggtggcacgcacctgtaatcccagctatttgggaggctgaggtgggagaatcatttgagcccaggaggttgagactgcagtgagctgagattgtgtgactgcactccagcctggatgacagagcaagaccctgtctcaaaaaaaaacacacacacacacacaaacatgatttggatadatagatagatagatagatagatagatagatagatagatagataaacttaccccttacaacaccccaggccccaggatactaagggtaataataaaatattattattattattcccattttatggtgaggaaatgaaggcacagagaagttatacaccttacgtgaggccttacagctgataaacgatgtttgtcaactctgaactgtctttcctaggccaggtattcctctctcactccactttctactacttcctcctatcctcactgagtgtctacraattataagtcacgttctctaccaaaatgctataatggataaaacagtggactagtagtcacaagacttagattcatgtcccatgtggccatggtaaagtcacttaaccccactgggcttcggtttcaccatctgtcacatgagaataataataatactaactkcacagggcagtcacagaaatcaagtgagatgacggaggtgaaagatctttgtaaggtgaaaagttgaagcaactcctatgatttttcattacctctgctagtgagtgttgtcagtgaggtttcacagaacaggtgatattggaaccaagttgtgaagtggggatgtgtgttctnagataatcacagatcacttactgaacaactctggtgttccaggctctgtgctaagaactatatacacattgtctcatttagtgccatcaacagctctatcagctctttcaggtaggccctgctcacactgctcacataaaggcctgctagcatgattcaagaatggtttggtcacgtcgctgtcgaccagtcacagcccaaagagagagtgctggtggctggaacaataaactgtgcagactttgaaggtggcagcccaggtcctcagaatgagcagatctgcaggagccaagccatgcactgtgagctcaattaagacacaacaggaacaattccctttggtcagtggccacatcctgtgagggtatagcctggggcataactggcatgtcagttccatctggctttttccattgcattgggagactttggaggcttttcttaattggttttgacaatgattctggtttaagccttgtctgccctcagtcacatcaagagcacaaaagcataaaaagactagaaaccctggattgcctccaaaatggacctccaacttataaagcaacaagctaatgaatgcattttaaggcatacgcgatgcaaatgagccacgtgaaaaaaaaaacagagttggtgatttttttttcatgtttctaaacatcactcctgaagcatttagtacaactgaaaaattggaatggacaactgaagcaattgctacacaaaacatgaaataccaagggcatgagggacgggctttccagactatgggaggatatcgtgaagctgaacatgcagggccccaagggaagaaatctggttgagcaatgtggacagggtgggctgggggataactcatatcacracataaccaactaatttttaaaaatcactttttcacctcaggaccagagattctattactcacccccaagacaaaactgaagaaatcctggcccctcttaattgtttacatgaatgtgatgggccaaattctgatgagataagtgagtgaggctggctccatctcgcatgtggctaaggcaagactgatgcatttattacccatcttgttacgtggaaaatattctccgtgatatacctgttccacccttcagctctggctgagtatagacaggtagaggtgcactcaaagccacttccttccataagaccaggcgtatgagctcagaaggactcctcacagaaaacraggtgggcagaagaaactcgggtcaccaggaaggtgtcggtgtcaagctacacttactttgaccttttgccctaaagagaatgctctcttagcaacctttccaaatatatatacagcctaggacaatggatgccgagtgatggctccattattaatccaccaaaccatgtttaaagctatttacttcataatattaggtccaaaccatacttggctcttctggatggaggctgaaaatgaacattgtagrtgcaaacaatctctctctctctyytttttttttttttagggggagtctcactcttcttgcccaggctggagtgcaatggcatggtctcggygcactacaacctccacctcctggattcaagcatttctccttcctcagcttcccaagtagctgggattacaggcatgcaccaccacacctggctaattttgtatctttagtagagatggggtttcaccatgttsgtcaggctgatctcgaactcctgacctcagatgatccgcccaccttggcctcccaaagtgctgggattacaggtgtgagccacagcgcccggccaggtgcaaacaatctctaatggaacatgtttgagaccaaagggaatgattttcgtatgtcttcattgagctcgccagtgcatggcttgggttcttgtagattcattcatttttgaagacatgggttaacatgttcaaagcctgtgcaaaattctgtgatttttttgaaaaaacaggacacagaataagttgagttaggaggatcctgtggaatgacagttatagtaactaactrtagccaactgtgacctacttctaactaaaggcaatatgcattatcgatcaaaaaaataacctgactgggctcagtggctcacgcctataatcccaacactttgggaggccaaagcaggcagatcaccttatagtaataaggtggatcatcttatagtaatgataagagtcaacctagcctacagtgggaaattgaactatggccaccagttggccttaggaaaaattacaaaagatgggagcaggagaggggaaataggtcaatcccgaatcattcaactgaacttataataaggaatatgttcaaacattgaaagggaaggcaaaaagagtaacaaaatagatgatcaaatcatgaatagaaaatatgtagttgttttataaatgttacaccttcttcacattggagttcaaatacgtacggaaataagaaacttgttattgtgtttctcctctatatactggcatggaaaaggtgatgagcctttataactgggactgcaaagatattgagccagccatttaccatttcagaagctgtgtgttttgcaatatgcgggtgtgggtgggtcaaatgtccttcttagggattcccctctaccgtcaggaagccacccagcatgctaatcagaaagcccagtcttggggcagctgctacaagtgctttctctttaatgagcacctgagacttttaaagttagcatgggcccgcagcagtggctcacacctgtaatcccagcacttttggaggctgagaagagggatcactgagcccaggtgttcatgactagcctgggcaacacagggagaccctgtctctacaaaaaattaaaaaattagccagaaatggtggtgcatgcctgtagtcccagctactcaggaagctgagatgggaagattgcttaagcctagagcgttgaggctgcatgagctgtgatcatgccactgcactccagccggggcgacagagaaaggccctgtctcaataaaataaaataaaataaagttagcatcattatgttagaaatgagtttccagtgttaaaattggtagtggtaggccagacgtggtggctcacacctgtaatcacagcactttgggaggccaagtcaggcagatcacaaggtcaggagttcaagaccagcctggccaatatggtgaaatcccatctctactaaaaatacaaaaattagccgagcatggtggtaggcgcctgtagtcccagctacttgggaggctgaggcaggaaaattgcttgaacacgggagccagaggttacagtgagctgagattgctccactgcactccagcctggcaacagagcgaaacttcatctcaaaaaaaaaaaaaaaggctgggcgcgatggctcacgcctgtaatcccagcactcaggaggctgaggagggtggatcacctgaggtcgagatttcgagatcagcctgaccaacgtggtgaaacctcgtctctactaaaaatacaaaaattagctgggcatggtggcagacgcctttaatcccagctacacaggatgctgaggcaggagaatcacctgaacccaggaggcagaggttgcagtgagccaagatcgcaccactgtactacagcttgggtgacagagaaagactccatctcaaaaaaaaaaaaaaaaatgagcaggttgtacgaacggttgtgtgcttgcttgctgataagcgcatgctctatacaaatatatatgggtggcctaattttgtcgaaaccttgctttcattataaccgggtactcaggggtggggagtagctaactgtgacccacttctaactaaaggcaatatgcgttatcgatcaaaaaaataacctgaccgggcacggtggctcatgcctgtaatcccagcactttgggaggccgaggcatgcagatcacctgaggtcaggagttcgagaccagcctggccaacgtagtgaagccctgtctctactaaaaatacaaaaattagctgggtatggtggcacacacctgtagtcccagctactcgggaggctgaagcaggagaatcgcttgaacctgggaggcggagattgcagtgagccaagatcacgccactgcactccagcctgggtgacagatcgagactctgtctcaaaaaaaataaaaataggtgccgggcgcggtggctyacacctgtaatcccagcactttgggaggccgaggtgggcagatcacgaggtcaggagatcgagaccatcctggctaacacggtgaaacyccgtctctactaaaaatacaaaaaattagccggacatggtgacaggtgcctgtagtcccagctactcgggaggctgaggcagaatggcgtgaacgcaggaggccgagcttccagtgagcygagatgacgccactgcactccagcctgggtgacacagcgagactccatctcaaaaaaataaaaataaaaaataaaataataataayaaaaaaacctaacatttaggtaagttcaaatgatgttatgtcagttaacaactatgttcaatattcatttcactcttcctcctttgtgtaaaggttgtggtattttggtagtgttgactcttccacctggtggctcttagtcaagtctttgagaggggcctataagtagtgcctctcacatgagcccgggaggcggagcttgcagtgagccagaatagcaccactgcactccagcctgggtgacagagcgagactccgtatcagaaaaaaaaaaaaaagaaaaaatagtgcctctcttcccacctgggttcagggcccattgaaaaacaatccaaaggaaatggccaaatcatatatcgcctgagagcacagggggagggacaatgatcgggatataaacccagacattcaagcagggagcggcaacctcctttgggtcccctcccattttatgggagctctgttttcactctattaaattttgcaactgcaaagaaaaaaagaaaaaaaagaaaagaaaaataatccaaaggaataagggaaatggaggttcaaatattgcttttattactaataaagggtaatttgaaagatgaagctctgtatgaaagacccaatgatggtgctaactccctatcctccagtttactattcctatcctcagaacacctcacgtgagggcaagcttggtactgcagagccgacacataaccctagtggccaccttcattggactgggaagacagagaagtagaaacagaccaaaatcttcatgcttgggacctttgataatttagcttcacccaatcaagaaatgaggcccaatggctgtcattaacagtcaggcaacatgtccaatccacacggagaatattaagagayggagcaagtggcattatctcaaaacacctagtattaagraaaaaatgcaccaacaaataccttatgcggtgttccatcatcagatcactgtccttccatgtccttagaccacaatcaagcaaaaggcaagaattagctgctcttcaggagcctcctcccccgactcagtccatccccaccagctacacctgtcgggtagaggataaaggatctgtaagtctggggcctccctgcagttccacaacatagcactccgagcacagtgcacagctaaccacgaccgtccccactggaaacactgccacctccagggtattatctgggagcagatcagtattccgcaccagcttaagaaggaattctcatcctccgttccttccaaacttgaagagctcctttctgctcttagctcttcagttatgcaaacataaacccaggaatgtgacattgaagtcatctccactttacagatgatgaaaaagttaaccttgtcttttgttttgtttttgagacagggtctcactctatcgcccaagctggagttcagtggaatgatcatggctcactgcagccttgacctcctaggctcaagtgatcctccaacctcatgtgccatcacacctggctaattttgtttatttttttgtagatacagggtgttactatgttctccaggctggtctcgaattcctgggctcaagtgattctcttttctcagcctcccaaagtgctaggattacaggtgtgagccaccacgcctggtgaaccttgtttaaatcatcaaactctagatttgaaagcaagtcttcagtctatttagcaaaagctctaaactttttcaaaactcagcatttacctctagagataaagttttttaggaagcacacacaaaaaatcatmcagctcaggctttggaggaatataaaaggaaattgtattttaagtgaatttctttctcaaaaaaggaagcagatttaaagcgttattttttgcactgttggttcattagattaggacataaatatggctcagctgttgtctattttagcaaaatagattcaaggcgcatggaatgaactgagtcatcactgtggcttctatccagaccaaaaacaaagttgggatacaatgatagtcatggaagcattttaagtgttagaattttgatgaatttctcttttttttgagacagagtcttgctctgtcacccaggctggagtgcaatggcgcgatcttggctcactgcaagctccrcctcccgggttcaggccattctcctgcctgagcctcctgagtaggtgggattacargcgcatgccgccaccacgcccggctaatttttttggtatttttagtagagatggggtttcaccgtgttagccagaatcgtctccatctcctgacctcgtgatccgcccacctcaccctcccaaagtgctgggattacaggcgtgagccaccacatctggccgaattttgatgaatttcaacattttatgtagggaaaaagtaacatttaaaaagctcagcaaattactaggtttgtagtacctacagcagcgtttaatannnnnnnnnnnnnnnnnnnngaagtgagttcaatcagaaaaagtaacatttgaaaaaacacagcaaattgcttagtgtttgtagtatatcttaaagcgcctataatatttggtcaaaaatggccgggtgcggtggctcatgcctgtaatcctaacactttgggaggctgaggcgggaggatcatgaggtcaggagatcaagaccatcttggctaacacggtgaaaccccgtctcttctaaaaatacaaaaaattagccgggtgtggtggcggacacctgtagtcccagctactcaggaggctgaggcaggagaatggcgtgaacccaggaggcgcagcttgcagtgagccaagatcatgccactgcactccagcctaggcgacagagtgagactccgtctcaaaaatatatatatatttggtcaaaaatatgtagagactgggcaggattttgttgttgttttggggatcaccacaagaaaagaaatacagtgggataatgagattcattgcaagtgtaaatcttgacatataatgtttataaaaacaagagtcagccaggcacagtggttcatgcctgtaatcccaacactttgagagaccagggtgggaggatcacttgagcccaggagtttgagaccagcctaggcaacatagtgagactgtctctatttaaaaaaatttttgaaaaaaaaaaaagacctaaatggaaatgaaaacaaagttttcacctctacaactttakgcaaccaccacaagtactgagcattgtttcttakgaaattggaaaagagagttagtgtctatcagaaactgtacatattaaatatttttgtaggttttttcagttttgcttttttwgagacagrgtctckctctgtcacccaggttagaacatagtggtgcaatcatagctcattgcagcctcaaactcctgggctcaaccaatcctccttcctcagcctcctgagtcactgggactagaggagtgtgtaccaccacacccggcctcaatatttttcgacttcatactacacaactctgaagcattatccctattttagagatgacaaaattggtgcccataaagttaagatatattaccagaagagccagaatccaaacccaagtttgtcttttatagagttctctgctcttcctggggcatcttctacagagttagataaaaaccaagccctggccaggcgcagtggctcacgcctgtaatcccagcactggaaggctgaggtgggcagatcatttgaggtcaggagttcgagaccagcctggccaacatggkgaaaccctatctctactaaaaatacaaaaattagccgggtgtggtggtgggcacctgtaatcccagctacttggggaggctgaggcagaagaatctctcaaacccaggaagcagaggttgcaataagccgagattgtgccactgtactctagcctgggtgacagagcaagactccatctcaaaaaaaaaaaaagatataaaccaagtccctcattttaaccagaggtcatctctgagctcagactggggcttctcaacatatgcatagaggccaggcgcaatggctcatgcctgtaatyataccactttgggaagstgaagcaggtggatctcttgagcccaggagttcaaggccagcctgggcaacatggcaaaacttcatctctactgaaaaagatacacaaaaatagccaggcctggtgggatgcgcctgtagtcccagctatttgggaggctgagacgggaggattgcctgagcatggaaggtcaagactacagtgagccatactggcaccactgcactccagcctgggtgacagaatgagaccctgtctcaaaaaaaaaagattaaaaaaaaaaaagattcagtcccagactcaccaacaatggcataaaactcagaaaagatagcggttgaacattttatctatcaggtattctgaaatatctgaaagttgcagggtgtatagtatggaaagaaatctttaacaaaataaaccaaattgatgaacaaacagccaaaacaaaacaaacaaacaaacaaaaactccttttcagcaaacrgctaaaggcaaatagacctgagatttttaaagggttgcctactaactaggcctctgatattcaaataacattattttagtccaaagcaaaagctgaatttggtgtcagtgttagctgaaatgtgctaaaatttttattactgatgttccctttttcctttaaaagtttttcttaattttctacatcctcttgagtgttttaacttacctgttgagacccttttttttatgagcatgaaatccctataagatgatgttaataagaaaagcatgattccgtttaaagtaacttcgtagtcaagtttatgaaaaccaggcaattttgcaaagagaggcacatgtcatctttggggacattcactaatgaaaattggattcagtaacctccagtgtagctactaatgaatacatcaagaaaatggactagaatctgctatgtttgaagatttcagagagtagacatattgctgtactgcgaaatagagatagacagttcatttgtacacttgtcacagttctctctgagaaatgttgtcaaaggaaaaacaggctctgaaaatgaatgaacagggtgggtgtggaattcagagaggacttcactctggtatttggtttctggcaggagcaggaaaccttccgtctgccactcggagactccctgccagtggattgacattctgtgctgtcaggtgagtgggggtgaaaagctctccagaatctttcaagaaaagcaatatccttgttacttgtcaatgtccttgacagcctatgggacaaactgtcatcttagctggtggtactaaaataatgaacattgaccttaagagaaaaaaaaatctaacagtttagcacagaataatcaactaagaaacttacggggtttttcttaaggtgttaaaatatgcccattactcaggtgaggaatttggtaactgtttgaaagcatttccccatcctttcagttcaataagacttctcataactagttagaagtccctttatttaacatctcttataagatcacagcaacatagaagagatgtcccacaggttgagtgtttttcatacactcatgtagaaagagaaggaggccaagtgccatggcttatgccagtaatcctgacaccgggaggctgaggccagaagatcgtttgagcccaggagtttgcgacaagcctgggcaacatagggagactctgtctctgcaaaaaatgaagataaaaaattagcgagcgtggtggtgtatgcctatagccccagctactcaggaggctgaaatgaaaggatcacctgagcctgggaggtccaggctgcagagagctgtaatcacgccattgcactccagcctgggccgcagagcaagaccctgtctctggaaaaaaaaaaaaaaaaaagacaaggaaagtttcatttggccatattcctccagaaggaaacttagaataggtaaaaaaaaaaaaaaaaaaattaacaaagtacttgaaatagatcaccatcttatgtttttaatgtttgkgattttttttttttttgagatggrgtctcactctgtcacccaggctggagtccagtggcgcaatctcggctcactgcaacctctgcctcccagattcaagcaattctcctgcctcagcctcccgagtaactaggattacaggkgcctgccaccactccctgctaatttttgtatttttagtagagagggggtttcaccatgttggccaggctggtctcgaactcctgaccttgtgatccgcctgcctcggcctcccaaagkgctgggattacaggtgtgagccaccgcacctggccgtgaatattttaatgtaagcttrtatactgtgctacctaaaagaaatgttaaggacaacagcttaactatggcaaggagtcaccatttccatcattcattcatcatggtyctcatttccaaaattccacctcaaagccattctagcactacgagttttttggagatgctgctgaattgcaatctaaactctctgccttacagtagtaactgaatgcgcagctcttctgtaaagaaagagccttcctcaaggaggccttggcggatcccgctattggccccatctccctttccatcctgcactctggataccggaaaactcggaactctgttttctaaatccccttgcccagtggaactgtgggattgggggtcactgcaaagatacccaaatagggcattgcttagtaaagtcgtgggwcagggccactcctaagacatcagaactgtagagccattagcatgcaacactagcctgggagagccacagacacaagactccaacccatgacagctgcacccagcaaagccatgggggtagggccaccaggagctttgagagtccaaccctcacccattgtgtccagatggtctgtcayggagtcaaagaagatggctctcaggccttaaaatctaatgttgttggtcccgttgggttttgggcttttacttgggacttgttatccctttcttctttcctatttctcacttttggaagaagtgtgtctatcccatgcctgtctccattgtattttggaaacatgtgacttgtttaatttcacaggtatgagctagaggggaatttgcctcaggttaaatcatgccttgagtctcaaccatatccgtgtaacaagagactctggacttttgagtagatgatgaaacaagttaggacatttggggctactggcatggaatgaatgcattttgcatgtgagaaggatattttgggaggatggggggcggaatgctatggtttgaatgtttgtgtcccctccaaaattcatgttgaaacttaatccccaatgcaacagtgttgggaggcggggcctaatgagaggtggttaaatcatgagggctctgccctggtgaatggattaactttgccataaaacaagcttgcaggagtgtgttctctctctcctgcacttstgccacatgaggactcagcgttcctcttctctggaggatgcagcaacaaggcatcatcatggamccagagactcaaccattggtgcctttatcttgaatgtcctaggctccagaacygtgagagaatagatttstgttcctcataagttacccagwctgtggtattctgttatagcagcacagaatggactaagacaaatccctttctgcttaaattggctagattgcattactttgcttggaattaagaacctgacaaatacaagcctgctccctgaattgcaagagcattttggggaattcaatagacctggatatgaaaactggctctactaattgctggctgagaggccttacgcaagctctctaacattactgtgcttatgtttcctctgctataaaaggatggtggaggaggaggctaatacctaccacattgggctgattgtgaagatcgaatgaggtaatgtctgtaacatatgtggtgtggtgcctggcacatagtaggtsctccatatatcatcgtttcctatattttaaaaatayaattttttttggagtggagtaccaaaccttttagagaaaagtgcagctgaacatccagtggtgggcamgaacaagtagacagctcaaagctaggacactaggaaaaataaaattytgagagaggttggggccaggagtatgtgcatgtgaggacmcagtaartgtcgtatgagataaagcctagaaataagaccagactgatgtgttaaaagaagaaaattaactacaagttagaaaggcatgcttttctactcgggaggctgagggaggtgaatcgcttgaacccaagaggcagaggttgcagtgagccgagatcgcgccatygcactccagcctgggtgatagagtgagtctccgtctcaaaaaaaaaaaaaaaagaaaagaaaaagaaatgcatgcttttgcaaataaaagaaaacacaacttcaggcttaaacaaataataggtaatttttcccacagcataaattcagaggtggattgttgctggcatcagttcaactgcaaaatgatgccatcagggattcagatttcttcccaccctgctgtgcttggcatattggcatttgtcctcatgtgtgccatctcaagatttcgaagaggccgctcctgctgctccaggaatgccccccgttcaagctggtgaaaaaggggagggggaaagcttttttctctggtgcttttgtgtgtttttcgggaaaggaatccctctcaagtcagctccacttccatctcatttgccagactggatcatgtatccactctaaataaattattagtcaagggaataagatcacaggaacactatgattttttaaaatgccatgttaggccaggcacagtggctcatgcctgtaatctcaacgctttgggaggccaaggctagcagattgcttgagctcaggagttcgagaccaggctgggcaacatggcaaaaccccatctctacaaaaaatacaaaaattagtcaggtgtggtggcgtgtgcctgtggtcccagctacttgggaggatgaggtgggcagatggcttgagcccaggaggttgaagctgcagtgagccaagattgcgccactgcactccagtatgggcagcagagcgagattccgtctcaaaaaaaaaatttttttttaattaaaaataaataaataaagtgaaatattatgttagctttgtggtttagaaagggaaagtcatgacagactcccactccaaaaaggtggacagataagagtaaattgaagcaacagagtcacgctatcttttcgccactcattactggaagtccttgtgaagtgccaagcagaggagcctttctcaaaaccatacgtagccccagcctccagatctgctgggaattaaacagtgagctagcagggaggcggaagtaagcctagaacagacaagctgggactaagaaaacatattggtaatagacgcaatgcccaaagtgaagacagtatcttaaaatttaaaagtccaaagctaaggaatccattctgatagacaggaacctcagcataggagtctatgggtactggtgaaacttgctgtcaaaattatggtaccattgtggattcagggatagccaggacacaggacaaagctgtggcttccgggcactgaggccaactccactgggaagaaaagagaaggctaaaaggagctatgcagaaaatctggttcatcaccaaatgggctaggttaatggtgagactcacatcctagtaggcacctaagaagaatcccattcaatcaaactggacacataaattgcggagtgaggaagtgagaagagggaaagtacctctgaacttttccctaagctcatttcagcagaccagctccagatccttcccagatgttggaggtcctaatccagtcagatttatttttccttgactgtgcagggctagacccaagctatgacactcagctgttgaaagagggaatattaattccttcaacaacttgagcatcctttaggtgccaagcaccattctaagtgctggagatacaacagtagacagatgtaatccccaccctcatggagttcattggttccccctgaataattgtggggaaaaaaaaaaactactgacaaaggctgcagcttaccaaggcttcagcatcccctgacctaagaagaaatgtgaatctcatgcagggattaaagatgtgtaaaatgccaaccctgtctccaaggcctgatggcctaaagggaaagtttcaatgaggacactcctccaggagacctctaaagaggcataaccaccaacacagagaccatgacagcttcgagaaaccagcactcctgcctctcagggagtgttccygcactttcacgtagggcaagggctgcatctagagctgcccttmctctagaacagggaaaggcagctggagcatcctccacaaatcacctgccccctctcctttgcttcttaccgttatgtttccagagtctgatattcctctggtaaacagtggacatcacctggtgatcagtatacatcaagaacaagagcactgatgataaatgttattaatactagaactgtcatgcaactgtctacatttcttttttttctttttgatacaaagtcttgctcttgtcacccaggctggagtgcagtggcgcatgcagtggcgcaatctcagctcactgcaacctccgcctctcgggttcaactgactcttctgcctcagcctccccagtagctgggattacaggcacccgccactgtgcccagctaattttttatttttagtagagacagggatttcastatgttggccaggctggtctcgaactcctgacctcaagtgatccacctgcctcggcctcccaagtgctaggattacaggtgtgagccactaagcctggccagctgtctagatttctaacagctgtgcccaggacttcactcttttttttttttttttaattcttttaatcatttggaagggtttcactctttacttgagttacctactatgtgcctgaaaatgctttcctgccactgattgcttgccttactaacccaatgacctcaattaccaatatgaatggaggcattgaaaaacagttcagaaatgcaaagttactcatgcaaaccaccacattctcattccactcaccaggtactctgttaaagcatatgttatcagggcacatgtaattttcagccaacaccatttcccaaggtggtggagaatttacatgcattattaaaatcaacattccagtcttttcaacaaatggtgcaggaacaactgcatatcttcttttcccttttcttctctctctctytttttttttttttaatgagatagggtttggctctgtcacccagactggagtgcagtggcaccatcttggctcactgcaacttctgcctcctgggctcaagcgatcctcccacctcagcctcccaagtagctgggactacagatgcatgctaccacacccagataatttttttgtatttttggtagagacagggtttcmccatattgcccaggctagtctcgaactcctgacgtcaagcaattaaccatcttggcctcccaaagtgstgggattacagatgtcatctaccacacccagcctaaattctgmatatctatattggraaaaaaaaaaacctcaatccctacctcacaccacacacaaaaattaactccatgtggatcatagacctaaagataattgctaaaaccatgcaacacagggaaaaaaatatttacaaacttgccaaagcagaaaccataaaagaaataattggtaagttgcatttttatcaaaatgcaaaacttctgctctttgaaagacaaaattaagaaaattaaaaggcaagccacaggctgggagaaatcatcataatacatatatctgacagaggactggtagtcagaatacatacaaaattctcacaactggccgggcacagtggcttacrcctgtaatcccagcactttgggagrctgaggcaggaggatcacykgagttcaggagttcaagaccagcctggccaacatgatgaaaccccatctctaccaaaaatacaaaaaaattagccagccaaggtggcacgtgcctgtcgtcccagctactctggaggctgaggtgggaggatggcttgagcccaggaggcaaaggatgcagagagccaagattgcaccactgcactccagyctgggygacagagcaagactyyatctcaaaaaaaaaaaaaaaaaaaaaaaaaaaaaaaaaaaaaaaaaaactcttacaacttagtaataaaaagacaacctgactggctgcccaaaccaaacttggtttcccagaattggctgacagagcaaaagcttgtttaatttgaatctgaaaaggacacacagtaacccctcactctttgaggaggctagtgagaggagtcagatctggtgttacggggtgaattgtattgtttccaaccctctccatccttgcccaaaattcatgtgctgaagccctgacctgcagtacctcggaatgtaactgtgtttggagatagggcctttaaagaggtaattaagttaaaatgaggggaaaacccttatcttatacaagtgatgtccttataagaaaaggaaatttggacaggtacagagcaaaagaccatgtgaagacaccgagaaaacggctgtttccaagccaaggagagaggcctcagaaaaaaccaaccttgatctcagacttctggcctccagcactaatctcccaagaaacaaactcttagaactggcctaggaatatctacgaaaacaatggtaaaaattaaaaaaaaaaaattgtcacatgagttacctgtctcctgctgcaatctggtgtccaaggtgaaataccattgtatggtgtactaagcaagccacagggtttccagcccatgcacagagtcattccgtctcagccaggtgaactccacatcatttccatcatagccctctgataaaggaaatggagccctggtcagtgcaaggacattgcagattgaactagtctagaaaatgctataatagcccggcacggtggctcatgcctgtaatcccagcactttgggaggctgaggcgggtagatcacgaggtcaggagattgagaccatcctgactaacatggtgaaactccgtctctactaaaaatacaaaaaattagctgggtgtggtggcgggcgcctgtagtcctagctactcaggaggctgaggtaggagaatggcgtgaacccgggaggcagaacatgcagtgagcagagatcgcaccactgcactccagcctgggcaacagagtgagactccgtctcaaaaaaaaaaagaaagaaaatgctataatatgtaaatagcatgagttatgtcttcgtggtgacaagtccaaggacaatccctgcaaaacttggcatgatttctcaagtgcaattgcaatgtctgttcaaaatgaagtgacctgctrggactgtttgccgtcaattgagaactggtcctatgctagatattgtgtagatcaggtaaatgataagtctttagaagtggcctccctcattatttaaatgttattattgaacaaatatccatgaacacacaaagcttatgttagatactgcctttcaagactgtctaatagctctcgtggtattttcagggaacagaatgtagaactgagctgttcatattttcacattggcataaacgcaaaactaaaacaaaaaacctgcactcagctgctttcttaaagtctgtaacatgtgtgttaaatctcaaaacagtttaattaatacagttgataatagtaacaacagttaccctttgaacacttatgttaagtactttatacattatgtcactaatgttcttgcaaacttgcaaggaagccatttcttcatttctaagatggacatgtctttacattttctgaagttgagatggactttacagttgattgtatctatctatctatctatctatatagatttatatatatatatagtagagcttatatttttcctaaaatgctactatccaataaattctgttccataggaaaaaaatgacaacccattttcttaaaatgagtgaaagatttgaacagacactttttattttttttttgagacagagtcttgctgtgtcccctaggctggagtgcagtggtgtatctcggctcatggcaacctccgcctcccagtgaatagatgcttttaccaaagaagatatatgaatgatcaatcagcacatggaaagatgctcaaaatcattagtcatcagagaaacgcaaattaaaaccacaatgaaatatcactatccacaattagaatagctgaaattcataccatttttcattaaaagcaccacacctaaaccaggtccagggcggaaaaagtacaaaataaaattggaaaaaaaaaaagaaaaggaagaaaaataagcttggaacagcttgttgccccagaaagtaaaaacattatcaaaggctaatgatgggacacatcaaataacaaaaaattccataagccagcttgaagagggtccttttggtcaaagataagatgatttgaacatcaagaagaattattatttcaattgattaaaataaataaaaatattactctgggggctgaggtgagaagattgcttaagcccaggagattgaggctacagtgagttgtgttcgcaccactgcactccagcctgggtgacagagtgagaccctgtctcaagtagataaacaaatatataaataataaaaagtcataatttttttaaagaggaaagaacaaacacgccatagtgaatgaatcgagcaaaggttgctgtgcaccaactcattactccaaaaactgataattaaggggaaagaaccgagattttatatcacctttccagtatgaacagtatttcctggaaatcaaataaccctactagataagagttctatatagaataattacagataataaatgtagtattagaaagtcaacattttgtagctcctaataaaatgacttaaatactggttatcaatagatgacaaaatcattaggtaaaaaggttgatgccaccacttgaactcgctgatccatcttagcagccactgtaagtgaaacaaccagctattgcatgcttttgaatatgaggcaataggaagcatacagcaccacctatgaagtagtcataaactaagcaatacaaagcaaaaccttaaacctgaatctattcaagcctgtagtctacaagaaaaatagaagatagaggaaaaagttaggtaacactaggaggaaatatttagtcaaagtcagaatttaggacatcatgcaggacaactaacctgtctttgtaatcaagtcaatggcattaaaaaaaaaagtgtgggctctaatagaatctgtagaaactcaacataatctaaccttactgaggatgttgaataaagggactgaccaaatttactgtcacatagattgtcaacctaaaataaccaaaaggctcaggatccagttaaaagagtttattacactattcagccataaaaaagaataaaatcatgtcttttgcaacaacatggatagaactggagaccattaatttaagtgcaataactcagaaacagaaagctaaatacggcacattctcacttataagtgggagctaaatactgtgtccacatggacatagagagtgaagtgataaacaatggggactcaraagggtggcggggctgggtgcagtggctcaggcctgtaatcccaacactctgggaggccaaggcggacagatcacttgaggtcaggagtttgagaccagctggaccatcagggtaaaaccccaggaggctgagccatgagaatcgcttgaacccaggatgggcgacagagaaagactctgtctcaaaacaaaacaaaacaaagcaaarcaaaacaaaacaaagcaaaacaaacaaacaaacaaaaaaaacaagaagggtgggaggatgtagagggatgagaaattacttaatgggtacaatgtagtatttgggtgatggctacactaaaagctgctgtgaaaatatatccatgtaacaaaactgcacttgtactccctgaatctataaaaataattttaaaaatagcttattcaagtgcaaagtgtgagggtggctgtatgggaaaacagggataccaaagaatggcgatgagtgctccccagtgtagagaaaggtaggggtcatttatataggaaaaaacaagaatgctgaacagaattacattttccacacaagactaacaaacagttacaagayctgattggttatgatcgattacgctctaagtggttgcttaacatttcatataaagaggtagataaagagtctctatctccaacaagatttaatctaggtttgaataaagcataggagtctggttaatgtataacatctcaacacaaaggtcaggaagcaatggttgtgcaccagacaagaaaaacagccatattatgtgagtcagtttccgggacttaatttttccccttggcataataaatctgaaattttcttttcttttcacagatgttctgttagagacaactgtagggagtactgatgaaagaaatataaaaacagaacatcaaagtaaactttattgaatcaatactgactgttcactgtaggatgatgtataacaattggagctttaactccagattaaatagagctgaaaatacatcatagctttgtaatcacttataagctatctgaatacatgaatttaaatactttttttttttttttgcttaacaattaaattagctaattctatacttatgaattggcattttcccttgggtcttaatttcttgtttctccaacatgatgtttttttcacagacaaggtctcactctgttgtccaggctgaagtgcactggtacaatcatagctcactgcagcctcaaactcttgggttcaagcgatcctcctgcctcagccatytgagtagctgggaccgcaggcatgcgccacaacaaccagctattttttaaattttttgtagagacaagatctcactatgttgcccaggctggtttccaactcctgggctcaagtgatcctcccactcaagaggccagacagtggctcaggcctgtaaagccagcactttgaaaggccaaggcaggaggattcttgatgccaggagtttgagacaagcctgggcaccgggcaacatagcaagatcctgtgtctacagattttttttatttgagacaaaatttacctctgtcacccaggcaggagtacggtggcacaatctttggtcactgcaacctccacctcctggattcaagcaattctcccacctcagcctcccaagcagctgggactacaggcatgcaccaccatgcctggctaattttttttgtatttttgggctgtctttacaattttttttttttgaratgtagtctcactctgctgcccaggctggagtgcaatggcgtgatctcagctcactgcaacctccgcctcccaggttcaagtgattttcctgcctcagcctcccaggtaactgggattacaggcttgcaccaccaggcctggctaatttttgtatttttagtacagacgggatttcaccatgttgaccaagctggtcttgaacttctgacctcgtgatccaccctccttggcctcccaaagtgctgggaattacaggcatgagccgctgcgcccggcctacaaaattttttaattagctaggcatggtgctgtgcacctgtagtcccagctatgcaggaggctgaggcagaaggatcgcttgagcctgggagttcaaggctgcagtgagctgtgactgaggcacagcactccagcctggctgccagtgtgagacccttcctccaaaaacaaaacataacaaaatatttaaaagacaaaaaacatatgcaatgagtggaccttttttcttggttttcttcgtaccctgattcaaacaatccaatagcataaatataattttagacatttagaaaaatttaagtaaggactcattttagaaatctgaatatgaggccgggtgcggtggctcacatctgtaatcccagcactttgggaggctgaggcgggtggatcacgaggtcaggagattgaggccatcctggctaacaaggtgaaaccctgtctctactaaaaatacaaaaaaaattagccggaagtggtggcaggcgcctgtagtcccagctactcgggaggctgagacaggagaatggcgtgaacccaggaggcagagcttgcagtgagctgagatcccgccactgcactccagcctgggtgacagagtgagactccgtctcaaaaaaaaaaaaaaaaagaaatctgaatatgggtccaggcgcggtggctcatgcctgtaatcccagcactttgggaggccraggcgggcggatctcctgaggtcaggagttcaagaccaacctgcccaagacggtgaaaaccgtctctactaaaaatacaaaaaattagctgggcgtggtggtgggtgcctgtaatcccagctactcgggagactgagccaggagaatagcttgaacccaggaggcagaggttgcagtgagctgagatcacgccattgcactccagcctgggtaacaagagcaaaactccgtctcaaaaaaaaaaattttgaatatgggtattggatgatatcaaaagaatattgttaattttggctcaggaactcctccaagtctttgctgctacatcctcaggccgcaggctgactgagatgctgccattcaaccttctttctccctctccttcactctgggtcagccttgcatgggtctgatgaggctgatcactgtgactgctctctcagcctttcccggcttcctccttgtttcctttcactctagtgtttcccccagtaaaatacttcaagtgtaatcccatcttgctgtctgcttctcagaagagccagactcgtcattttctaatgcttaatcctgcttcatatgcctatgttggtttccttctaccatttccgtatttccttcacttgtgtctttgtaacttgcccagcactcctccctgagaaggctgtggtgatacgtacaagcatctctcttcaaaccagtgtgcacatgaggagccccaatgtacactcatttggttcttcaaatatcagtagacaagattgagatagattgtaacaaattcaagccatggaaattagtttattcaaagactttgctttttgcatatgtcaaaatcttatcccagctgtgcctgaaagactcaggcatcaggcagccatatgcccatattttgacccctcagtatagagcatagcaagtcaactcaccacagcccttttccactgtttgcttgtttgtttttttgagacggagtctcactctgtcacccagggtggagtgtggtggcggaagctctgctcactgcaacctccacctccagggttcaagcaattctcctgcctcagcctcccaaatagataggattattacaggcatacgccaccatacccagctaatttttgcctctttagtagagacggggtttcaccatgttggccaggctggtcttgaactcctgacctcaagtgatccacccacctctgcctcccaaagtgttgggattacaggcatgagacaccacccccagcccttttttgctgttttttgaaagagggtctcactatgctgcccaggctggactcaaactcctgggcttaagggatcctggctcctcagcctcctgagtagctggaattactcagaaggctgagtagcgcacaccatcatgcccatacatatgatttctcccttcacatcagcctgataaaaatccccatagactctatgagtattctatcatcccctccgggagactgtagagtttgaaattaaagtcaataggttccaacagacatttatcaaagatagaatttccactctgcatgttaaccatttgcatttttgttaggcacatgggtcattcttgccatcagcagatgttttaattaaataaagaaagaagggcaaaacaaacaaacaaacaaacaaaaactcacaaataaagtcaataggttccagaaacatacaatctgtattgaaatcccagtcttacttcttcaaactttataaaccttcatttcctggtctgtaaatcaagttctgtaacttaggtttctgcctcatactgttgctaggatcagaacagtgtttgatactgactggcccgtgcttagagtgccctcagtgctcaccaagttattttcacttggcacagtggagccggcatctccactcactctttcctgctgtctaccgttgactccgttctcagagacttttctggggcaggatgatctccatttgagggatgcctagggacagagtacacaggaggtaggaccattggagaaactcccggctgaatatagtaggaaagaatgctcagcaagaggctggtaatggctccaaggacatcttggctcttccacatgagagtttctgttctcccagcttccatgtgcaagccacagtagtcaactccagctgatctaagatgaaaaaaaaagttaactcaacagatactgggtttctcagagaattgtttggaagcctagagaaccacgctctctagccagcaggtgccagagaggaagtttattatccctatttcttctgtcactggctccaaagtcaaaagaaagacaagaacgttgccagacctgggtcacatggctgaggcaacacaggctggaaaaatctagtttctggcaatctctgcctacaactaagacttttttttttttttttctcagacagggtctcgctctgtggcccaggctagagtgcagtggtacaatcttcactcattgcagcctccaccacccaggctcaggtgatcctcccacctcagcctcctaagtagctgggtctacaggcacatgtcaccatgcctggctaatttttgtattttttgtagaaatggttttttgccatgttgtccaggctggtctcaaactcctgggctcaaggtatccacccacttcagcatcccaaaagttctgggattacaggcaagagccacttccttcctcctccttctcttcctccttcttccytctccttcttcttctccttctccttctactctttctcctttgkcttcttcctttttttgtttgtagagacagggtttcactatgttgcccagrctagtcttgaattgctgggctcaagtgattctctcaccttggtctcccaagtgctgggattacaggtgtgagccactgtgcccagccttttatgtgagatatcaaatgtaattgtttcggtcatttttaatttggattttctgttaccggcaaccagaagcatcctaatcaatttactgaagcttagtaaaattgagtaatttgcaagtacaaagatttgcatctagtacatcacactacctaccatttctttcttatatacagaaaagaagcattaactcttagtgaagaatggttaaaaatataagctgttacctagccagtggaaggttcaaattcctaagaaatgaatgcgctctattaagacagggtctcactctgttgcccagactggagtgcaatagtgttatcatagttcactgcagctaaccctggggctcaagacatcctcctgccttagcctcctgtgtagctgggaccataagtgcacgccaccacgcctgttttgtgtgtgtgtgtgtgtgtgtgtgtgtgtgtttttggtagagacagagtctcactatgttgcccaagctggtctcaaactcctgggctcaagggatactcttgcctcggcctaccaaagtgctaggattacaggtgtaagcccctgcacccagccaatgtgcaattttttattggattttgaagcaaaaaataaaaaaaagaaaagctataaagcaaattgttggaactaatgaggaaattagaatgcagacaatgtattagaaaatagaataccttgtayagttataaattctctgtgtgagatcagtttatttggctatgtaggataatgcccttgcacttagcatctaaagwgamatatttttattttaaaaggctagaaaaaggctttacagccacraggttttctgacagaaatgctctaagaaggggakgagggaaagatttccttccttcttggcaaatgggaaactcatttttgaaatctacccttacaatagataaayggatggtggaggtgggggcgtggaattaaagtaaacatggcaaaaattcagtgattgaatctaggaaaaatggcataaaggtgttcactgcagtattctttcaattmttctaaaggcttgaattttttttcaagataaaaaattgagaaacaaaatacagcattcaaatacttcaaaacatgagtcttacataaatatcagataaastgtcaaacgtgaatgtagcttaaaggtttatttaactcatcaatgagggggaccagctggatggaaaaattggttctaaggagaatttgaggaaccacatatgtatcaccactgggggaaaaacagaacaccagcatgtttgctaaatcagatataagactggttaaatttagcttaaaatgaaaatgaaaactgggtgcagtggctcacgcctgtaatcctagcattttgtggggccaaggagggcagatgctgcagcccaggagttcaagacctgccttggcaacatggtaaaaccacatctctacaaaaaataacaaaaattagccaagcatggtggtgagtgcctgtagtcccagctactcactcaggaggctgaggtgggagaactgcttgaacccaggaggtggatggaggttgcagtgaccaraaatctcaccactacactcctgcctgtttgacagagtgagaccctgccaaaaaaaaaaaaaaaagaaaggaagaaagaaagaaagaaaaagagaaaagaagaaggaaggaaaggaaaggagaaaactgttacctttggagttccaattggacagaaatcatttacatctttaaaaaatatcattacaaactatcggctgggcgaggtggctgctgcctgtaatcccagcactttgggaggcagaggtgggtggatcacctgacgtcaggaatttgagaccagcctgaccaacatgttgaaatcccacctctactaaaagtacaaaaattagccaggcatggtggcaggcacctgtaatcccagctattcgggaggctgaggcaggagaatcacttgaacccggtgggtggaggttgcagtgagccgagatcacaccactgcactccagtctgggcaacagagtgagactctgtctcacacacacacaaaaaactatcaatctgtktaacatttaacttcatakagtctgggtcctaattgatttgagagcaaagactctcaaagtggtgccccgtggtccttggtggggagggccctatgctttcaagaggcctccaaggtcaaattagttttataataattattatatttagctytttaacttccattctctcatgagtgtaaagtggaattttctagaacctacataatatcacaacatattgaatacasaactgattagataatctgtcttctagtaggtcagatattaacgagatttgcaaaaatgtaaaacaagggcattctactcatatgttttatttttggaaaatatagttatttttaaaatatatattattggccaggctccgtggctcacacttgtaatcccagcactttgggaggctgaggcgggtggatcacctgagatcaggaattcaagaccagcctggccaacatgctgaaaccctgtctctactaaaaatacaaaaattagccagatgtggtggcaggcgcctgtaatcccagctacacasgaggctgaggcaagagaatcgcttgaacctgggaggaggaggttgcagtgagccaagacggcaccactgcactccagcctgggcgacaagagcaagactccatctcaataaataaatatatgtrtatgwrtatatatatatatgtrtgtgtrtrtatatatatatatatatagttgaagattaaccggaagcagtggctcacacctgtaatctcagtattttgggaggccaaggcaggcagatcacttgaggccaggagcttgagaccagtctgggcaacatggtgaaaccttgtctctacaaaaaatacaaaaattagcccagtgtgtaatcccagctacttgggaggctgaggcaagagaattgcttgaacttgggaggcaraggttgcagcgagccgagatcacgcaactgcactccagcctaggtgacatatttttctgtctcaaaaataataataaataataaataaaaaatctactctcctgttcatggacatttagattgcccccactttttctacagtacaaaccatgacatcataattgtgtaggaatacataaaatatacagccatgtatatacatatatatacacacatactgatakatatagacatagatagatgatadatgatagatagatagatagatagatagatagatagatagatagatagatagaaatattgcattatttttgtagggaagagtttttgactccagttttctatcccaaattgattagaagatttaaaatacacaaaaaaggtgtcaggtgtcaccatagcgattcgtgtttgtaaaatctccagcattccagccttcccgaaggggctggtgagaggaaaataatgtctttgcccctaccacttatccccaaccccaggcagcccagaccacagaataatgctgccctaccccgccccaagaagcaaggcaggtttagtccacagcagagctttttggttcagtgactctctacagtgctagtactgccctctagagggcaatttggaaattttttgaagtctgtaccaacgatttagagggctggcgggatttgcatgtttgcatgggcccggctgaggccagcgacagtaaacaatgtgtagaacagcctccaaaagcaaaattgttccccagcccagataaacttttagtgtccctccacccatttatgaaggttaaaaacctgtttataattatctgagcttaaacctaacttttacttctttttttttttttttttttttttttgagacggagtcttgctctgttgcccaggcaggagtgtaatggcgcgatctcggctcactgcaacctccacctcccgggttcaagcaattctctgcctcagcttcccgaggagctgggactacaggcacccgccaccatgtccggctaatttttatatttttagtagagacggggtttcaccatcttggccaggctggtcttgaactcctgacctcatgatccacccgcctcggcctcccaaagtgctgggattacaggcatgagccaccgcgcccggcctaacttttacatgttaacaaaatatttttgcatagttttactagacactgaattttccaggaattcaatcactgtagatttgcaaatctaggaaatactgtacttttcttggctcaggattttatttactcaccattttggaaaatcatgtctctgaaggaaagcctaattttggtattttagtcagtgatacaccataactgtttctatatccatccctttttcagtatttaacggtgttgactaaaagagtcaaactctgtaaaacattttttttttttgagaggagtcttgctctgtcgcccaggctggagtgcagtggcacgatctcggctcactgcaaactccgcctcccgggttcacgccattctcctgactcagcctcccgagtagctgggactacaggcgcccaccaccgcacccsgctaattttttgtatttttagtagagacagggttttaccatgttagccaggatggtcgcgatctcctgacctcgtgatccacccgcctcagcctcccaaagtgctgggattacaggcgtgagccaccatgcctggccggtaaaacattttaagagatttattctgagccaaatacgagtgactatggccggtgacgcagccttcaggaggtcctgagaacatgtgcccaaggtggttggggcacagcttgggtttatacattttagggagacatgagacatcaatcaaatacatttaagaaataacattggtttggttccaaaaggcaggacaaaaagcgcgggggggcttcataggtaaatttaaacattttctggttgacaattggttgagtttatctgaaggcctgggatcaatagaaaggaaatgttcaggttaagataaaggattgtgggtaccaagttttattgtgcagaggaagmtctcagatagcagacttcagrgagagcaggttgcaaaatgtttcttatcggaactaaaagggtgcttggctcttagttgattatctcctggatctggaaaggaaggaaggacaaaaaaggggaaaaggggattctctacggaatgtggatttttcccacaagagatggctctgcagggccatttcaagatatgacagagaaacatgttttgaggtaaaatatttttattttcttccttgccatggccagagtcagattggaaagtaagtctcaatatacaggattaaataaaacccatctgatgagaactgatgatttgtggrgcatgactccccagactccttacataagaatttggggraaaaaaaaaaatcagagcttcgtcctcaacatagaggcccaagcatctcactattcattatgccttctgatgttatcatatccaagtaatgcgactgttaactacagtcatctctcagcatcaaacagggtgttccagggcccctaaggataccaaaaacttgtaaatgctcaagttccttatataaaatggtacagtatttgtatatgacttacacacatcttcctctgtcctttaaatcaagcttctccrgccgggcacggtggctcacgcctgtaatcccagcactttgggaggccgaggcggtcgtatcacaaggtcaggagatcgagaccacggtgaaactccgtctctactaaaaatacaaaaaaaattagctgagcgtggtggcaggcgcctgtagtcccagctactggggaggctgagggaggagaatggcgtgaacccgggaggaggagcttgcagtgagccgagatggcgccactgcactccagcctgggcgacagagcgagactccgtctcaaaaaaataaataaatacaaagtaaaaaataaaaaaaaatcaagcttgttcaacccgcggcccaagacagctttgaatgtggcccaacacaaattcgtaaactgtcttaaaacattatgaattttttgctatatatatgtatatttagcttatcagctatcgttagtgttagtatattttatgtgtgacccaagacaattatttttcttccaatggggcccagggaagccgaaagattggacactcctgctttaaatcatctctagattactgataacacctaattcaatgaaaatgctatgtaaatagttgttatgctgtattgtttatttgtatcatttttattgttctattgttttttcaaatatttttcatccacagttgattgaatccacatggtgtgccgactgtatatattatttttaatataaattattttacttttaccactcctgtgtgcttcgactgaagcattttgttgatttttgtatattgtgtgtataagtagttgtatagtgaaaagtgtcttacaacatatttattactgaaacaaggcacaataaaaagacaaggttttggccaggcatggtggctcacgcctgtaatcccaacactttgggaggccaaggtgggcagattgcctgaggtcaggaatttgagaccagcctggccaacatggtgaaaccccgtctctactaaaaayacaaaaattagctgggtgtggtggtgcacacctgtaatcccagctactcagtaggctgaagcaggagaatcacttgaaaccgggaggcggagattgcagtgagccgagatcatgccatagcactccagcctgggtgacagagcaagactccgtctccaaaaaaaaaaaaaaagacaaggttttatgatcctgagcagaacagtttaccttcctattgcttgtgtcaacgaaaagagtcaaactctgtaaaatattctaagagatttattttgagccaaatatgagtgaccatggtctgtgacacagccttcaggaggtcctgagaacatgtgcccaaggmggttggttggggtgcagcttgggtttatacattttagggagggcatgagacatcaatcacatacatttgagaaacagattggtttcgtccagaaaggtgggacaattcaaagcaaggttggggtagggggcttccaggctataggtaaatttaaacattttctggtttacaattggttgagtttgtctaaagacctgggattggccgggcgcggtggctcacgcctgtaattccagcactttgggaggccaaggcgggtggatcacaaggtcaggagttcaagaccatcctggccaagatggtgaaaccctgtctctactaaaaatacaaaaattagctaggcacagggcaggtgcctgtaataccaactactcgagatgctgaggcaggagaatcactcaaactcgagggggcagaggttgcagtgagccaggatcacgccagtgcactccagcctgagcaacagagtgagactccatctcaaaaaaaaataaataaataataaataaaaatttaaaaagacctgggattaatagcaaggaaatattcgggttaagaaaaaagattatggagatcgaggttcttttgaagtttcacagtggctgcccttagagacaatagatggcaaatatttcctattcagacctttaaaaggtgctagactcttagttaatttcttcaggattgagagggcctggaaggaaaagatctagctatgttaacagagattctttacacatgcaaaatttcccccacaaaggatggcttgcagggccatttcaaaatatggcaaagaaacatgttttgggataaaatattttgattttyttctttgtcacgtaatgttatgcctgagtcagattggaaagtaaaacmcgatatataaggttaaataaaacccatctgatgagaatttatagtttgtagggcatgactccccagatytyttagacaggaatttgggcaaaaaaaaaaaaatcagagctgggtcctcacttcaaatgtctcctttttaaaataggactttgccttcactttttcacaatcaaaaggcctattgaagtgattttcttttctttctttctttcttytttttttttttttttttgagaaggagtctccctctgtcacccagactggagtgcaatggcaccatctcggcccactacaacctctgcctcccaggttcaagtgattctcctgcattagcctcctgagtagctgggattacagggacacaccaccatgctcggctaatttttttgtatttttagtagagacagggtttcaccatgttggtcaggctggtctcaagctcctgacctcatgatccgcccacctcagcctcccaaagtgctgggattacaggtgtgagccaccgtgtccggccaaagtgattttcttaaaaccaaagagtccccaaaacaaattcacatgtttccctctagcaactattaacgtcttatttctctttctcccctgccttcaatcttcgcatatctaggatatcttccttagattggacttacagttctcctcttggccaggcacggtggctcacgcctgtaatcccagcactttgggaggccaaggcgggcggatcacgaggtcaggagatcaagaccatcctggctaacacggtgaaaccccgtctctattaaaaatacaaaaaattagctgggcatggtagcaggcgcctgtaatcccagctactcgggaggctgaggcaggagaatggtgtgaacccgggagatggagcttgcagtgagctgagatcgtgccactgcactccagcctgggcgacagagtgagactctgtctcaaaaaaaaaaaaaaaaaaagagttatctaaaagaagaacccttcacagtcacacatttgatttcctcacaaaatgtgaaggtgagggctaggttccattcattgcagtagcttctggtacatagtatgtgttcagtaaacactggttgaattaaaacttagagaattggaaccaaaagacaattggaactgaagmcaatggaaacagaaaaactatatattaaaggttctcaagtgttggtcagaaaaagtatgcaaaacttggaaataaggcaaaaagctaaatagcacatccttttgttacaggaaaggagtcctgatccagatcccaagagagggttcttggatcttgcataagaaagaattcagggcaagtcagtagagtacggtgaaagcaagtttattaggaaagtaaaggaataaaagaatggctacttcatgaacggaacagccccgagggctgctggttgcccatttttatagttatttattgatgatatgctaaacaaggggtggattattcatgtttcccctttttakaccacatagggtaacttcctgacgttgccatggcatttgtaaactgtcatggcactggacggagtgtagcagagaggacaatcagaggacactcttgttgccatcttggttttgttgggttttagctggcatctttactgcagtctgttttatcagcaaggtctttaagacctgtattttgtgccaacctcctacctcatcctgtgacttagaatgccttaaccatctgggaatgcagctcagtaggtctcagcctcattttacccagcccctattcaagatggagttgctctggttcacatgcttctgacaatttcactttcatgcagtggcaaagatcatcatagggttgtctagagtgagggccaacgaactttatttgtaaaagttggtcacaaccctcaggctccactgtgccacggaccctggtggactgaacaaaggaggacgaatgmgggaataaagacaaagacaaacaagtatatttggaagaaggggtcaggggtctccttgcttctagtgaacaagggcyctgagcttctatagccctttgtatttattgagtaaaggaaataatgaggagggggtggttgtcagtcagctgtttcacttagtgcaggcctgcataactgctttctttgaacagtaggctccagatgttccagyagataacctcaaggagcacggcgccagggagtgattgccctcagcataccttctggtggcaggtgcagatgtgagtttccccacatcctgcattcgtgataaacagtttgctyttttatcatatagcctccagtggartgctgagttggtcatgaccctcaggctttccccagcatgtaaaggttcacatagtaaatttctcaggctctaagtcatagtaaatttctcaggctctgagtcaggtagaaaccctgtytctactgtgagctttaggatttctgtgttgagaactcaagtctaaatctgtggactttagaatctctgctgtgtgtactcaggactgccattgtggcacaaaagcagtcatggacaataagcaaaggaagaaataggctgggctccaacaaaactttatttacaaaatatgtgggctggattcagccagaggatcatagtaacgtaaagtttatcccattatttactattgattaagggtcccagaattcgtgaaattacttgttaacttgaagatttttgtcaggaagaaatgcaaataacttctgttggtgggacagatacaggtcacayrttgcttaacagcrgggagaaatgcgtgaggtgattttgtcctcgtgcaaaccttatagagtgtgcttacacaaacytagatgatacagcctactatatatggaatagcaaattgctcctaggttacaaacctgtacagtgtgttagtatrctaaatactgtaggcaattgtagcacaatggtaagtaattgtgtatctaaacataagtaggtacggtaaaaatatggtataaaagataaaaaatggtacacctgtataggacatgtttaccaaaattaaggctgttggggcacaaataatttgataaaggtttattggggccaagtayggtggctcacacctgtaatctcagcattttgagaggcagaggtgggcagatcacttgaggtcaggagttcaagaccagcctagccaaatggcaaaacctgtctcttttaaaaatacaaaaattggccaggcgcggtggctcacacctgtaaccccagcactttgggaggccggggcaggcagatcacaaggtcaggagtttgrgaccagcctgggcaagatggcgaaacctgtctctactaaaaatacaaaaattagctgggcatggtggcacagcgtataatcacaactactcgggaggctaaggaaggagaatctcttgaacccgggaggtggaggttgcaaggagccgagatggtgccactgcactccagcatgtgcgacagatgtgagacaccatctcaaaaaaaaaaaaaaaattggctgggcgtggtggtgcgtgtctataatcccagctactcaggaggctgaggctcgagaaatcacttgagcctgggaggcagaggtkgctgtgagctgaaatcgtgccactgcactccagactgggaacagagcaagaatctgtctccaaamaacaacaacaacaacaaaaaacggtttattggaagccaaatggtgtgaacatcayagagtgtacttatgttcacggaaccaagccgggtccrgctacgttttctcarggcccaataacaagaagcagaaaaactaggaaagaagagaatttattgctgtaaccagttacagggagcaggctggagataattccacaagaccaactcaaagtgttacaattttcttcatgattatataggttggggttatatgcccacatgcagtatagcattcacctaagtctattggtaactaattttgtttcaactagaaggtcagaggcaaactaatgcttactaagtctgattaaaagggcctcagtaccttcaaggcctgtgtactgtggtaccagagtgattatttctatcttatctcctttacagcttggtctggagtgctgccttagactctccaatgaatytactcaaacagctctgttaccttgactgtctcagatttcgttgacccgagatgggtcctgcactaggaatgaaagactgtattattttggtttgctccaggttagggagaagcccacgcaaggctcctactgaccataygyttcatttctagctttgctgtctgggtgccgattttgctaggtttaactatttgctcaatgttaaggcagctctgtggaaatctgtgtaactggastgctatgcaggcctgtctgtgtgattgtcagggagaattggcctgccacacttacacaaatctaggtggtctagcctaccatacacctaggctatatgtatggttgacctgggaagacacgctaacaaagttgggagtgttctggagtctgctacaagttggaaggcttttatgggaaagtttagaagaagggaggactcctgacagcacaaccatccttttcactggaggtacaacacagaggttacaatcattggctacagactgcaatataaaggctaaaatatcgacatttgwttcaaaagtgagtcagagtcctcttcagtgtcaggaggttgtgcattaatcagtacttgacaatttraggaactcacaataagattcgttactcagggacaagatgtttgcatgaatyacaagccctccctcaggctgttaatttagaagcctatttactttaaagtcaactgcccaaaagtgccctgtagtttatcaggcacttactatgaatggagcttgcagcactggaggttgcctgggtgagtcactgagtggtgattgaatgtgaaagcctrcaacattacggtgcactactgtagattataaccactggacacttaggctatgctacatttattatttatttatggatggattattttattttatttttgagacagggcctagctctctcacctggctggagtgcagtggtgcgatcacagctcactgcagccttgacctccctaggctcaagagatcctcccacctcagcctcccaaatagctgggaccacaggcacccgccaccatgcccgggtagtttttaaattttttgtagagacgaggtttcaccatgttgctcaggtggggcatttatttttaaacattttttaattttttgtgaggtctcactctgtctcccaggctggagtgcagtagtgtgatcatggcttactgcagcctcgacttcctgggctcaagcaatcctcttgcctcagcctcccaagtagcggggaccaccgacatcagccaacacacacagctaactttttgtaatttttgtagagatggggtctcactatgttgcccagactggaaaacattttcttaaataataaatcttagcttactgtagcttttttactttttaaactttaaaatttttaaaaacttttgactcttttgtaataacacttagcttaaaacacaaacacattggccgggtgcagtggctcacacctgtaatcccagcactctggaaggccgaggtgggcagatcacaaagtcaggagttcgagatcagcctggccagcatagtgaaacccgtctctactaaaaatacaaaaattagcagggtgtggtggcacacacatgtaatcccagctactcaggaggctgaggcaggagaattgcttgaacccaggaggtggaggttgcagtgagccgagatcatgcctctgtactccagcttgggcgatagagcaagactctgtctcaaaaaaaaaaaaaaaaaaaacccacaaacacattgtacagkgwtacaaaaatatttcctttctttatatccttaatctataagctttttttattttttaaactttttttgttcraaactaaratgcaaacacacacattagtctaggcctacttatastcaggatcatcaatatcactgtcttccacctctacgtcttgtcccactagaaggttcagggacaataacatgcatggagctgtcatctactrtgataacaatgccttctggaacacctcctaaaggacctgccggaggctattttgcagttaactttttttttttaaataagtaggagtatactctaaaataacaacaaagaatagagtaagtacataaaccagtaacatagtcttttattatcattataaagtattatggactgtacataaktgtgcmtgctatacttttatatgactggcagcacagcaggtttgtttacaccagcatcaccacaaacacaccagtaatccagtatgctatgacgtcagaatagccacagtgtcactaggcaataggaatgttttagctccattataagcytacagaactgctgtcatatatacagtctgccattgatcaaaatgttgttattcagtgcatgactgtaactccygatttgtggcttgttggacattaacatttaattcactatcttagggttctccagagasacagaatcaatgggacatgatagatatagatcagatagatgatatagatataaatatagatataggaaaaaggatttmttagagggattggctctcacaattatggaggctgagaagttccatcacaggccatctgcgagctggagaccttgggatgtcagtagtgtggttcagcccaagtgtgaaagcctcggaaccagggaaactgatggtataacttcaatctgaggccaaaggcctgagaactccaggggccrctgatgtaagtcctagagtccaaaggcccgggagcctggaaytgttgtccgaggacagaagaagaaaagtgcatcccagctctggcagacagatggacacattctccctttctgttcttgttctctctgggcccccagcaagttggaccrtgcccacacacattgaggggaatcttccccacttagtccactcagactcatatggtagtctcctctggaaacatcctcacagacacacccagaaacaatgctttactaagtttctagrtattccttaatccagtcaaactgacacctaaaattaaccatcacactcatgkcttgtcctagaaatcttcttgtttctcaaatgctctttgaactggtcactgcatctttactggttccctcattaatcggtgagctaagtaaaatctttgacacatttcaytgcatatttgccagacagccacattgttaccttcttgaaaactatactttaacatgtctcataagtacaaaaatatagactctagacccaggtctttcccactatcatgggaaggggaccagtggttgtacgttctgcatttcactaattttgaaagyctggttcaacactatgaaatagtgatgtgaagcagtggtccccaacctatttggcaccagggaccaatttcgtggaagacagcttttccatggactggtggtggggtggggatggtttcaggatgaaactgttccrcctcagatcatcaggcattagattctcataaggagtgtgcaaccaagatccctcacatgcacagttcacaatagggtgcacgcccctatgagaatctaatgccactgctgatctgacaggaggcggagctcaggcagtaatrctccctcgcccaccactcacctcctgctgtgtggccccattcctaacagggtttggggacccttgatgtaaataactgttgttgttgttgttgttgttgttgttgttgytgttgttgttgagacagagtcttactctgctgcccaggctggagttcagtggcatgatctcggctcactgcaaccccaagttcagtggcatgatctcggctcactgcaacccctgcctcccaggttgaagctattctcctgcctctgcctcccaaattgctggtattacagacgcgtgccaccatgctcagctaatttttgtatttttagtagagatggggtttcaccatgttggccaggctggtctygaactcctgacctcaggtgatccacctgcctcggcctcccaaactgctgggattacaggcatgacccactgcgcctggccaagaactgcttctaagttcagyttatttcaaatcttggtggayacatggctgtaataaccagmacagacatttcatgamacctcttcatacacaacaattagggtgaggctcatagtaacaataatataaatccgtatttcaaacagtgttggtaattttgaatgttttgaccaacttctaataaactatgttagatttttattatattttcttgtcaaatagyagacaaagggcttctaygcctgtaggaatagatgtcagtgttgtcaaacagctccttgtttgccgccacatgcattattagagttatcttgaaaaccagcagtttctctgtaggagtcttttaaagccacttatctgttgtgtaaagataggtttagytgaaactagatcattccatctgcctttaaccaggcactcctaacctgtaatatgctgcactctgaaggggttcagggaggaaagtcaccacaatgtgacgcttctgttcttccccgaggaggtgacacataacggtgacatagattcagagtgacaaatccagtgcatactstataatcaatgtcagtaaagtttaaattcttgcttttttaaataaaaataaaatggactaggaattctggtcttcctgcatctcagaggcctcacttgcactttccccggatttcttgcacagcccactggagtctgacaaaaggataccctttcaagtctgaagtttggcagtcactaagtgggccccgccactgtggcagcggcaccccatgactgtgagatccattttgcaaagataaataaamcacttctaagagtaactgggaataactgaaggcaggaagttacagtctctgctcagtgacacataggtctttcttcctcctgaccactgarcactgwtgacctttatctgagaccctgcacctctggaaagcagtgataatcaggcaggcatggtggctcatgcctgtaatccctgcactttgggaggccaaggcaggtggatcacgaggtcaggagtttgagaccagcctggccaacatggtgaaaccctgtctctactaaaacaataaaataaaataaaataaattatcatggcttagtggtgggcgcctgtaattccagctacttggaaggctgaggcaggagaattgcttgaacccaggaggcagaggttgcagtgagctgagatggcaccactgcactccagtctgagcaacagagtaagactctgtctcaaaaaaaatttgtttggccgggtgctgtggctcatgcctgtaaccccagcactttggaaggccaaggcaggtggatcgcttgaggccaggagttcaaggccagcctgacccacatagtgaaaccctgtctctactaaaaataaaaaaattagccgggcatgatggcacgtgcctgtagtcccagctactcaggaggctgaggcaggagaatcacttgaaccagggaggtggaggttgcaataagccgagatcacaccactgcactccagcttcagcaacagagtgagattttgtctcaaaaaaaaaaaaaaattttttttttttggccgggtgcagtggctcatgcctgtaatcccagcactttgggaggccaaggcaggcagatcacctgaggtcgggagtttgagaccagcctcaccaacatggagaaaccccgtctgtacttaaaaaaatacaaaattagttgggcgtggtggcgcacacctgtaatcccagctactcaggaggctgaggcaggagaattgcctgaacccagggggcaaagattgcagtgagccgagatcgtgtcattgcactccagcctggcaacaagagcaaaaaactccaaaacaaaacaaaaacaaaatcaaaaaaatttaagtaaaataaaataaagacagaaagaggccaggcatggtggctcacgcctgtaatctcagcactttgggaggctgaggtgggcagatcacgaggtcaggagattgagaccatcctggctaacacagtgaaaccccgtctctactaaaaatacaaaagaaattagccaggcatggtggctggcacctgtggtcccagctgctggggaggctgaggcaagagaatggtgtgaacccaggaggtggagcttgcagtgagctgagattgtgccactgcactccagcctgggcgacagagtgagaccctgtctcaaaaaaataaaataaaataaaataaaataaaataaagaagacagaaagaaaatgtatttatttaaaaagaaaagaaagcagggatgataaagcaccctgcacccccagtacccccacccccaacctgaaccccrtgcaacccccatcctccaccaccttttgtttttcaaaatcccccattcttttgtgttcttggagaagacttgctcagagaaccatccttctgcataggacataggtacaactcaccgtccactctcttgtgaccccacggttctcagggttggctcccttgttcatctgcaacaaggccaaacacaaatcctccaatttcccattctttgctgtagttgactagctaagattagaacaatttgtttccctgagaataatatttctggttcagctaagtgacagacagttctgcatacaaaacaaccccaactgcakatcaccccacttcagcttgtttactcctctctatataagtctagggcaaaagcaccctgctgagatcctctgatctttgcctctcaagtgttctttaatcaatctgcctacttctctgggttttgtctttgacacaaccctcgatttctctttgaagaagtgtcaccttcaccaaacccaagtgtgtcctccagatagattactgctcaccctgcataatgcctcccaggtaaaccttctcccctaaaagagaaatacctctttttttttttttttaagacagtcttgctctattgcccaggctggagtgcagagtgcagtggctcaatcatggctcactgcagcctcatcctcccaagctcaaatgatcctcccacctcagtctcctgagtagctgagactacaggcaaaggccaccacacccagctagttttattattattattattattattattattattattattattattgagactgagtctcactctgtctcccaggctggaatgcagtgacccaatctcggctcattgcagcctctgcctcccgggctcaartgattctcctacctcagcytcccaagtagctgggattacaggtgcacgccaccatacacagttaatttttatatttttagtagagacagggttttgccatgttggccaggctggtctcraactcctgacctcaggtgatctgcctgcattggcctcccaaagtgctgggattacaggcatgagccacygtgcccggccccagctaaatgtttattttttgtagagataggattttgctatgttgcccaggctggtcttgaactcctgggctcaagcaaactgtctgccttggcttcctaaaatgctaggattacaggcatgcccagccttctcttcatttttaaaactcaaacttcatagaacatatgtatctctcaatataacatttctggctaacaattctatagaaaagtcacaaaatttttacatcctaaacatgatacaatatttttyaaaaaatgaaatgcaagaaaggccttttattccaaatattattgcwatttcttcagagtctgttgaggcaatcctcaacattgtatctgccccaaaggatgtgttgaagtcctaacccctggtacctgtgartgtgaccttacttggaaatagtctttgcagatgtaattaagatttaagttagaatgaggttatacttgagtactatatttggtccattttgcattgtataaaggaatagctaaggctgggtaatttacaaagaaaagaagtttaattgcctcacagttctgcagactgtacaagaagtgtcagagatgataaattcctcttcaaaaagctttmgttccctgttctttgtttcttaaaaccarcttccttgtacttccttgtctcctagytacctgttctgtaaacaaccttcctgcctttgccatgcccagacaagtccagatatgccttcccgcctagtaacagacwcttttcccacctagtaacggactctycacctaatagaccctattcaattttaaaccttagccaatcgagttagcttagattgtgaggtccaaccccagccaatggggaaaggacacagaagtgctaggaactgcattagagataaaaacccctttcctaccctgctcggtgtgctcttgcgataatgactggygcaagctgcacccttctgcagaagaaaatttgccttgctgagaaatcttgtgtttgagtgctcattttctttacgactctgagcttttatttctaacagaacaaggtgccagtgtctgtttctggggaagcctcaggaagcttccaatcatggtggaaggcaaggagagccagtgtgtcacatggcgagagattttaacaatcagattgcacattaactaatagagcaagaactcattcattactgtaaggagggcatcaagccattcatgagggatctgtccccatgacccaaacatctcctactaggccccacttccaacactgggggtcacatttcaatttgagatttggaggggacaaatattcaaactatattaagtagtatggactcaatccaatatgactgctgtccttatgagaagcagagaagagacacggagacagacccaggaagaatgcyatgaggcaatggagacagtgattaaagtgctgtatcaacaagcatttactggcaacaccagaagctaaaagtaaggcatggaacagattcttccctggagccttcagaaggagcatggccctgccaagaccttgattttggacctctgacttccagaactgtaagataatacattttctgtttttttaacccacccagtttgtggtgctttgttatggcagctctagaaarctaatatagagtccctatgaacgttttggaaaattgtggmgcgatcaacaaaaggggctgggcacagtggctcacgcctataatcccagcattttgggaggctgaggccagaggatcacttgaacccaggtgtttgaaataagcctgagcaacatagtgagaccctgtctatacaaaaaatacaaaaattaaggctgggtgcagtggctcatgcctgtaatcccagcactttgggaggccaaggtgggtggattacctgagatcaggagttcacgaccagcctggccaacatggtgaaaccccatctttactaaaaatacaaaaaattggccaggagtggtggctcacgcctataatcccagaattttgggaggttgaggtaggtggatcacctgaggtcagaagttcaagaccagcctgaccaacatggtaaaaccccatctgtactaaaaatacaaaattagccaggcgtggtggtgggcacctgtattccctgttactcaggaggctgaggcaggagaattgcttgaacccaggaggaggaggttgccactgcactccagcctgggtgacagagtgagactctgtctcaaaaaayaaaaataaaaataaaaataattagttgggtgtggtggcctgagcttgtagtcccagctactctggaggctgaggyaagagaatcgcttgagcccaggaggcagaggttgcagtgagctgagattgcaccactgcactccagcstgggtgacagggcgagactstgtctcaaaaaaaaragaamaaaaattagcygggtgtggtggagcacgtgtgtmgtccagctactcagaaggctgaggtgggaggatcactggagcctgggaggtcaaagctgcagtaagccatgatcacgccactgccctcaagcctgggtgacatagtaagaccctgtcttaaaaaacaaaacacgaaacaggcttggtgcggtggctcacrcctgtaatcccagcgctttgggaggccgaggcagttggatggcttcagctcaagagttcaagaccaacctaggaaacaaggtgaaactctgtctctacaaagaattcaaaaatctagccaggcatggtggtacacttctgtagtcccagctactcaggaggctaaagctggaggatcgattgagccaggaggtagtggctgcagtgagccacgatcatgccactgtgctccagcctgggcaacagaacaagacactgtctcaaaaccaaaaaacaacaaacaacaacaaaaggggtgcaataggccaggtgctgtggctcatacctataatcctagcaccatgggaggccgaggcaggaggagcccttgaagccaggagttcaaggccagcctggacaacaaagcaagaccctgtctctaccaaataaaccaaaagacaaaaaaacaaaatgaaacaaaacaaaaggggtgcaacacaggaccactggtggtgtcaaaggaaaaattgcactgaacaacgttgaaactttaggcaaagttaaactgcaggaggggagagggccagaactaagtatgaactaaactgctcatcagaagggataggttttgtttgtttgtttgtttgtttgtttgtttttgaggcggagtctctctctgtcgcccaggtggagtgcagtggcgggatctcggctcagtgcaacctctgcctcccgggttcaagtgattctcctgcctctgcctccagagtagctgggactacaggtgcccaccaccacgcccagctaattttttgtatttttagtagagacggggtttcactgtgttagccaggttgacgtcgatctcctgacctcgtgatcygcctgcctctgcctcccaaagtgctgggattgcaggcatgagccaccgcacccggcccagaagggataggttttaaaggattgggtgaattagtactgaaggacataagggaagtcacaggccatttgtgtttgccrttggctttttataatttgatgtctttatggggtacrgagtgatgttgtaatatatgtaaacaatgtgaaattattaaatcaagctaattaacatacccattacctcaatactcatcttttttttwttttatttttttagagagacaagttttcactctgttgcccagattggagtgcagtggcaccattatagcttactgtaactttgaactcctgggctcaagccatcctcccacctcagcctcctgagtagctaagactacaggcacacaccatcaygtstgtstaatttttttaattttctatagagacagggtttcactatgttgcctaggctggccttgaactcctggcctcaagtgatctgcctgccttggcatcccaaaactctgggataacaggtgtgagccaccatgcccagccaatactcatcatttttttggtaggaagagcatttgaaatgtattcacttarcatttttggaatayacagtacattattattaactatagttctcatactgtgcaatagatctcaaaaaaatattcctcctgtctaactgaaatgttgtacccattgaccaacatttccccatttcctcgctcccagcccctggtaaccaccattttattctctacttmtatgagcttgattgttttagattccacatacatgtgagatcctgcagtatgtgtccttccctgcctggctttttttcatttagcatagttctccaggttcatctatgttgtcgcaaatggcagaaattcctttttttgaaaggctaaataaaattccaktgtgtatttgctagtaggctttctccaaaggaattatagcctctgctgtcctccwtgggagatagcaccrgaagtgggcatctgccactggaagagggtcctcaccagaacttggctgtgctgggaccctgctytcagacacrcagccttcagaactgtgagaaataaattctaattgttcaaaaatcaacaaaaaggagaaataaacgtatcctagctttgtgacaagagttagttttgtaacttagagcacgatatcttgaaacttggagcaaggcaatttggagtcaggctcctgctgccctcccacagaaacagagataaggatgctatgtcctgctgattgcatttcaaagaaatagttcccaggtcttggagaaagactttcctgggttgtaaaactgacaaagcttttttaaagattatgcatcgactaaargtaaaatgmccaaaaaaaaaaaaaaaattggcatctcgaagtatcagagagaaaatttacaagttttytaaagcaaatgctctaagaagagggaggtcaggggcctccctcaggaggaagccygcctaaagggaaacatgagcttgtcttggtcttgaatcttctactgcacaaaagcccmtatstgttattcaccatattaattatttggtgatcaagaagcaatgttttamacatttcacaactgaccagatgtttygttttataagaattatatttaggyaccttmccatgctttagttaaccttttaagaaattgattgagggtttggggttgacatagtataatttttctgtttaaaataaaataaatargctgaaggttagcattttyatgcagaacaaccaattttcagtaatagattactgatgttaagcaggagaggactacatttctaaattgtttaatttttttaaatgacagacccaaacttcttttcaaagaacagcctctctgacaggttgattcagtgcaggcgcactgcattctgaatcctagggcaaggccatgtttaatgagctttctctctgcatcccccacttctattcccacccactaagacccagggctgactggccatcaactcaaagactaacagcgggacgatctcactggcgggacgatctcactggcggrttgcctaggaggcttgggagtgaataacaggcatctggttctaagatccacagcgcagatttaaggaaaaaacagctgttagccatactccctctaccccaaaacagtttttaaaaattgctgttggaagccaagaatgataagcaaacaaaacaatagaatagaaaataacaaggctgggcgcagyggctcatgcctgaaaccccaacactttgggggccaaggtgggaggattgtttgagcccagggggttgaaaccggcctgggcaacatactgagatgctgtctgtataaaaatttgtgaaaatagcttggtgtrgtggtgtgcacctgtggtcctagctacttggaaggctgaggagagagggtttcttgagctcaggagttggaggttgcagtgagctatgattttaccactacactccagcctgggtgacagagtgagaccctatctctaaacaaagaaaagaaaagaaaacagccaggckcggtgactcacgcctgtaatcccagcactttgggaggcttaggtggscagatcacctgaggtcrggagttcgagaccagcatggagaaaccctgtctctactaaaaatacaaaattagctgggcgtggtggcacatgcctataatcccagctactcagaaggctgaagcaggagaattgcttgaacccgggaggcggaggttgcagtgagccgagatggcaccattgcacwccagcctgggtaacaagagcgaaactccatctcaaaaaaaaaaaaaaaaaaaaaagaggccgggtgcggtggctcacacctgtaatcccagcactttgggagggcgagatgggtgcatcacgaggtcaggagatcgagaccatcctggctaacacagtgaaaccctgtatctactaaaaaaatacaaaaaattagccaggcgtggtggtgggtgcctgtagtcccagctactcgggaggctgaggcaggagaatggcgtgaacccgggaggcagagtttgcagtgagccaagattgcgccactgcactccagcctgggctgggcasagagcaagactccgtctcaaaaaaaaaaaaaaaggaaaaggaaagaaaataaaacagtgcaatggtgtaaggctaagtattaattcagtcacgtatgtgtgtctgtgtgcctgtgtcctgggtcataagataagctgtgtttctttgagaactggcctaggaaatccctaatagttacctgaagggaaggaagaaagaagtcagttgatactaaatgtcttagatagctacaggtcaggctttgagatcttagttccatccccgcaatttacctaccaatcagtattattggtagtccatatcacctgaggagtcttcagctgtcccaagtctggcatttgaaacacaaaactcggccaggtgcagtggctaacacctgtaatcccagcactttgagatgccaaggcgagcagatcacttgaagtcaggagttcgagaccagcctagttaatatggcgaaaccccgtgtctactaaaaatacaaaaattakccaggtgtggtggtgcacatctgtaatcccagctacttgggaggctgasacagaagattcgcttgaacctgggaggcagaagttgcagtgacccaagattgcaccactcactgcattccagcctgggtgacagattgagactckgcctcaaaaaaaaaaaaaaaaaagaaatccaaaactcattgcattacyactctcctccagtttctctcacctcctggcaagcagcctcttcacatattttaggtaagccagtaagaaataaagagggtaagtatgcataaagaaaaaacatggccgggtgcagtggctcacgcctataatcagcactttgggaggacaagccaatcacttgagctcaggggtttgagaccagcctgggcaacayggcgaaaccctatctctacaaaaaamtatgaaaaattaggccgggtgcagtggctcacgcctgtaatcccagcactttgggaggccgaggtgggcggatcatgaggtcaggagatcgagaccatcctggctaacaaggtgaaaccccgtctctactaaaaatacaaaaaaattagccggacgtrgtggcgggcatctgyagtcccagctacttgggaggctgagccaggagaatggcgtgaacccgggaggtggaggttgcaatgagctgagatcacgccactgcacaccagcctgggcgacagagtgagactccgtctcaaaaaacaaaaaacaaaaarccaaaacaacgaaaattagctgggcatgatggcatamgcctgtagccccagagattcaggaagctgagatgggaggattgcttgagcccaggaagtcgaagctgtagtgagctgagatcgtgtcactgcactccagcctaggtgacagagcgagaccttgtctcaaaaacaaaacaaaacaaaacaaaaaatgctacatcagcttgtttttatagatagatatgaacaaacaaacaaaagtaatttcaagggactatacggaacatcttaaacsaagtttkatcatttttacaaatgagaaaaagttaataycattgacattaatgattggcttgaggtaatatagcaataatgatctcaactcagtattgtggtactagtgatagattaagaggaagaaaygagctcttcgtattttcagaccaaggttctcctggcctattccacgccccggacacagagtgtgtgagtggcacttacgtgtggatatgttttcattcagtctcactctggagtccctgcgctgtgcttcyggggctttgggactgtctggaacacagcaggaggcagcaccttgtggtggtgagtgaagctgccattcctctccattcatcctgaatttacctggagtcaaagtatcttgggagagatgctggatctaattggatttcactaatcagttgcctaagtggagtttggggatggggactcccargggtgttctgagcaggacattttcatatctgtagcttagggacaccttgtggagattttatccatagctaactaaaacatccaaaaagaaaacaaaaccacaagtggtctgaaacttaagaacttttgtgtctgggcacagtggctcacacctgtaatcccagcactttgggaggctgaggctggaggatcgcttgagctcaggagtttgagaccagcctgggcaacaaagtaagacctcatctctacaaaaaataaaagtcagctgggcatggttgtgagcacctggggtcccagctacgcaggaagctgaagtaggagaatcacttgagcccaggaggtcaaggctgcagtgagctgtgattgcaccactgcactccagcctgggcaacagagcaagtccctgtcttaaaaaaaaaaaaaaaaaaaagaaaagaaaagaaaagaaaaagaaaggaaaaaaaacccaccaaaataaataaataaaaaccctacaaaaaggcaaaaaaaaaaaaccttaaaaaaaatattattgcagccgggcggggtggctcatgcctgtaatcccagcactttgggaggcygaggcaggcggatcaccggaggtcaggagttcgagaccagcctggccaacatgatgaaaccccgtctctactaaaactacaaaaaattagccgggcatggtggtgggtgcttgtagtcccagctacttgggaggctgaggtaggagagtcgcttgaacccgctaggcggaggttgcagtgagctgagatcatgctgctgcactccagcctgggtgacagagcaagactccctctcaaaacaaaaacaaaaaaaaaccttattcttgctggaagagtctatakgaaaaaaattaatgtragtataataaataaatggttatagatgtatacwatatatatatatttatrcaatatataatgataaaaccactaagcaamagtgttgcaggagttaaggatgagccaccccaaaatyggctgatgtgatgtactgattatttcaagctgaaagtacttgagagactgtaattgcagaaagggctctctgacctgtcctttcctacatgtagcaagtcataaaaattcctttgaggaggaggcctttccggtaccagggcaagaaaataacccttatctccagggactgggaactgccactgagctggacctgtacagataaacttacttaataaatcmttatcttccactaggtttacatccccccataaatctcctagtgactcccctagaatttactgtccccaacctggatccctttgtccagtcctttcttcacagatttaccattctttatctaaaaagtagaaaagctttccgctttggccatttcctcaggtgttcactctcttgtaagtgtccctttgtacaggtaaaaattaataaaacttgtgtgcttttcttctgttaatctgccttatgtcaatttaattcctaggcccmactaaagatgccacttaagaactgagatggttagaggtgatctttaaattcccctgctgtgtcraccactttctctgtacagcgggcaggactgcccggcctgtttcctcctgtatttcatatacagatgtaccaactgatcaggagcatccaatacttctcctgccatcgcctgagatctgcatgaattcattgtcccaagccasmagcactggagcacacttcatgtaacagcaagcactctgcctctgcctgcagtccttgaaaaggaagctattagttaaatgaggtctggcaaggattgggaagggaagaaagattgtcttttccatttgaaatgaacctgaacctggcacagtgccgcatgcctgtagtcccaggtacttgggaggctaaggcaggaagatcacttcagcccaggacttcaaggctagccttggcaatatagtgaaaccctatctctaaaaaatagagtgagagtgagagagagagagctcacagcacaagtgcctcacacaccaccaaatgagaccatgatagaagctagaagtgcaaagtgcaagtctaccaaacccatcccagctaattttgataacactattaacaataccctgtttatggtttttgttttttttttttttttgagacagagtctgtctctgtcaccgaggctggagtgcagtggcgcatctctgcttactgcaaggtccgtccccygggttcatgccattctcctgcctcagcctcccgagtagctgagactgcaggcacccgccaccatgcccggccaatttttttgtatttttagtagagaagggatttcaccgtgttagccaggatggtctcaatctcctgacctcgtgatctgcccgcctcggtttatgtttttttaaaatgggacaagggaaaggtttgccggtccaaggaaaacttctaccaatcytcccatttacctttggttgtatagaatatagcaaaaatgagttttgagagtaaggattttattcaacttcatttcacaaacatttactgagcatcttctaagagtcaggagcaatatgaaggccccctaccctaaaggagttgacatttcctcaggtgatgcagacactgcctgaaagctatgactgcaatcgggtcctgctaccagcatgagtaaagtgtaataggatctcagaagtagggctcaattaattctccctggaagagttaggaaatgcttcacagatgaggtgatacttgagctggcctttggagtaaagcgagtaggattttttccgtcagctggagaagcagtaaaagggttttctakatacasgacacatacaacatgagcaacatgagcagcttgcacattctagggactggcaagctgatttgaaggaaagtgagaagtttcatacggctggcacaaaacaagtatatgacaggagcaagaagatgcaagtaaaaatggtttgatctatggacataaacaaagaccaaccgaaagagaacaatcaaaggctatttatccagagcctgctacagcaagagcgtcagtcacagtcacttgtgttttggcaaagactcaaaggcaggcagaggagtgggaaatttttatagtggaaaaagagaaggtttcaagtatgccctgatagctgccagctttgcctgtcacgggactcatgactataaccccagcactttaggaggctgaggcaggaggatttcttgaccccaggagtttgagaccagcctgggcaacacagtgagatctcatctctacaaaaaattaaaaataaaattagccaggcttggtggcaaatgcctgtagtcccagcaacttgggaggttgaggtgggaggactgcatgagcctgggaggctgaggatacagtgagccatgatcgtgccactgcaactccagccagggtaacagagtgagaccctgtctcaagtaactgccagcttctctcatttctgtcccagcttccaatttaggacccacaggagaaagccaaatatgcacccctaaccaatcccataggatgcgcctcttctagttagctgcctacagcttctccaggtcgacagcstccaatcagggtagacctgaaactttttgctttttccactatcaagttttcgcagtcctctgcttgactttgactttttaccaaatgcacatgatggtggctctctctcttgctatatagcaagctctgawtagatagcctttatttgttctcctgtaggtggtctttatttccatacaatcaagtctaagctgctacctggactatctcaagcctcctaaatggtctcactcttcaactcttctctgataaataagttgatgccagttatctaaatctttcaaagtatataaaacatagagttgatgatgaaaattttgcactgtgtttgtgcctgccatcttcagtgcctccatccctacttctgactctgtagtgtatgccyggctgatttccatgacaaggtttgctctggcagcctgaactgtaacactcccccagcagttcataaccagctccctcactcatcctgtgggtaastctgggtcatgctctctacactgagtcccagggttctgcagcaagatgcagctacagttgctcacagtggcagctggattgatagctcacccttttcttaactgcttttcccttccatccttatctcacgtcgccagtcctccaccagtgtttcctgagatcacctcccagtgaattattaatacttgctttcaaatcctttctcagggtgtgtgtctgtgggaacccaagagaatacagccagaattagaaataactcaaatcaccttattcaaataactaacaactacaggaggaagaggagaccaaattgccacttcccgcataggttttcactaatatatatgcttggcaagaataaggaaaagagagtacccaagttattttaaaaagaagtaaaaaaaagaaaagaagaaaaattgttaatgccatttacaatttcaaaaatgactgcatgtggttcattaacaagcattttctaatcataaataagttgcatcactccgtgcagttatttaaggctgttgaattcatacaaaactagaggtaaaagattacaatgcagatgactaaaggcagaattagcagtaaaataatttgatggaggagacaaatggctttacatggaatggaagaaaacctgacagaaaatctatcacttgtggtaaatgggggagtattgtaccattagtaaaatagtaatattaaaaacaaaaaagcaaatgtttgtttgtttttgagacagagctttgctctggttgcccaggctggagcacaatggcacaatctyggctcactgcaacctccgcctccggggttcaagcgattctcctgcctcagcctcccaagtcgctgggattacagacgtgtgccaccacgcccatctaatttttgcattttttttttagtagagacggggtttcagcatgctgcccacgccggtctcgaactcctgacctcatgtgatccacttgccttggcctcctaaagtgctgggattataggcgtgagccaccccactcggcctatttatttcttttgagacagggtctggctctgtcacccaggctggagtgcagtggtgagattacgactcactgcaacttccacctcctaggcacaagggatcctcccacctcagcctcttgagcagttaggactacaagctcatgacaccacacccggmtaattattttatctttagtagagatgagggctcacgatgttgcccaggctggtcttgaactcctggcctcaagaaatctacccaccttggcctcccaaagtgctgggattacaggtgtgaaccaccacacccagcttaaaatacctttaattaacttcaaaaatagcagcaataaatacaattattaattaatttatttttatttatttatttttgagacagagtttcactctgtagcccaggctgcagtgtggtggtgttatcttggctcacagcaacctctccctcctgggttcaagcgattctcctgcctcagcctcccaagtagctgaaattacaggcatctatcaccatgcccagctaaattttttatatatatatatatttagtagagatggggtktcaccatgttggccaggctgttctcaaattcctgacctcaagtgatccacccacctcgacctcccaaagtgctaggattacaggtgtgaggctgtgcacagggcctctttctttccttcctttcttccctttcttttcttctttctttctctttcttcctttcctttcttcctttctttcctttccttccttcctccctctttctttcctttcttcctttcttctttctttcttttgctttctttctttccttttcctttcttcctttcctgtcttcctttctttcctttcctttccttcctttctccctctttctttcctttcttcctttcttcctttcttctctttcttccttcctttctttctctctttcttctttctttttctttctctttccttttcctttcttcctttcccttcctttctttcctttcccttcccttccttccttcctccctcccttcctccctgcctccctcccgctctctctttctttcttttcttctttccctccctccctccttccttccttccctccttccctccttccctccttcttttctttcctacagggtctctcactctctcacccagactggagtgcwrtggtgctatcacagctcaccacgacctctgcctctcaggctcaagcaattctcttgcctaagcctcccaagtagctgggattacaggtgctcgccaccatgcccagctaatttttgtattttttttagtagagacagggtttcaccgtgttgtccaggctggtctcaaactcctgacctcaaatgatccacccacttcggcctcccaaagtgctgggattgcaggcatgagccacagagcctggcctacttatttttaagaccgggttttactcccatcacccaggctggagtgaagtggcgtgatgtgggctcactgcaacctccgcctccttggctcaagagattctcccacctcagccccatgagtagctgggattacaggcccacaccactgcacccagctaatttacaaataacacatttttatctgtttttttttttttttagacgaagtctcactctgtcacccaggctggagtgcagtggcacaatcttggcttactgcaacctccggcctcccgggttcaaatgattctcctgcctcagcctcctgagtagctgggattacaggtgtgcaccaccacgtcctgctaatttttttgtatttttagtagagacaggtttttgtttgtttgttggttatatgtaaaaaatgtttacttagaaatagaatgcttgttccttggtgctacgaagaaatagcactcgaacataaatttaattctcttagcatggcaatctttactttttgcagaaagtcaagtattcaccacagatggaataatggcaagagcacacctgaacaatggagggaagtaatttttatcctttacgcagtttgtccctgctactgtgtcctgtctccattggctaaagccagacctcacaatctaaactaaaacctgattagctaacagtttaaaacttttctaaataggcaaaggcaatagaaagacaaaggaaaagaggaagttacttacgaaaggacttagaaaggtaataacattcttaaataaggaaggggcataggctgcgagccgggacaggcctgtgcgcatgtctagcatacagttagtctttaaaagaaactactatttctaacacttatgatttattcttgaacaagaagggaaactttgaagaggaactttttactttctacaatttccttgtcttgtttttatagttttcttcttcaaacttttttttttaaatatgtcttggcttagttgttttgattagcttttaaatgtatggtataacataacatgacatctaataaggagaagtatacttattacagttgctagagaagtaaggactgaggccatggtctctttctgttggctgaactatttctcgagctaatttgaaatagagttgttaatgctggaattttttgctaacttatttaataaggcagtaagtccttggagggtccttgttatgctcccattgggagcagtgttgtttggaataaaggtgcaacactgagttttgattataatataaacactacctttctttgttaatattatatttaaagttatcttattttctcaggccatttgacttgtgggttttaattgttcagctatttctttaacagcatctttggtatagttaataaattgctgctggtagtaataaatgcagtttatttaatctacatttttattaattgctactcactaaaacaacattgacttaaaccttgcagctatttgatctctggttttaaatttatttggtactctgtgaggacctctaattgcatctgaatagacatgggaatcaaaatagctgtaaggggctgcttcttttgaggcttcttttatttgcttatgtcgtaatttctctttttctgattgatgaaatgccagggtaaaagggatagctaattgaactagagcataagtgctgctctaattatttggtagagtgtctagtaaaggttttttacagtattactatgcatccgcttggggatgaataagggtggactgatgggttagcttttggaagtgcctgacctcgctgtatcatgttaagtcttcaargtacgctaaattttccttttatcgttggagacacgaggtaaaattggtcttggaagatggaggctgaatggccctcggggggctgaccctcagggtactgcactttaggaaatagtagagagagtttggcacactttactatcttaggctgcaggattttgataccggccgggtgcagtggctcacgcctatatcccagcactttgggaggccgagacgggcggatcacgaggtcaggagatggagatcgagaccatcctggctaacagggtaaaaccccgtctctactaaaaatacaaaaaaaaaaaaaaaaaaagttagccgggcttggcagcgtgcgcttgtagtcccagctacttgggaggctgaggcaggagaatggcttgaacccgggaggtggagcttgtagtaagccgagattgcgccactgcactccagcctgggcgacagagcgagactccgtctcagataaaaaaaagaaaaaaagacaaaagaagaaaaggagctaccatgcagtccatgccttgtcgattagaggactatctgagtggaaaggggataacttggacttctagcctactgtgtgcacaagcataacaattgcttttatttagagtgcggacagaatatttaatgtattttagctagtcatttacatcttgatatcttgttttaattgctgtggtttgctttagatttttttacttttactacaaagactttggttttgtcatttggtatgagaggagtgataactgaacaggcattaaaagtaataatttgaggtgagttagatttagttacattaataagatggggagtagttaaaggaaagaaaagatagataaagttttcttagctttaacttggtagggcttgaccctggaacaatgacctatractttgatggtgatgacgcttttttgacttgggtatgatgtgtctatccttttctgctgtgcgaacggcagtctcggtggttagcagcacaaggtagggttcttaggctgcctcgagtttttcttctttctatcttttgatgaggatgtggtttccaggcaggtgctggtgtacggctcctctggtttgtttcctttcttggctcatgcatgaggtcgcctggtccacatcatatgtgaggatcatttactccagattgctggccagtttcttctgccttgttgagagtccgggtctattcatcacaccagatgggtctcaatttcttactacccctgaggccaccacratgaggcagtgggagaccccctcatgagaggactagagaccaccccagaggaaaatgtatccctgtacggaccaccatttcttatatgtaaaaatgtttatttagaaatagaatgcttgttccccagtgctacaaagaaataacattcaaacataaatttaattctcttagcaaggcaaactttactttatgcagaaaggggctcatagcagatggaataatggcgagagcaccagtagagacaggttttcaccatgttagccaggctggtcttgaactcctgagctcaagtgatcacctgcctcaggctcccaaagtgctgggatggaaaaggagagtgccttggattggccctggcgaagcagggaccatccctttatctgcacagggcgccagttcacctcagtctttaatttgccacagaccaaatccttcatctagataagaacctcaaatgaggtacttaaagcccagaaagctttgtaactgcacccttgagctgcttgctcaggcccactcccaccctgtgaagtgctttctcgctttaatgaattcctgctctcgttgcttcattcctgcatttcatttctctgctacttcgtacgttttgttcaattctttgttcaaaatgccaaggacctggacaactcgtagtcaagaccctctaccagtaacacttgttgctcctattcctcctggtgctatttattgctactgcacatgtaccctgtgcccaagggtagaacgactttccagcttytgaagcacagaggcttggggaggacagattgtcatgtgactcaggacttcactgaaccttgttcatacagttgaccacattcctttgtttggatcactaagggagagtcattatcattacaaggcaagatcctgggcaaagcacattttagaccccaaaatattttgtcctctttgcaaggcatttcatctattatttcctttttaatccaggatgggcaaaaaaagaagttgtaatgtttgtattccatatttgtcgttacaaaagaaagatattttcatattccaaaattgtraaagtaaacaaaacacagtaacaacaacgaaaactataatcagaaggaagggcmccaggttcagacagtggtggctttgaaagaagaagtaagtgagattgaaattgagagaattaaaaaaaagattttaagtttttttttttttttgagacagggtctcactctgtcacacaggctggagtgcagtgatgcaatctcagctcattgcaacctctgcctccctggctcaactgatcctcccacctcagcctcctgagtagctgggactacaggcgggtaccactacgcccagctaatttttatatttttttgtggagatggggtttagacatgttgcccaggctggtcttgaastcttgaactcaagcgatctgttcatcttgcccccgccccaaagtgctgagatcgcatactgcactccagcctgggcaacagagcaaggctccatctcaaaaaaaaaaaagataaaaagctacacaccgctgggcgtggtggctcaagccagtaattccagcactttggaaagccaaggcgagtagatcatgaggtcaagagatygagaccatcctggccaacatggtgaaaccctgtctccactaaaaatataaaarttagctgggcgtggtggtgcgtgactgtaatcccagttattcaggaggctgaggcaggagaatcgcttgaacctggtatgyggagattgcagtgagccgagatggcgccactgcacttcagcctggcgaataagcaagactccgtctcaaaaaaaagctacatacctccctcacaatttgcccagaaggaaattccttgtggacaagggacagacagaactcagtcatccctctgaggaggctcacctgagacaaatgcatatctgattgcttcccctgccctattgtttatgtaaaaatgcagattcactgagccagcctaaattgtgtattcagtggaaagatgatcaaggatttaaaagaatgcaacyttttgtctcttacctatgtgggacctggaagcccttgcctcaagttatcccgcgttaccagaacgaaccaatgcacatcttacacatattgattaatgtctcatgtctccctaaaatgtatacaagcaagttgcacaccgaccaccttgggcacatgtcgttaggwcctcctgaagctgtgtcacaggcacatccttaaccttggcaaaataaactaagctgattaagacctgtctcagataccttttggtttacaatagcaaaaccccgtctctaaacaaacaaacaaaagcaaaaagaaaaaattagggaaaagactattctttcccttttcttaaagcattttctttagaggatttgtcattgtaaattctctctgcccctgtgagatgtatataaatctttcttttcttttcttttcttttttttgagatggagtcttgctctgttgcccaggctggartacagtggtgctatctcagctcactgcaacttccgcctccggggttcaagtgattcacttgcctcagcctcccaggtagctgggattacaggcacgcgccaccacatctggctaattttttgtattttagtagagatggggtttcaccatgttggccaagatggtctccatctcctgacatcgtgatccaaccgcctcggcctcccaaagtgctgggattacaggcataagccaacgcgcctggccccagatgtatataaatctttctaaaagcctcttgtaaatgtgtaaaacccaggaatgtctttctcaaggacttgagatctctttgaaatgtaagcatcaaaaatggcagtgctcctatctaccagtgatacagctccgatgagtggaggaacaccagggttcttggtcctcgtgccagtttagataaaacgacacagacacacgtggagtggttttaaggagtggagagcttgagagcttaataggcaagaagaggcaagaaggaagggaggaggaacaagctcccctgtaaagagacagagggaggggggctccaaagctgagagaggggaaccccgacctgccacagataccagctagatatatgtacacagaggctggaggaggcggtgtctgaattgcatagggctcaggggattggtttgactaggcatrtcattcacatatctgcgaaaaagctggccctcccaccatagccttttaatatgcaaaagcggggcaccatgatgttctaacacacgtgggaatacatgggggcggccatgttgccaggaacttgtggggaaagggcaagaaggcaggggaatcaccatgtttgggtggacctagtttctaatggcttgcatttacatatcaaaggttgccagcctggctctaagagccggggctatacaagaaacttttccgaagatgctttaaagaaaacttcccagctgggtgcggtggctcacgcctgtaatcccagcactttgggaggcccaggcgggcagatcacgaggtcagaagatcgagaccatcctggctaacacggtgaaaccccgtctctactaaaaaaaaaamaaaaamaaaamcaaaaacaaaaaattagccgggtgtggtggcgggtgcctgtagtcccagctactcgggaggctgagtgaggcaggagaatggcgtgaacccgagaggcagagcttgcagtgagccgagatagcgccactgcactccagcctgggcgacagagcgagactccctctcaaaacaaaacaaaacaaacaaacaaaaaaacccgaaaacttcccaaggaccccttttcttctctatatacctaaaataatttcttaataactcctacagcaccagttcccgtgggaggcaggagcctaacgttggtgagaatgttgctccaaattgccaaactacctcctctcacaaaggtatgagaagttggcctggcgcaatgactcacagctataatcccagcattttgggaggccaaagcaggaggatcactttcattcaggagttcaagactagcctgggcaacatagcaagacctcgtctgtacaaaaatgaaaaatacaaaattagctgggcatggtgatgcgcccctgtagtcctagctacttgggatgctgagatggaaggattacctgaacccaggaggtcaaggctgcagtgagctgtaatcatgccactgtactccagtctgagtgagagtgagaccctgtcttaaaaacaaaaacaaaacaaaacaaaaaaccaaacacaaacaacaacaaaaaaaacccatacagataggagaagtttatttttcctttatgtaacactgtcagaggcgtatgaaccagagtgactccatcttgaataggggctaagtaaaatgaggctgagacctgctgggatgcattcccaggaggwtaaggcattctaaatcacaggatgagataggaggtcagcacaagatacagaccatagaacaggttgttgataaaacagtttgcagtaaagaagccggctaaaacctagcaaaaccaagagggcaatgagagtgacctcagggcatcctcactgttcactatacactaattataatatattagcatgctaaaagacagccccagtagcgccatgacagtttacagatgctatggcaacatcaggaagttacccagcatggtctaaaaaggagaggaaccctcagttctgggaattacccacccctttcccagaaaactcatgaataatccacttctggtttaccagataatcaagaagtaacaataagtttaagtggctgagtggcccatgctactgctctgcctatggggtagccattctttattactttctttttttgttgttttgttttgttttgaggcagagtctcactctattgccaaggctggagtgcaatggtgtgatctcggctcactgcaacctctgcctttcgggttcaagcaattctcctgcctcagcctcctggaattagctgggattataggcacacaccaccaggctgggccaatctttgttattttaatagagacagggtttcaccatgttggccaggctagcctcgaactcctgacctcgtatccgctggcctcrgcctcccaaagttgtgaggttacaggcgtaagccactgtgcctggcctactttcttaataaacttgctttcactttaccctatggactcatcccgaattctttcttgtgcgagagctaagaaccctttcttggggtctgaatcaggacccctttcagstaactttaccaattaccacagatggtcacccttaattaccaggtgaatttagaatgaactatttgttacaaatagtgctgtcaggtcagcttacttaggacttgcagcttatctcaagaacatctatgttaagggttgtgtctgcttagctacataaaagggagacttttacaaaacagattacattctgttttgtaatctcttagtggattgcctgtggtgaatatcacattttgatttaatgcttattcaataataaaattatttttctactatctttgtggaaagacttattggagattttgtttttagttccatttctccagcaggtgtgttttattattctacgtacttttttgtatttttttaaattacaaaaaaaaaaagatacattcatggacaactcctgaaaaatgctgtctactttcctatagtgctatttcctataagtaaacttcattttgttcagcaagtaacctttttttccccccaggatcttaattaattaaaygggtttttgatttacatgtmtagaaaactgtttgagaccttagtattaaatgcattttttaaaaatttagagacttaaggccgggcgcagtggctcacgcstgtaatcccagcactttgggaggccgaggcgggtggatcacgaggtcaggagttcaagatgagcctggccaagayggtgaaaccccgtctctattaaaaatacaaaaaaaattagctgggcgtggtggcacacgcctgtaatcccagctactctagatgctgaggaggagaattgcttaaacctggaggggcggaggttgcrgtgagctgagatcgcaccactgcactccagcctgggcaacagagcgagactccgtctcaaaaaaaaaaaaaaaagtttagagacttaagagggagagttttatatgtaaaacgttacaatggaattcacagmgaatttttttcttgttaaaatatgcttaaaaatatgagatttaatttgtaaaatataatacctgtttttcctgctaaattttaacttatctaaaaccagggacattatcttatttgctgctgtatgccctgctctaacacagaggtaggtacacaaaagatgtctaataatttttgagttgaataaacgggaagatagatgcgtgaactataacaaagccagaacatcgtcgttccctatgtatctgtgggagattggttccagcacctccttgaataacaaaatctgtgagtgctcaaatctcttatataagatggtgtagtatttgcatataacctatgcacatcctcctatatactttaaatcctctctggattacttataatacctaayacagttgactttttttttttttttttgagacgttgtctcactctggaccacgctgaattgcagtggcataatcctggctcaccgcaacctccgcttttcaggaggttcaagcgattcttctgcctcagcctcccgagtagctgggactataggcccacttcactgagcctggctaattttttacttttagtagagatggggtttcactttatgttggccaggctggtctcaaactcccgacctcaggtgatccacccgcctcggcctcccagagtgctgggattacaggtataagccacagcgtccggccaacaaatgtattttaaggattaataattttattgaattacacagtaacccactgaaaatgtaaattgactaaaccataaaagtaacaacagtattccttcttttaattattgtattgaaggagaaaaggaaatttcaccccaaaatatgactcccttgtataatgaatattttgaattaaacactcttctgtgaatggtggctcatgcctgtaatcccagtactttgggaggccaaggtgggaagatcgcttgaggtcagttcaagaccagcctggccaacatggcgaaaccccatctttactaaaaatacaaaaggccgggcacagtggctcacacctgtaatcccagcactttgggaggccgaggcgggcagatcacgaggtcaggagatagagacctggctaacatggtgaaaccgcatctctactaaaaatacaaaaaaatagccgggtgtggtggtgggcgcctgtagtcccagctactcaggaggctgaggcaggagaatggcatgaacctgggaggcggagcttgcagtgagctgagatcgcgctgctgcactccagcctgggtgacacagagagactcaatctcagaaaaataaaataaaataaaataaaataaaataaaataaaaataaaaatacaaaaattagctgtgtgcagtggtgtgcgcctgtagtcccagttacttgggaggctaaggtaggagaatcgcttgagcctgagagctggaggttgcaatgagccgcctgagagctggaggttgcaatgagccgagatcgcgccactgcactccagcctggatgacagaagtgaaaccctgtctcaaaacaaacaaacaaacaaacaaaaaattcttagaaactgagcctggtggccaggcatggtggctcacgcctgtaatcccagcactttgggaggccaaggcaggcagatcacctaaggtcaggagttcaagaccagcctggccaacatggagaaaccctgtctctactaaaaatacaaaacttagctgggcgtggtggtgggcacctgtaatcccagctacgcgggaagctgaggcaggagaatcgcttgaactcaggaggcggaggttgcagtgagcagagaccccgtcattgcactccagcctgggtgagaagagcaaaactccgtctcaaaaaataaaaataataaataaataaataaataaataaataaataatctgggcctggtggctcatgcctgtaatcccagcactttgggaggccaaggcatgcagattgcttgagcccaggagttcaagactagcctgggaaacttgatgaaatgccgtctctccaaaaaaatacaaaaattagccgagcatggtgatgtgtacctgttatcccagctgctcgggaagctgaggtgggaagatcctttgatccaggaggtggaggctgcaatgagcctcaagggagccagtacactccatcctgggcaacaaacagagtgagaccctgtctgaaaataaataaataaataaataaataaataaataaataaataaawaaawwaaataataaataaataaataaaataaaaactcttagagattatcaggccttggaagagatttttccccaatctacataaagacccagagcccccaagagaacaattgctttttcttcccttccctgttatctcattatctattgcaggaaagaaggtgaggaaggtaaccagagcaggcccaatccttttgcaaaataatgtctgtctctcaggttcatttaacttccaaagaaaactatttgcaagtcaatctgtgttcccccatccatttattcacctaaatcatcacttaatgcccctctactgaactacctatattccccatctcccccacccctctgaaaagaggttatataagtgtttggggccaggtgctgaggctagtgcctrtaattccaacactttgggaggtccaggtgggcagatcacttgaggtcaggcattggagaccagcctggccaacatggtgaaaccctatctctgctaaaaatataaaaattagctgggtgtggtgtcgggcgcctgtaatcccagctactctggaggctgagacaggagaattgcttaaacctgggaggcggaggttgtggtgagctgggattgtgccactgcactccaacctggccaagagagtgagactstgtctcaaaaaattaaaaataataataattattattattatttgtgtcctattgggatattgagcaatcacactggttttctccatgtgcatggtcaagttaatttgtatgcttttcctctcaatctgccttattattaggtgatttttcagcaaacttcccaaaggcgagggagaaacttctttgccccaatcgtataaacaagaactagtcacagtttttccttttttttgagacaagagtctcgctctgttgcccaggctggagtgcagtggcacaatctcggctcactgaaacytccgcctcccaggttcaagtgattctcctgcctcagcctcccaagtagctgggcccacagatgcccaccaccacgcccggctaagttttcgtatttttagtggagatggggtttcaccgtgttagccaggatggtctcgaactcctgacctcatgatccacctgcctcagcctcctaaagtgctgggattacaggtgtgagccaccaygcctggcctagtcacagttttttagcctatgtgtaagtgtgtgtgtgcagacacagttccctcttctgagacacaactaagattctgttaaggtggtattctcccttgctgccgtgaatctaaactcagctttacttgatcaacagtttaattttctgatcttctttcagatttgatagttaacaccaacaaatgtcatttcactcttactaacaattacctaaattatacgaaacttttttttcttggggacaggatctctctgtgtcatccaggctggagtgcagtggtgccctcacagctccctgcagcttccatctcctgagctcaagtgatcttcccacctcagcctcctgagtcactgagactacaggcacttgggcaccactgggtctggcttttttggttttgttgttttgtttggtcttaaacttctggrctcaagcaatcttcccacctcagcctccaaargtgctgggattacaggtgtgagccaccaagcccagccataaaacctttttttttttttttttgagacggagtcttgctctgtcgcccaggctggagtgcagtggcatgatcttggctcgctgcaagctctgcctcccagcttcacgccattctcctgcctcagcctcccgagtagctgggactacaggcgcctgccaccatgcccagctaattttttgtatttttcataaagacagggtttcactgtgttagcgaggatggtcttgatctcctgacctcgtgatccacctgcctcggcctcccaaagtgctgggattacaggcatgagccaccatgcccggcccataaaaccttttttttaacagctttattgagataggattcagaatcattcaattcgtccatttaaagcatacaattcaatggtttttagtgtattcatagaattgtgcatccatcatcacagtcaattttagactatttttatcatctccaaaagaaaccacatactctttggctgtcacccccaatcctttcaccaacccttcctgccctaagcgctaggaaaccgcaaatctactttctgggtctatagacttgcctattctgggcatttcatataaatggaatcagacaatatgtaacactttgtgactgcttttttcatttaccataattaatgttttcaaggttcgcccaggttgtataagtacttcatttcttttcattgttgaataatattccaatgcatacattttccaccttttgtttatttgctcaccagctgatggacatgtgcattgttcctcatgttctttatacatcaaggcccagtcctctatgtgagatggagattgcctttcaattctttttttcttttaatttatttagtatatatgtgtgtgtgtgtgtgtgtgtgtgtgtgtgtgtgtgtgtgtctgttttgtttttgtttttgtttttgagatggagtctcactctgttgcccaggctggagtacaatgccacgatcttggctcattgcaacttctgcctcccaggttcaagtgattcttccacctcagtctccgaagtagctgggattaaaggcgcaagccaccatgcccggccaatttttgtatttttagtagagacggggtttctccatattggtcaggctggtctcgaactccttacctcaagtgatccacacgcctcggcctcccaaagtgctgggattacaggcatgagccaccgtgcccggcctacaatatatatttttagaagacacagggtctcactattttgcccaggctgatcccaaactcctgggttcaaatgatcctctcaccttggccttccaaagtgctgagattacaggtatgagctgcggctcacccccggcctgccttttaattcttaacctttttttttttttgaggaagagagacatttttatcatttttatcacagctccaaattatttactgatttgctcatggacataatccctgctagaacactatattctgaatgttcaaaacaaaatgaaataatttctgtttttactttttgcagttagtttataatactgtccagaagaaatggttctgattatacagtttctctgattatacagtttctgttaaattatattgtaggggatcagaatatgccacccctaaataaggactgttttgagctgaagatgattcaggaacagcagatgcaaagaaagagagaaagagagaaggaaggaaggaaggaakgaacgaaggaagggagggagggagggagggaaaagaaggaaagaagaaagaggaaagaaagaaagaaagaaarraaagagaaaggaagaaaggaagaaaagagaaagaaagaaaaagaaagaaaagaaagaaagaaagaaggaaaagaaagaaagacagacagacaagcaggcaggcaaggcctactctttccttcatttgcttaaaaacagacttagattgataatcactggtgaaaactctagactctgtccaggaagactgagaagaatctgcataagaaaccttactaaaacaaccctgatcttccatttgtttcttcccagtttgctacccctggaagcctgaaaccttcacctttgtctcctcacttctttacaaatttcttattcttttgttaaacccaaattctaaccactcctttgatggcattgtttatcactgagtttccacatgtttacatgtcartctggtttttttcagtttaatttgcagcccccaccccaggagggcagaagaaaaagggttctttccctccctacaagatgagtaagattttttttcttttttgagttttcttgttgcccaggctggagtgaaatggcgcaatcttggctcactgcaacctccgcctcccgggttcaagcagttctcctgcctcagcctgccgagtaactgggtctacaggtgcgtgccaccatgcccagctaattgttgtatttttagtagagatgagatttcactatgttggccaggctggtctcgaactcctgacctcaggtgatccacccaccttggcctcccaacgtgctgggattacaggcgtgagccactgtgtatggccgagtaagatgtttttaacatcaagagtaagttgtcttacaagtgagaaaaataaaataatcaaaagccatcttcaaacgagaagaaacattttttagggagacttcagaatgggagcatatggaattagaactgggaacccccaaatctgagacagatctcagtcaatttaggaagttaaggtcctgtgtccatgacacagcctcagaaggtttgttttgttttgagaaggagtctccactctgtcacccaggctggagtgcagtggcatgatctcagctcactgcaacctccacttgaactcctgagttcaagcgattctcctacttcaacctcctgagtagctggtattacagacgtgagccatcatgctgggctaatttttgtatttttagtagagacagggtttcatcatcttggccaggctgttctggaactcctggcctcaagcgatctgccatctggacctcccaaagtgctgggattacaggtgcacagccaggaggtcttgatgacatatgcccaaggtggtcagagcacaacttggttttacacattttagggagacaggagatgtcaatcaacatatgtagatgaacattggttccatctggaaaggtgggacaactagaaggaaaaccgggacaacaagaagagggaagggggcttccaggttataggtagataagagacagatgttcgcattcttttgagtttctgactagcctctccaaaggaggcaatcagatacacatttatctcagtgaacagagggatgactttgaatagaatgggaggcaggtttgccctaagcagttcccagcttgacttttttttttccttttagcttagtgattttgggacgccaagatttattttcctttcacacaaccttcttacccccttttcagttccttcatcaatgtatgattgctgaagaatgagtaaaaagttaatgaaggccgggcgcggtggctcacgcccgtaatcccagcactttgcgaggctgaggcaggcagatcacgaggtcaggagatcaagaccatcytggctaatagggtgaaaccctatctctaccaaaaatacaaaaaattagctggccgtggtggcaggcgcctgtagtcccagctactcaggaagctgaggcaggggaatmgcttgaacccgggagccaraggttacagtgagccgagatcgcatcactgtattccagcctgggtgacagagcgagactccgtctcaaaaaaaaaaaaaaaaaagttaatgaagtataggagacatcctttcttactcgtaacttcaaaatacacaaaatagcagtgtgaggcagtgttatcttcttgcctgtgtttataacctgactctgacacttgtcatccatgtgtctttgggcaaattattttatgtattatttttatctcttttttgatttttgattttttttggttgsagggtggggtggagtggccagagtcttgctctgttgcccaggctggagtacagtgatgtgatstctgctcgctgcaacctccacctcccaggttcaagcgattctcctgcctcagcctcctgagtaactggggctacaggtgcgggccatcacgcccagctaatttgtttattttgtatttttagtacagacagagttttaccatgttgcccaggctagtctcaacccctggcctcaagtgatccacccttttcagcctcccaaagtgctaggattacaggcatgagccaccgcacctggcctgggcaaattatataacccttcttggcctcagctgtcttcatctaaaacaggattataatacaggcttgttgcgagaattatatgtttcacaacatgtgggcatcagtataaggaaaaggcatgaaatcacatgagaaagtatctttaaattcttttcaatttcatgcaattgaatcaagaagagtcctggtctgtgctaataagattgttcattaatacctctctaaaacattccaaagacagggagagtgagtaatcatctgcctaaattttttaaataattctgatttagcatttattaatttgaataaacttactccaccctctccaggctccttamtcccgaattctgttccactgtctaggctttaggtcaggctcaaggacaagttatttagattttatttctatcttctgcctttaaaaacatagataaaattgtccttggtctcaggggtaaacaaaatcaagctataaactgaatattgctctccagccagggtgtcccactgtyttagcaaaaaactggaaggaagggaacagataaatggatggggactgtaaacaaccaaatatttttcattttytagaagtgggaaatcatccaaaaggtgcaaatatttggttaggtgtttacattttcatgctccattgttgatgttgtggaactaggagcaagctaatactaggaacaagataatactgtggactgcaacagccaaaactyttggctttytgtggcccgggttatttgctctttctttcttccttcctcctgctcctctgctgtaagcacccccatcttccagctttcccagtgaagtgccttctccttagggccttccttyttaaagagtgaatgtgcttccctctcgaccattatagggtgcactccaggcaaaacctgtcttttttttttttttttttttttttttgagactgagtctcgctctgctgccaggctggagtgcggcggtgcgatctcggctcaatctccgcctcccgggttcaagctattctcctgcttcagcctcctgagtagctgggactacaggcgcgcaccactacgcctggctaattttttgtattttagtagagacagggtttcaccatgttggccatggtggtctggagctcctgacctcgtgatccgcctgcctcggcctcccaaagtgctgggattacaggcgtaagccactgcccccggccttaaaattatttttaaaaaatagagatggggggaggggggcgtcccactatgtagcccaggctagtctggaacacctgggttcaagcaatcctcccacctcagcctcccaaagtgctgggattttaagttgtgagccaccatgcttggctaaaacatgtctttatatgccccagttttatcttaaattttttgtgcagatttgcattctgttctaacgtatactcctgttcgtttcattttattttattaattataaaaaatacagggccgggggcggtggctcatgcctgtaatcccaacactttgggaggccgagatgggtggatcacctgaggtcaggagtttgagaccatctgaccaacattgtgaaaccctgtctgtactaaaaatacaaaattagccaggtgtggtggcatgtgcctgtaatccgagctacttgggaggctgaggcaggagaatcgcatcaacccgggaggcggggattgcagtgagctgagatcgcgccattgcactcccattttgggcaacaggtgtgaaactccgtctcaaataaataaataaatatgccgggagcggtggctcacgctgtaatcccagcacttttgggaggccgaggcgggcggatcacgaggtcatgcttttgagaccatcctggctaacacggtgaaaccccgtctctactaaaaacacgaaaaattagccaggcgtggaggcgggcgcctgtagtcccagctactcaggaggctgaggcaggagaatcgcttgaacctgggaggcggaggttgcagtgagccgagatcgtgccactgcactccagcctgggcgacacagcaagactctgtctcataaaaaataaaaataaataaataaataaataaataaataaataaataaataatagagatgaggtctccctatatttgacaggttggttgaactctgggccgcaaacaatcctcctaccttggcctcccaaagtgctaggattacaggtgtaagccaccacacccggcctcgtgtgtgttttcattttaaattcataaaccttcaggaaaaatttttcccaggtttattaaggcataattgagaacaattatatatatttaagctgtacaacatcaaaatttggtacacgttgtgaaatgattaccacaaccaaactaattgatatattctttacatcacagagttacttttttttttttttttttttttgagacggagtttcgctcttgttgcccaggttggagtgcaacagcacgatcttggctcaccgcaacctccacctcccgggttcaagtgattctcctgcctcagcctccctagtagctgggattacaggcatgygccaccacacccggctaattttgtatttttaatagagacggggtttctccatgttggtcaggttggtctcgaactcccgacctccggtgatccgcccacctcagcctctcaaagtgctgggattacaggcatgagccaccgtgcctggcctttttttttttttttttttttgagacagagtcacagagtgcagtggctcaatctcggctcactgcaatctctgcctcccaggttcaaacgattctcatgcctcagcctcctagctggggtcacaggcatgtgccaccacacccagctaattttttgtatttttagtagagacrggtttttgccatgttgcccaggctggtctcgaactcctgagctcaggcaacccacccacctcagcctcccaaagtgctaagactacaggcctgagccactgcacctggctgctgccttttttataatagccatcctaacaggtgtgaggtgatactcattgtagttttgatttgcatttccctgataattaatgatgttgagcaccttttcatacacccgttggccatttgtgtatcttctttggtaaaaggactattcaggtctttgctcatttttcagttgggttatttggttttctgccattgagctatgtgagtttcttacataatatttgagatatttgagcttggaagtggacataaaagaaaaataaagaaaaaagaaaaaaaatkttgagatattaaccccttatcagatatacagattgtaaatatttctcctattccataggttgccttttcattttgtcgattgtttcctttgttgtgcagaggttatttaatttgatgtaatcccaggaaaaaaaaatgtaaactttttctttcaaatctttcaatctaattaatgcattagaaagttgccacctcccacaatggtctgtgatccagacttcaacagacctcaaggaatacaccaggagttaaagttacagagcaggccaggcgcggtggctcatgcctgtaatcccagcactttgggaggctgaggtgggcggatcacttgaggccaggagttcaagaccagcctggacaacatggcgaaacctcatctctactaaaaacacaaaaattagctgggcgtggtggtgcatgtctgtaatcccagctatttgggaggctgaggcataagaatcacttaaacctgggatgtgaaggttgcagtgaactgagatggtgccactgcactccagtctgggtgaaggagaaagactccttctcaatatgttagccaggatggtcttgatctcctgaccttgtgatccgcccgcctcggcctcccaaagtgctgggattacaggtgtgagccaccacacccggcctcctgagtccattatttaaggggatttatactataaatgacttccatgaatatgagaggtcctgagtgttatctgtttgcttacttgcttttgggacgtttctatagacttttctttgtaggaattccagtttttctggattcttccctcttcttcatgtatgccattttgcattcttcctaaaaggttggattatagtaagtggttagacgttctttcaatgcagacttttatttttggcattttactaacataaagattctagagttcttgcaacagttggcaaaatctggaactggctcagaacacctctctctgtcctgttttctcattattttagggctcaaaatatctttttytcaacatggctgctctccaggatcaagcactgtctccacaagacagagaaggcagccccttggcagctctggggcttgtttttttcaaataaataaaagtagccacttggaaaaaaaaaaacaaagttccggccgggtgcggtggctcagcctgtaatcccagcactttgggaggccaaggcggggggatcacaaggtcaggagatcgagaccatcctggctaacacagtgaaaccccgtctctactaaaaatacaaaaaaattagccgggcgtggtggcgggcgcatgtagtcccagctactggggaggctgaggcaggagaatggcttgaacccgggaggtggagcttgcagtgagaggagatcgcaccactgcactccagcctgggcgacagagcragacaccatctcaaacaaacaaacaaacaaaaaaacaaagttcctgtcctcatagatttaaatttaaattctagtaggagagaacaataaacarataaacttattaatcctccactgaggattgtgttagacactgtgagaaaaaataaatcagcccaaggatgcgggtgtaacctgtatcaggtggccagagaaggtatctctgaaaaatgacatttggggcctgtatgaagggagtgtctatgtagctatctaggcagatattgttccagacagacagataagtctgtgcaaaggcctcgaggtagagtctgcttagaacatttgagggccagatacagtggccgacacctgtaatcccagcactttgggaggcgaggtgggcgratcacctgaggtcgggagttcgagaccagcctgaccaacatggtgaaaccccgtctctactaaaaatacaaaattagctaagcatgatgaatgcgtgcctgtaatcccagctactcaggaggctgaggtcggagaatcgcttgaacccgggaggcagaggttgcagtgagctgagatcgtgccattgcactccagcgtggcgacagagtgagactccatctcaaaaaaaaaaaaaaaaagaaggagaacacttgagggctgcaaaaaaggccagtgtaactgaagtgaagtaaacttacacaaatgtccactgcatccgtgagaagaaacttagagctttggaatgggccctagacacgagctatttgacatatagccagatattaatcattgttactgctaatggatgggattttagatgatttttaatttcttttgaactttccacgtcatcttctgaaggcctaatccctttggaattagatgatacaacaaactttaaaaatcgtagagtgaaactctgttttttttataggtgaagaaactgaagaagagaacttatgcttctmgatgttgcagargcttaaattccggttgcctgaggcctagtccagggggtcgtggcagcagcaggctgagaccgataagcctcaccagcctcctgaaggtgcttactgatcatgtgccaggacactcttatcatcaacaggcatgcggcaactggagggcagtggttaagacagcaggtcagcaacagagataagccaagacagmaaaaagctggggaagaatccttctgyccacaggagcttttggaattttttttgttttttagacggcgtcttgttttgttgcccaggctggagtgcaatggagcaatctcggctcactgcaacctctgcctcctgggttcaagcgttctcctgcctcagcctcccgagtagctgggattacaggagcctgccaccacgcccagctaatatatatatatacatatatatatacacacatatatatacatatatatacatatatatacacacacatatatatacatatatatacatatatatacacacatatatacatatatacacacacatatatatacatatatacacacatatacatatatacacatatatatacatatatacacatatatatacatatatacacacatatatacatatatacacatatatacatatatacatatatacacatatacacatatatacatatatctacacatatatatacatatatatgcacatatatacatatatacacatatatatacatacatatatatatatatatatatatatatatttttttttttttttttttttttttgagacagagtttcgctcttgttgcccaggctggagtgtagtggcgcgatctcggctcactgcaacctccgcctcccaggttcaagcgattctcatgtctcagcctccagagtagctgggattacaggcactcgccaccacacccggctaattttttgtatttttagtagagatggggttttaccatgttgaccaggctggtctcgaactcctgaccttaggtgatccacccacctcggcctcccaaagtgctgggattacaggcatgagccactgcatccagcccgggttttggaatttcatctggtatgagaaggccagaaaagtgggactcctccaagtcattgtaattaaatgtagttgtagctaagcctcctaaaaatgtgtgctaaaacttgcccatcagtaggccctcagcatagcaaaggaagaagttgtgttttcttttctttttttttttttttttttttttttgagagggagtctcactctgtcgccaggctggagtgcaatggcgctatctcggctcactgcaacctctacctcccgagttcaagtgattctcctgccttagcctcctgagtagctgggattacaggcatgtgccaccattcctggctaattgtgtatttttagtagagacagggtttcaccatgctggccaggctggtcttgaactcctggcctcaggtgatcctcccacctcggcctcccaaagtgctgggattacaggcgttagctgccatgcctggccaaaaggaatgaaatattgatacatactacaacacagataagccttgaaaacattatgctaaatgaaaagagccagatgcaaaaggtcacatattacatgattttattaatataaaatgcacagaatatgtaaattgatagagacagaaagtagcttagtggttgtcaggtgctaggggtagggtggtgtgaatggaaagtgaactgctaatggatatggagtttcttttggagatgatgaaaatctgctgaaattagatagtgttgatggttgtacaactttataaatatactaaaaaaatatcactgaattgtatgctttatatgtatgtctgaattatgtttcttttctttaaaaagggaaaatgttggctgggtgcagtggcacacacctgtaatccragcactttgggaggccaaggcaggttgattgcttgaacccaggagtaggagaccagcctgggcaacatagtgagaccccttctctactaaaaccacaaaaataagctgggggtrgtggcgcatgtttgtagtcccagctacttgggaggctgaggtgggaggattacttgagcctgggaggttgaggttgcagtgagctgtgctcacaccactgcactccagcctgggtaacacagcaactcctcaaataaataaattaaaataaaaagggaaaaagtgaaaggggccattccaaacctccaccccttggttattcggttcatgcggtatttggctatgcgggagacgtcaccaaatattagctacwggcttaagtcatatattcattctgtaagacagccttctaatcctccagctaattttctccagctaatgtagtaactaagctgttagcaggcattctgccattttgtcaagtcagatgcttctgggtccttggggcttgtggtagtgctagtaaattktatcagtgtaattctctctcatcgtgtccttcactgtagacaggttgcttagtgatttgtatggaatatcacagcaatgaataggccttctgcttagtgccagcaggaccatttctggcaggcaaattcatatttggaatgtttctattcccaaaggcacaaattgcttctccttctgtgtagaaagggtccaatgtatcaatctaccaccaagaggctcattggttccctggagaatggtgtgatcagtcaggggcccagcayagccttgactcttggtgcatgggcagagaagcctcagtgagaagtccatgcagacctcctttcttgttgccatggcactttataaatgggcctattaagcaccagggtggctggggaaaaaggctgacatccataggactagctatcttacccatctgattgagagcctactctgcagtagatgccaaacaggacattttctacatatgttccagtagttatttaccattgctttttgcctgtctgcactatgccagtttgcagatgctatgaagtactacctttgcttttcatttaatcatgccccagaatttgctcttgtaaagggtgtggtgtattatatcacagtatagataactcaaaagctatctatttatttacttaattttttattgaggcagtgtcctactatgttgtccaggctggtctcaagctccgatgctcaagggatcctcccacttcaccctcctgagtagctgggattttaaagcctcttaaaagaattattctcatgtgcttctggtagcaagatatgaggttggctttatcactgtctcttagggtcatctctaagtgaggctatgtaatacttccagctggagccagtatactgtgcagaccaattcataaaccaggacttgtcttggtttattcccattggtttatatccattcgtgtcttctctcatgaagccttatrtgtggactgagggaaagccagagaaacagaaggaagaggtgttatggaaccccgagcaagctacttgattttttttttttttttttttttgagatggagtcttgctgtgtcgcccacgctggagtgcagtggcacgatctcggctcactgccacctccgcctcccaggttcaygccattctcctgcctcagcctcccgagtagctgggactacaggcgcccgccaccatgcccggctaatttttttgtagttttagtagagacagggtttcactgggttagccagggtggtctccatctcctgacctcgtgatccgcccacctcagcctcccaaagtgctgggattacaggcgtgagccaccgtgcccggccgcttgtatgttttaattgtgtcctcaggaactgcttgggctagtcttacatatacattttcatttaacaatgaaatgctgctgcatgagtcaaattttatggtttttggaatcagatgacatcaaattcatcaacagttcaggttttacaatttgtgttcaaatggaatgtacttgtcagaaaaggtcatagggggtttactaggattctcctaaaagcaagaggtttcacacacagtagaaattccctgtaccattgggcctgctgggccattaggcccaaggggcagggcagcttgcaccacagcctggtcctgctgtggagcctttgcttgcttgaggcctcacataaaattagagctgtgtgggccgggtgcggtggctcacacctgtaatcccagcactttgggaggccgaggcgggcagatcacgaactcaggaggtcgagaccatcctggctaacatggtgaaaccccgtctctactaaaaaatacaaaaaaattagctgggtgtggtggcgggtgcctgtagccccagctactcaggaggccaaggcaggagaatggcgtgaacccaggaggcggagcttgcagtgagctgagatggggccactgcactccagcctgggcgagagagcgagactccatctcaaaaaaaaaagaaattagagctgtgtgtgtgttacctgataaattgcttagggtgacacgtccataaggtggcatgtccatagatggtgtatgttccctccaaacttcacacaggctcatcaaacatttctctttgtggtagatggtacaatatacacaagactacaatcagaccctaaaaaccttacgaatgtggtcaatcatgaatttttattcaagatttccttcccatcccgtcatgcatgtgttttattaagtcttgtaggatgtttattattttctgcttgtcaggtccaattagcataatatcatcaaagaaacggaccaacgttgtgtgggctatcaagatgacaaaatccactctattataacagaaagcaggatacagccaggcatggtggcttatgcttgtaatccagcactttgggaagctgacatgggaggattgcttgagcctgaccagactgggcaacacagggagacctcatttctctaaaaaataaaaaattatccaaggatggtggtgcacgcctgcagtcccagctactcaggaggctgaggtgggaggatcacttgagcccagaaggtcaaggctgcagtgagctgtgaccacaccattgcactcgagtctgggtggcacagcaagaccgtgtctccaaamaataaaaacaacaacgaaagaatcactagacatttatattttattttaaaaaaggtagaatattcgaaggcagatatctaagcttaaagtagctacagccaagtatactaaacgttaatggtccatgtcctagaggttgaaagattcataatcaggagaatacaaggcaaccaggtgctgagtcagcccacaggggaatgcagataagacctcaggcaggctttaacagggtcttaaagataaaataactatcctgtctaggcacaagcttataggaatcccaatgacagagatacacatttttatttttttgagacagagtctcactctctcgcccaggctggagggcagtggcgcgatcttggctcattgcaagctctgcctcccgggttcacaccattctcctgcctcagcctcccgagtagctggggctacaggcgcccaccaccacacctggctaatttttttttttttttacattttttagtagagatggggtttcaccatatgagccaggatggtctccatcttctgacctcatgatccgcctgtctcagcctcccaaagtgctgggattgagccaccgtgcccagccgtgcctggctaatttttgtatttttagtagacacaaggttttgccatgttggccaggctggtctcaaaactcctgacctcaggtaatctacccacctcagcctcccaaagtgctggggttacaggcgtaagccacgccacccagcctccagaaacttttaaaaagcacatttcctaatatttatgcccttggataacccccttgagtatgggctggaattctgtgactcacttctagcaaatagaaagtagcaaaattgacacatcatttcagagattaggttagagactgactttgggaccgggcatagcggctcacccctgtaatcccaacacttcgagaggctgaggtgggcagattgcttgagcccaggagttcaccatcctgggcaacatggcgaaaccctattatctacaaaaaaactcccaaaatacaaaaattagcaggccagtggcacgggcctgtggtcccagctacttgtgcggctagagtgggaggactgtccaagcccaggaggcaggggttgcagtgagccaagatcgcaccactgcaccccagcctgggtgagagagaccctatctccaaaaaagtatttatttttacaaccttaaaaactgaagaataccaagatatatttatcaatatcgattccatgagaacttgaaacaaattttgaagatacttcattttaaaatgatgaacccattacattcatataattttttttttttgagactgagtctcactgtctcccaggctggagtgcagtggcgcgcagtctcagctcactacaacctctgcctcagactcctgagcagctgagactacaggcacgtgccatcacacccagttaacttttctatttttgtttgtttttttgagacagtctcactctgtcgcccaggctggagtgcagtggcttgatcttgactcactgcaacctctgcctcctgagtagctgggactacaggcccaagccaccacgcccagctaatttttgtatttttagtagagacagggtttcaccatgttggccaggctggtctcgaactcctgacctcgtgattcaccagccttggcctcccaaagtgctgggattacaggcatgagccaccgagcccaccaatgtttgtatttttagtagggacagggtttcaccattttggccaggctagtctcaaacctctgaccttaggtgatccacccagctcggcctcccaaagtgttgggattacaggcgtgagccactgcacccagccaaataaatgtttatgaaaaatacttaccaggagaatgagaaaagattggcagttttatatttttacaaatctgacttaaaaatatatacagtacataatacttgacaatgataaatgactgttactggtttgtgtttagtatgttatgctttttatgtacgttaatttattcctacttattttttttttagacgaagtctcactctgtcgccaggctggagtgtagtggtgtgatagctcgctgcaacctccgcctcctgggttcaagtgatccttctacctcagcctcccgagtagctgggactacaggcatacaccaccatgcccagctaattttttgtacttttagtagagatggggtttcaccatgttggccagaatggtctcaatctcctgacctcgtgattcgcctgcctcggcctctcaaagtgttgggattacaggcgtgagccactgtgcccagcttcctactttttaaaaaactaaaaaatatttttaaatttaaataaattaaaaaataggcttgggtgcggtggctcacacctgttgtcccagctactcgggaggctgaagcaggagaattgcctgaacctgggaggcataggttgcggcaagccaagactgcgccactgcactccagcctgtgcgacaaagcggggctccgtctcaaaaacaaaacaaaacaaaaactataaaacagcctcagccaggtccttcaggtgttccagaaggcactgttatcacaggagatgacagctccatgcgtgttactgcccttggtgaccttccaatggggcaagatgtagaggaggaagacaagtgatactgatgatcctgactacgtggaagccaaggttaatgttttcctggttctgttttttttttttttggttgkgggggcggggtggagacagggctgaagtaatcctcccacctcagcctcccaagtagctggcattacaggtgcacaccaccaaacctggctaatttttgtacttttggtagagaccgggtttcagcatgttgtactggtcttgaactcttggactcaagcaatactgctcaccttggcccaccaaagtgctgggattacaggcatgaggcactgtgtccagtcatctcctgaccttggtgagccactgtgcccatcttttagttttcaatttgaaaaaaagttaaaaaaaaatttaataaaaaagagcttatacaaaaagtataaagaaaattttgaaaaggctgggtgtggtggctcacacctgtaatcccagcactaggaggccgaggcgggcagaccacctgagatcaggagttcgagaccagcctggccaacacggtgaaaccccatctctactaaaaatacaaaaattacctgggcgtggtggcagatgcctgtaataccagctactcaggaggctgagacaggagaatcacttgaacccaggaggtggaggttgcagtgagccaagatcacgccagtacactcaagcctaggtgacagagcaaggctctgtctcaaaaaaaaagtttgtacagctctacagtgtgcttgtgttttaagccatgttattacgagttaaaaagctaaaaatttggcggctgggcacagtggctaacacctgtaatcccagcactttattatgggaggcccaggcgggaggattgcttcagcccatgagtttgagactgttttgggaaacatggcaaaaycctgtctctaccagaaatacaaaattagcagtttcttaaccctgtcttgaaatgaataaaaaaaattacaattaatggcctgatgcagtggcccatgcctgtaatcccagcactttgggaggctgagataggtggatcacctgaggtcaggagttcgagaccagcttggccaacatggtgaaactatctttagttaaaatacaaaaattagctgggcgtggtggcacatacctgttaatcgcagctacttgggaggctgaggcaggagaatagcttragcctgggaggcagaggttgcagtgagctaagattgtgccacggcactccagcctgtatgggaggcagagcaaaactccgtctaaaaaaaacaaaaaaacaaccaaaaccaaaattaaaattaagttaaaagtttaaaaagttaatatagttaccataagctaagttctatttaagttttaaagaataaatttagttactaaaaattagctggacatgctggatcgtgcctgtgttcccagctaccctggaggctgatgtgggaggactgcttgaaacagggaggcggaggtttcagcaagctgagactacagcactgcatttcaacctgggtaacagagaccccgttttgcagtaaaaaataaaaataaatttagggtcgcctaagtgtacagtgttcataaagttgatagtagtatacagtaatgtcttaggccttcacattcacttgctcagaccaattcactgacttgcaagcaacttccagtcctgcaagcgctattcatggttcatattaagtgcccaatacaggtacatcattcattcattaagatggagttttgttcatgtagcccaacctggagtgcagtggcacaacgtcagctcactgcaacctccacctcccaggctcaagtgattctcctgcctcagcctcccaagtagctgggattacaggcatgcgccaacacacccagctaatttttgtatttttaggagagcagaggtttcaccatattggccaggctggtctcgaattcctgacctcaggtgatccacccgccttggcctaccaaagtgctgggtttacaggtgtgagccactgtgcccggcatcatttttttttatactgcatttttacagtagcttttctatgcttgaagacccaaatacttaactattgttataattycctacagcattcagtacagtaacatgatgtccacatttgtagcctataagcaataagatacaccatagtgattaggtatgcagtaggacatctaggttgactacaccttattagagatacttgggactgaaaatatttcagatatttttggatcttggaatatttgcattatactcaccacctaagcatccttaatccaaggatgcaaaatccaaaatgctcaaatgagtatttcctttgagtatcacattggcattcaaagtttcagattttggaacattttggattttattctttttttgagacagagttttgcttgtgttgcccaggctggagtgcaatggcgtgatctcgactcgctgcaacctccgcctccggggttcaaccaattctcttgcgtcaacctcctaagtagctgggattacagggatctgccaccacaccatgctaattgtgtatttttagtagagatggggtttcaccatgttggtcaggctggtcttggaactcctgacctcaggtggtctgcccgccttggcctcccaaagtgctggggtttacgggcatgagccactgtgcccagctctggattttagatttaggatattcaacctgtaccatctaggtttacacaaacctagtacattctaggatagtcacacaagaccaaaattggccaggtgcagtggctcatacctgtaatcccagcactttgggaggccaaggcaggcagatcacctgaggtgaatcaatcttttattttggcatgacaatatttatagatttttactatttaaaaaatnnnnnnnnnnnnnnnnnnnnnnnnnnnnnnnnnnnnnnnnnnnnnnnnnnnnnnnnnnnnnnnnnnnnnnnnnnnnnnnnnnnnnnnnnnnnnnnnnnnnnnnntggtgaaactctgtctctactaaaaatactttagcaaggcatggtggtgtgtgcctgtaatcccagctactcgggaggctgaagcaaaattgctggagcccaggaggcggaagttgcagtgagtggagatcgtgctactgcactccagcctgggcaaaagaatgagactccatttaaaaaaaaaaaaaaaaatcacctagagatgtatttctcagaacatatccctgtcattaaatgacagaggaccgtagttgtttcctaaaggttggttgtaatatgaaagctaaaagcacaagaaattgcaatgtttcattaaaatccattggtctaccttgtacatagttttcaaatgaaaattttatatatatatatacaacattaagattttataaaaataaccaacatgctctgggcgtggtagctcacatctgtaatcccaggactttgggaggccaaggccaaaggattacttgagcccaggagttcaagaccagtctggacaacagggtagaatctcatgtctccaaaaatgtatgtatttttaaattatgtgctcagggttgggcaagatggctcacgcctgtaatcccagcactttgggaggctgaggcaggcagatcacgaggtcaggagttcaagaccatcctgacgaccaacatggtgaaaccccgtctctactaaaaatacaaaaattagctgggcgtggtggcgggcacctgtgattccagctattcggcaggagaatccttgaacccgggaggcggaggttgcaatgagccaagatggcgtcactgcactccagccttggcgacagagcaagcctccgtctcaaaaaaaaacaaacaggctggacccagtagctcatgcttgtaatcccagcactttgggaagctggggtgggcggatcacctgaggtcaggagttcgagaccagcctgaccaacacggtgaaaccccatctatactaaaaatacaaaaattagctgggcgtggtggcgggcgcctgtaatcccagctactctggaggctgaggcaggagaatcgcttgaacccgggaggcggaggttgcagtgagcccagatcgcgcaattgcactccagccagggtaacagggcgggagtacgtctcaaagaacaaacaaaaaaaccacaaaaattctccaaacattaagaaacaaaaacaaacaaacaaaaaaacaaaattatgtgctcactttggcagcacactagaatacaaagattagcaaattaaataatttttttttaaattagccaggtgtattagcacactgtagtcccagctactcatgaggcagagacgggaagattatttaaacccaggagcagtgattgcagtgaacattcatcctacaccgcagtactccagccttgacgacagagtgagaccctgtctcaaaacaaaaactccaacccttttctcgtagtcataaagtaaaactagaaataaagttatatcttgccttccagtttcttgaaatttcctgaacctagtaaatttttttgtgttctcatgtgaacgcaatctaaaaatacctactggcacaactgctgtgacatttcagcttttttttttttttttttttgagaaggagtctggctctgtcgcccaggctggagtgcagtggcgcgatctcggcgcactgcaagctctgcctcccgggttcacgccattctcctgcctcagcctcccgagtagctgggactacaggtgcctcccaccttgtcctggtaattttttgtatttttttttaagtagagacggcgtttcaccgtgttagccaggatggtctccatctcctgaccttgtgatccgcccgcctcagcctcccaaggtgctgtgattacaggcataagccacctcgcatttcagcttttgaaagcactttccaaaatgcgtccttttaaaggtaggaaaccaaaaagaaactgagctgtgaaggtttcaaattagttttttaaaaaataaatgtttatttcaagtatgaaaagtaatgtttaaacgttgtcccaaaattgtgttcagtttcacaagtataaaataagacttctgaaaaaaagtttacaattagttataaaacacttaagaatatattttgacattsacatcacagtgggcatttttgaaaaataaattttgctaatatagcttagaaaccaaaacatatttacagtcccatttaaataaacaagtccttaactgaggaacggtcctccctcaagatgggtagaatttcaaattgatttgtataagcattccttttaaaataatggtaaatctggttcaataaagtagaaattcaaataccttgtttcccckgtgaataccatccatytcttacacatggctacccaaagttctcaagccattttaattaagcactttcaatgaaatacaatgaaagtgrgaaccaaactctgagaaatctttatcatggcatttctcattagtttcagcgaaatattttgaacagaaaaggaaagaaatttcccagtggcaattacaaaaccacatcttgtaattattttacaggactgctaccaaggcttctgcttctcttctccaggtacatctgtttgtaggtttgaaacatttcttttgaatcttttactgggttttgtagcatctcaaatccatctgcactgaagcttctcttcgagagtcttgaattaacattatctaagggaaataaaaactttacttactttatttctcaatgttagctgtgatcaatatataatcaaaattcagagggaaaatatatattggagggataaaaaattaaggcaaggagttaagcaaaagtttcagaaccatagctcttcacttatagaattgtaagttatatacacgtgacatcttgccyttcttttgggggctgttttctactcctgcctccttgccccatcctcattgccctgggctgttctgttctaccttactcttggctcaataaaatgtatcattgcatatcattagtatgaatgtgaycttttaaacagctatgtaaattagcaatacaaagagtacaaatatgagtcagtcccaaacaatacatgaaaaggataggtttcatattttggtcttgccatgtattggatattctaaaacatgtctatagtttcctgtttcttkagaccatttcagtgttacattagcttcagtgtccttttttcataatgacccatcacctattgaaaatatgttgaggctgggtatggtggttcacgcctgtaatcccagcactctgggaggccaaggcaggcagatcacatgaagccagttcaagaccagcctggccaacatggcgaaaccctgttttgactaaaaatacaaaaattagctgggcagaggttgcagtgagccgatatcacacgactgcactccagcctgggtgacagagcgagactgtctcaaaaaacaaacaaacaaacaaacaaacagaattgctgtatgggtatgcgaaatacactttctactgaatgtgtatcactttcataccatcatagtcaagaaatcctaagtyaaaccactgccaagtcagggactatctgtacatttcattcctgctgcagctattttcttctgaataatggggtcttgttttgtctttttctacctgaatgggtggagtattctgtcctgttagttctttagatctgctgcagtcttccactttttcgyttgctttctttcagaattagtaacactgaagccccagatgggtctctaagttgctttccaagaaattcttgtcatttcctcttcatctctttaccctaacttaggacttcaagtttgctgcaacctttgctactgaatttagacatctgtttctcctgtgggttttttttttttttgagacagggtcttggctctgttgcccaggctggagtgcagtgctgcatcagggcttattgcagcctcaactcctgggctcaggtgatcctccttcctcagtctgccaagcagctgggaccacaggtgcgcaccactatgcccagctaattttttaaaaagttatttgtagagatgggatctcctgatgttgccgaagctggtctcaaactcctgggctcaagccatcctccggccttgacctcccaagtgctgggatgacacacatgggccccacaccaggccagatgtatgtttctttatagcagattgggagttcatggcatttttctctcacttcatrgttggttcactgttctccagcctctttgtctaaggtatataattcactatttcccagagatcccttctccagaaccagcttcactcgcccctaataggcatttaaaaaatgcccatgtggccgggcgcagtggctcacrcctgtaatcccagcactttggcaggctgaggtgggtggatcactgaggttggagttcaagatcagcctggacaacatggtgaaactctgtctctgctaaaaatacaacaatcagccaggtgaggtggttcacgctactcaggaggctgaggccgaggcaggagaatcgcttgaacccaggaaccagaggttgcagtgagcctaggtcgcaccactgcactccagcctgggcgacacagcgagactgtctaaaaaataaaataaataaataaataaaaataagtaaataaaaatgcccatgtagccatcacctgagatttttttctcctcccttaggtctcacctatttgcgtcttgttgtgccatgacaaagctrtatgacttgtctcctggactgtctcacccagctttgccttagtgtacctggtttgtgtttttctttcatcatgattctgagtatttcagcctcacattcaccgtgcaktgctcatcctgctgtgctgtctgcacatgtcattcaactcatgcctatctctgaagcctctggtcaatctgtgtatctgtcttttgagtgttttcagcttcagattccaaacatgcctctcgctttctctttgagataatcatgtctctcctgtttccaaggagctttyttcttactccaatcttcgtacccatttgtatctttcgcatttttggctttctgccttccaacccgagaggcattgttttcccactgtcaggcctctcactgctcttcattccctcctctttaggttatttgtcctgttctgattaagagtatatttcttcattgatgcaagtttttcccatatgcatgtttcaatgctaactgactttttttttgagacagagttttgctctgtcgcccaagctggagtgcagtggtccgatctcagctcactggaacctccgcctcacaggttcaagtgattctcccgtctcagcctactgaatagctggtattacaggcatgtgccactacacctgactaatttttatatttttagtaggcatggggtttcataatgttggccaggctggtctcgaacctctgacctcaggcgatctgcctgcctcggcctcccaaagtgctggtattacaggcgtgagccacctcgcccggcctctactcaatttttacacgcctgcttctaagtatttgtttgaagctctcttcacaaccgttgtcaattccttttataaaatgtgcttcttattgtttctcttggtgagtttctgctgctctccatttttgaggctctgaacccctctttgcctattttttttttttttttttttgagacaagactctctctctgtcacccaggctggagtgcagtggcgacatattggctcatggcaagctccgcctcctgggttcatgccattctcttgcctcagcctcccaagtagctgggactacaggtgcccgccaccacactcggcttattttttatattttcagtagagacagggtttcaccgtgttagccaggatggtctcaatctcctgacctcatgatccgcctgcctcggcctcccaaagtgctgagattacaggtgtgagccaccgtgcccagccccctctttgcccatttaatgaaccaaaactaagacaaaaactcttgagctctagcttttagttttcaaagccaaaccctaacaacaaggtactttcactccactaattaaatcatatattcgggtggacacggtggctcatgcttgtaatcccagcattttgggaggccgaggcaggtggatcacctgagttcaggagtttgagaccagcctggccaacayagtgagagaaatccagtctctactaaaaatacaaaaataagccaggcgtggtagtgtgcttgtagtcccagctactcaggaggctgaggcagaagaattgcttgaacctggaatgcagaggttgcagcaaggccgagatcgtgccactgtactccagcctgggagacagagcaagatgccgtctcaaaaaaaaatcaaatactcaaagctctactttttctagttggtcctcagcccaaatcccttcccagcaaataacacagctaggaccggtctcattattaaaatacagtcatccctgggtattgaagagggactgattccaggacacctctgcagcatccacccaaatagataccaaaatctggggatgcttaagttccttatgtaaaatggcatagtatattttatataacctaaagcataccccccacacataccttaaataatttctagattacttttaatacctaatacaatgtaaatgctatgtaaacagttgttatactatattgtcttttaagtttctatttttatggttgtattaatttttttcccaaatattttggatccacagttgcttgaatccacagatacggaacacgcagatacggagggctgactatacctcaaccacacttaatggactttgaaaagaggggaccagattcaagtccctattcagtcactagcaatgaaacttaagtcaaatgatgtaacctctcatctataaaatggaaatatccttgcctaaattgtattgaagattaatcaaattaacatgtaaataattgaatccagggtctggcaaactaagtccagcctgctgcctattttggtagataaagtttaattagaggccaggcacggtgtctcatgtctgtaatcccagcactttgggaggccgaggcaggtggattaccygatgtcaggagtttgggaccggcctggccaacacggtgaaaccctgcctctactaaaaatacaaaaattagctgggcgtggtggtatgcacctgcagtcccagctacttgggaagctgagggagaaaatcgcttgaacctgggaggcagaggttgcagtgagccaagatgacgccactgcactccagcctgggtgacagagtgagactctgtctcaaaataaataaataaataaataaataaatagttaatcagaacacagctgatactcatctacatattatctgcagccatttccctgaaacagagtcagagctgagtagtcaggacagacaccttatgacccagaaaacctaaagtatttgctgtctggtcctatacaggtaaaatatgcaaacctcttagctaactcattgtgataagacttattttcctattaaaataaaataaagctcagcctttcattccacagcacgacaacacaaaaatgtcctcctaccactcaaacacaaacactgaatgactgaaaaaaaaaaaagaacatggataaaatcatactttacaatcatatcataaccataatccaatttccatataccagatagggagataagtgaatgaagatttaaaaagatgactttacctctctcttggctgtctttctgtgtccttttctttgtagcaacaaattttaaccagtcttcttttgtactttttattcctgaaactatttaaatattcattttcagaactctagatattgctaatcatctcctttagtactataacaaaggaaaatcaygtaagctgaaaatagattttgaaaggccctagatataaccacatgtaacacaactctaaaaaaaggactggaaaaatgatttctatttgaaatgcttacctcaattaaaaaatgagtttatctttactaygtaattatgttcccctcacatgaactgaagaggttaatacatctccagatattaaaggacacatgagatagaaaactacattgcccccacccacttccaatgttcccattatatccccacctcaagttccaaggatccaaatgaaagaacctattgaaatcaccaattttttacaaaatgaatatatccctatcttcttttccaggaaaacatatcctgtttatgctattgttttatgaaccccaacaaatatagtcagaaaagcagagcaaagacttcaatttccattcaaatcctttagttttccaatctttctcagcacaatgctttacatataatatccactatgtctaaatgttcccttagtaccatgaacaactagttatcaattttctccttccttcctgcactacattgagaagtctaccattaagctacctaatattcatagctgccagcttggctttaaagattttaaattataacactggacaatactgctttcaaggttcttctatcttatgagtaggctagatgttaccattttaactatagtgataacacagccatcaactgtttcaaagaggacaattagttgacccatttccatatgaacaaaaagacttcagtattcatcattacttatcctctaacattcagaacaaaatttcaagttcacagggctttcaaattacaagtccaaaggagaattaacaaaaccaagactcttacattactagctacttgacacttttctgacattcccacaaggaatgtggaatgtttttcacagtacagccttcttggtactaactgaaatatttctatctggcaagttttacatatagctcgtcatgacgaccaattttctacaatttacaataaggtggcaatgaacacaaaacaaatattgcccaatgaaacaytggtttaccaggcaaaacaaatactaggtagtggcataacacattaaagtctttcccagcagcccagacagcatgagaggtgctagcccaaatattgacctacgactctttacaatrttgtagacaccaccaagaaaatcatactggaccttgcagaggggcttgctccttcctaggatgaggctttacatccttccgttcttccacagagtttgtattctttagtaagatatctggacataatttaaactccagcatgtttgatttttctgtgttacctttcaccggtaaaaaggtctkatgtttattttcctgyctcttatctttatgaagcttcctgggtgaactttctaatttggtgagagaaatgctttcacgttcagtgcatttaaacccaactctattcagatataatttcttttgatcctttacttggggaggcatttggctgaattgagcttcgttgcttatattggttaatttgtctaatttagtcttatcaatccatattttatcaggctgcttcccaccaactttttctttaacattccttagaatgttgtatgttttagactcctgagaatggtggattttgaggtttttaccatggcttgtcaagccatttaatgaytctttagaggtctgcacgccgctgctgtgtttctcatttgatttcccacaactttcaacctgcacggcaagtttacttggtctcrtatgttcagaatcacatggcacgtttttcacacagattttcttcgatgctttattactcagagcttctttatgcttctgcctttgtaaatactccttaggagttagaattctactaaatttagatgaactcgctttcgtgtctacagacttagtatttgataccatcttttctttaacaatggctctttcgtttgggtttgacaaagagtcacctaatttgaatgtagctcccacacttcctttctgttcttgtttatcatgtttctttttctttacttccatatctaatacgttcccttggtctaactttcgtttttgtttgaagctaactgatttgagtttcaattttatcttttctggtgataatgactgtcccaaagaactatgcttcttatacacatctttatttggcaaaaaagctgyttttgtttttagtggacgtgagttctgtgttacatgtttcttctgtcgsgtttcctgagaagcttgttcataagatgctgtcattttattactggagtgaaaggttacctcgtgaaacctcaatttttttcttttgtgattttgcaagggatttagtttatcacatttagatgaaaactgaccagcaactaattcttgttctgtccttggtaagcttttatgttttgttttgggtgtatcttttctactgtcgtcttgtagttcaggaaaatgacttttcccatctggaggagtctttggattatttacaaggctcttaaattgaacaacagtgayatctctatcagaagttctctctccttgtttacaactgttggtatccaaaggasaacactgctctttttgtttctcttcctctgaagatgagttcttgatggaattacactgacactgrggtactccttcgtaaaccatggagagccagcccaatgcacagcagtggatatcatctttctcagagtccagtatcacagaatcacgactttgtccagctgcaggtgcctgcaggtcacactggctaactacttctgtgatgggctcttctttctgaggttctgccaacttgtctactacatagggttgatcatcctgttcaggaaatatttctttcatttgctctgagcttaatattgtaatttgtatttgatctgctgggtctttggagtcagaactggttttatcagcagtttgatcttctgaggtctggtatgtagtttgctggcccacagaaccttcacgtgtattcacagcctcaatgccataaggaaactcttttagaagttctgacagctggtcatgtaggtataagacaggtgccttatcactgtggatttcatttcttgcaggatcttggggagtatagttgctggatgcatctatttcctgagggtaaatatcctcctgaatagcagctgacgagcacktatcgttagctgtgcttttttcagtggcatgctccaaactacttttctctagaataactctgtttgtttcaagattgttaaaagatgactctaagggtggctctgactttgactgatcacatattttatgtgaaacatctgtgcactgtacaggtttatctttttgaraaccaaagtctttattttcagtggtattatctaattgtttttctggttctctgcwgccaatcccttgctgattgggtagagaaggtttctgtggctcaaccattttcaagggaagagagctgaatatctttgctatttgggaattgtaagaggtatcaccttcaaccagagaacaaatattgtcaatctgtaaygtatcactactcacaacagtactattccttgactcctgtgagatttgctgatcgttcataggagaatggatagctgactctaatttgttatgctttccttgattgacattaggtgtgacttctgaattaccattagttgactcattctgcttttccttctgagttagtggaaaaatcttggttgatgttgctgtacttgctactggtccactaacatcaactttcaaagcagcagytgcctttgcattttctgccaattgattttgtaaactacaaacactgccttctttaataacgggatacaytgtttcaggtaacactgcaggtgttattcctttgacagacaatgttttgacctctgacagaactaacggtgacactacagctatctgaagttctgttccctttgttatatttatacctgaagactcataattgtgcattaccatcgacaaagctgtctgctgtgagggattacttattttattctgagaatttgaatttcccacaactgaacaaggactcttaacgyggatgttagcaggctttgaaattccaactgctgttgtgtttgttctgagtttatcacactccttttcttttgcagtatctgaaggytgctttttccacagggaaagacaggttgctagcacttccatggaacagctactgtcacttttagcaggcattccttttgttgaggattcttgtccactgcaaaagkwgytgtccaaaaccctgccacttacattagaagtacttggagtttccatgttcttcaaattcagttggttaccagtcatttgggtatttggattcatttcacaactgtctggtttagaatcctgaatagtttgattagcatcttttaatactgtcttctgagtcttacgtgcctgtgaaagcaaagcragaagtagcrtattttcattttgaatttttgatttatattcctcagtggacawggacttgggaacagaaattgtttcacaaactgctggtgaattttgctcaactttggtaacattttctgatgaaagctgagtattcaatactgcctgggtcatctcaacagctgatgtctttgaagtgagaactttcacatcatgagatgrgtctggcattggccgcttttcagaatagacaggatttggtaaaacagaatcaacttggttaaaccttctgcaattgacttcctgaatgtcagaattcaacatacattgagtcttatttgtttctgcagattccactactgttggtgtttgtctctctgcattctctggcattactggagttatctggggtccagactggattttggcagtttgttttagagacaatttagaattctgagctggttcactataagwagtattagtcattttaatacaacctgctgccatcaaaagatctttattgattttaattttccttgcaagttctgaaaacttctgttttatctctactaatgttttaatatcccttactagcttttcttttgcaacacttgtgtccagtacttgatttgaagttggattgcaagaatccattattttctcttcattagtttgagcaagagtctgaacaccatccacagaagatctaatgggwcygttaaaaggctgtttgytgttggtatttactttcaagttagtgaaatttccaattgtgctgacattttcattagggttttgccactgctgttgaaagctggtccttatttcagatgacagcatttctygactctgaggaacttccatagacaagtgtttagtaatatgctgagtactttgcaaaggctggcttccatatctacagttgtaaggaggaggaggwggtcttttgtcagtttgcgtggcatactgctgtgatggtacagctgaggtctgccttgatggtaaagttaatacagaatttrgaagctgactatttttaacttgcaatgatgtatgtggtataaagttttgtttttgaatggtagaatctggtaaaaagctttgtggtgagtaacggtatagctttggaggtggtctgtaatctgggtaagtcagtcccttagatayacactgttgtgtccaatcaacctgttgctctgaaaaagactggttaagtccctgatttccttggtaagctacaggaagtcgtgtagaattagaagggatcatctgcatttgcatagaataggtatctgatgttatcagttgactctgtagtgccggcatattgggtacgttagctccaaaatcagtttgatgagatacagttgcccctatatgagaatgcacaggattcctcattggtgagttcaaccatacrttttgggtaactcytgaagacatctgcaaattktgagttagttgtttgggtccattaacatttgcatatgttattctttctactgaagtgtgtgaggccacaactgtcccattatgcrtatcagaaacagaaatttgttgaggataattttggatattcagcagtggctgtgaaaytggatttgaattaccgggatacatgcatgcttcttggttacttccaggatagctgaaagaactctgagatgttgtggtaatttggtttattaaagactggtgcaaaaaaggtggctggcttttaggatacagtggtggtaatgtagcactctttggtttttcattccaattcattgtcggtttgatatagtagcagtgtattacaagtcagttataagtcagttacaagtcagttgtctgaatgtcaggaatctgtaagaaataaagatattttattaaaatgctgttttgcctagatagaatatctaagaaaattagtagctgactgtccatcctaattactgaatcttcagagcagcctcatctttaatttgggaagaagaggagcaatagaggatacaacaataaataaggcaagtgtcaatgaaatttctaacgtgtttaacagaaattcattccacacaatgacagctagctttttgttacatttaaatgccaatcaccttctgtttttacttatttttaacagactttcttctaagtaatccatgctaactgcattttttaaaaaagctaacatgacaataaaaatgagaatttaaaaaaaaagggaagttcaaacatatggttaaaaacattctcattgttcattcgcaaagtctaaactccccagggctattcaaggttaccttaatgaactcagtaaatttctggcataaggccgggtgcggtggctcatgcctgtaatcctagcactttgggaggcagaggcaggtggatcacctgaggccaagagtttgagaccagcctggctaacatgccaaaccccatctttactaaaaatacaaaaattagcggggtgtggtggtgcacacctgtaatcccagctactcaggaggctgatgcacaagaatcacttgaacctgggaggtggaggatacagtaagccaagatcacaccactgcactctagtctgggtgacagagtgaagactctgtttcaaaaaaaaaaaaaaaaaaaaggaaaagaaaatttctggcataagcaaacactaattcataaatatcttttgttattcataatgaactctgtatgcacatacctgagtctatgctactaaggtgacttaaagtgggggcccctagataccatcaggatacagctggtggtcaccaggaaaaccaagtattagacggttggaacttttagttctaaccactgacctccataaagtggtggggggagctggagattggactctataaaaagtcttggctgggtgtggtggctcatgcctgtaatcccagcagtctgtgaggctgaggcaggaagatctcttgagcccaggagttcaagaccagcctgggaaacatagtgaaaccctgtctctactgaaaattaaaaaaaaaaaaaaattaccccgtcatggtggtgcatgcccgtagtcccagccacctactcagaaaacagaaggcagtgtagggaggatcatctgagcctgggggttgaggctgcagtgagccatggtggcaccactccactccagcctgggtgacagagtaaggctgttttttttaaaaaacaaaactcttgaacattgagatgtgatgagccgagcttctgggctggtgaacagaacacactgaagtgctgggaaggtagtgacctcagagaaagcataccttgtttgctttatagccagttggtcagaagtacaaacctggacttgtgactagcttcaagtgggggcagtcttgtaggactgagccctttaacttgtgggttctgatggtaacatcaggtagacagtgtcagaactgaatcaaatcacaagccacccagttggtatgtggagagaattggtcagttgggaaaaaattcccacacatctggtgtcagaagtactgtggggccaggtgcagtggctcacgcctgtaatcccagcattttgggaggccaaggtgggcggatcatgaggtcaggagatcgagaccatcctggctaacacagtgaaaccccgtctctactaaaaatacaaaaaattagccaggtgtggtggcaggtgcctgtagtcccagctactcagaaggctgaggcaggagaatggtgagaacccggtaggcggagcttgcagtgagcccagatggcgccactgcactccagcctgggtgacagagctagactccgtttcaaaaaaaaaaaaaaaaatcatgagatcatttcaaaaatctaagataagaatttctgacaaaatcaaatactgccgggcacagtgcctcacacctgtaatcctgtaatcgcagcactttgggaggctgaggcaggggtatcacgaggtcaggagatggagaccatcctggccaacacggtgaaaccccggcctctactaaatatacaaaaaaaaaaaaaaaaaaaaattagctgggtgtggtggcgggcacctgtagtcccagctactcaggaggctgaggcaggagaatcacttgaacccaggaggtggaggttgcaatgagctgagattgcgccactacactccagcctggcgacagagcgagagcccgtctcaaaacaaaaaacaaaaaacaaaaaaaaaccccaaatacctacatatttaaaaaattataaagatggaaacttcttttgataaatggtagctaaaacaattaaatagtaacatggaagatgccactatccctccattaatcattttactggagatcctagctggtataaagaaaaaaatattaggagtataagcagagaggaaaacacaaaactgagtatcagatgttatacagaaaatccaaaactatgtagagatctttttgttttactgtttattacaatgcccaaaaataaggtcaaaatgcaagaatattatcagcagtaatcttttaaaataccattaaaaaaatacttagaaaatgaaggatgtgtcacatctctaacaaacagctgagtgtaaagatatgccatgttcaaatatttgaagacagcattaaagatgccaataatctcaaaatttaggtcaagcgcagtggctcttgcctgtaatcccagcactttgggaggctgagctgggcgactgcttgaggtcagaagttcaagaccagcctgaacaacatggtgaaatcctgtctctaycaaaaatacaaaaaaaaaattagccaggtgtgcacacctgttgtcccagctacttggaaggctgaggtgggaggattacttgagcctgggaggtggaggttgcagtgagctgagattgcaccatttgcactccagcctgggcagcagaatgagctcttgtctcaaaaaaaaaaaaaaraaraaagaaagaaagaaaaagtaattaagagtcaatacaatcccagtggattttttgattttttggggtaacaagcttgattataaactttccatggaaatgcaaaacaagcatgaatagcgaagacatacacacacttttatatatagacayttgttttatgacaaagttaggaaaaaagttcttttcaatacatgaagctaggtcaattggttatctatatgccacgaatgaaaataagccttatccaattacacascaagagacatatacaaacaaatcaatcccaggtagattatcgttttaaagtttccagaaacaggccaggcatggtggcccacgcctgtaaatcccagcactttgggaggccgaggcgggcagatcacctgaggtcagaagtttgagaccaacctgaccaacatggatggtgaagcccccgtctctactaaaaatgcaaaaattagccggatgtggtggcacacacctgtaatcccagctactcgtgaggctgaggtaggacaatcccttgaaccagggaggcggaggttgcagtgagccgaggtcgcaccaccgcactcaagcctgggcaacaaaagcgaaactccatctcaaaaaaacatgagaatatctttatgccctcgggataggggaaggttcctataacagggcacaatgaacaataagaaaaaaggtccataaaacggactgcatcaaaattaatcaccactgtttatcaaaaaacaccattaaggaagtgaaaaagtaaagtcactctctagaagattatattcgcaatacatagcaaagagatcatatccagcctatatagggaattacgtaaaaagaaaaatgtagacaactcaataaaaaataagcatgaagcttaattaaacactgtatgagacactacagttgatccttgaacgtggctttgaagtgcgtgggtccacttatacgtggattttcttttgtctatgctaccctggagacagcaagaccaaccccttctcttccctcctcctccgcctagttaagataaatgtgatgaggataaacacctttatgatgatccatttccacttaatgaatagtaaatatattctcttatgattttggtttttttttgagatggagtctcgctctgtcacccagactggagtgcagtggtgcgatctcggctcactgcaacctctgcctcctgggttcaagtgattctcctgtctcagcctcccgagcagcagggattacagggtcccaccaccatgccaggctaattttgtatttttagtagagacrgggtttcaccatgttggccaggctggtctcgaactcctgaccttgtgatccgccrcacccaatcccttatgattttcttaataaaatttccttttctcaagcttattctaagaatacagcatataatacatgtaacatacaaaatatgtgtttatcaactgtttwatgttactgttaaggcttccactgaacagcatgctattgttgatcaagttttggcggagtcaaaagttaaatgtggattttttttactgcacaagagtcagttatcctaattcctatgttattcaatggtcaactatatttaaatggcaaaatttttggtaagtgctaaatccattatgaatatcagaaatgtaaatgaaaaccataaggtggtaatactatacacaatggctagaattttttcaactctcaataccacatgttggcaagaaaatggaacaaatggaactctcctacaatggtgataggagtatatcatgatccttaaagtaaccaacactttggaaagacgtatggcatcatctaccaagggttaataaatgcaagccctgagacctagaagtttcattcctaggtatgtaccaaacagaaatgcataattataacactgccagcagcattaggtgcagtaagcaaaaactggaaacaaacaaaatagaaatgtattcatattaatgaaacactatagtaacaaaaataaaaggctatatgcaacatgaatctaacaaacacaagactgagtgaaaaaggccagagattaaagaataatccatgattccatttatataaagattgaaacacagacaaaaccaaccatctagggactgtagtggtactttttacaaagtgtgatggaatagcaattggtagttaagtagcatgaagactgcttttgaccagggtgatacttacacacawgtgtgttccctacataatccactgcattatacacttaccatttgtaccctttcttaggtatgttttgatttcataaagttattttttaaagctctcttataatagtagatgcatactattaagcatttatcaaaacccataagacccattggatacagagtaaactctaatgttagtgatggactttaataataacatatcagtatgactaatccaagttgctaatagtggaaccttagagttttggagatgggaggttcctataaagctcttayatgggaatgctctgtactataagctcagttttctttttctttttttttcagatggagtctcgctctgtcgcccaggctggagtgcagtggcacgatctgcaacctccacctcccgggttcaagcgattctcctgcctcagcctcccgagtagctgggactacaggcgcgcgccaccatgcctgactcattttttatatttttgctagagatggggtttcaccatgttggccaagatggtctcaaactcctgacctcatgatctgcctgccttggcctcccaaagtgctgggattacaggcgtgaaccaccatgcctgacctcaattttctttaaacctaaaactcttctagaaaataaagtctatcygttaaaaaaaaaaaaaaaaggcagccaccacatgctgacactcattttacaactctcaggcgttaggactctgttcctctcactactttgactagtccacaaggttggaagcagaatgggtcacagtgttcactgacagaagaaaagcagcacttctaaggagaattaatgatgcttcataactgcccgtccccctcactgtcccctggcttttacgtcaacttggaggagagagtctcatgaactgaattgtaccctccccaaaattcataagtgaaagccctgaccctcagtgtatttggagatagggcctttaaggagataattggttaagtgaggtcattagagtggggctctaatccgactagtatcccccataggaagagggacaccagcgatgtcggcccacagaggaaggaccacgttaggacacagcaagaagacagtcacctgcaagccactgagagagaagcttcaagagaacagaaatcaaacatattgaccctggacttctagccgccggaactgggagaaataaatttctccacccagtctgtggcattactgtcatagtagcccacgataagaaatacatacttggtctctgcccatgattccagacacggggcacctaaaactcttgtagattggggtatacaatcttttgcactaatacgtggtctttgaacccggttcctgacacagagctcctgagacctttgtaatctcctgagtaacaggagtgtctggtaacatagaggtgaccgtagggtggggcagcacctggagagggcatggaagcgctcacatatgcattcccccatgcatctcttccacctggctcttcatctaataggctttataataagtaaactatttccctgagttctgtgagctctagcaaattaatcaaatccacggagggagtcttgacaatcccctctttgtaacaggttggtcaaaagtacaggtctggcgaagtcaggggcagtcttgtgggactgagtcctcaacctgtgggatctgaagctttctccaggtagatgatgccaacatgtaattgaattgtaggacacccagttgttgtcagctggaaaacagtttgcggatgggaagaaatccaaatacattctggtgaccagagatgaagtggtcagttgtgtgaagaagttttggttttcctatctcaaacacagccctagcaattaatacagagcatatgggtaggaagggaaactatctttatgttaatttgggttttttttttcctccatccctctccttcactggcatagaagaaaactgaaaactcgaaaagcactccggaacgacctaaattgaagtttttggaagattgcctactagctacacaaatagactgtgaaaggaaaatacaatcgacccttgaacaacatagggattacgacttagggtggcagtagagtggcagatgcagaagaaactccaagtgtagccagacaaggtagtgtgtggatgcagtcccagatactcaggaggcagagatgggaggactgtttgagcccagatgtttgaggctgtaatgtgctatgactgtacactgcactccagcctgggcaacagagagtgacctcatctcttaaaaaaaaaaaagtcaaatccatgtgtatgtggatccacatgggtcaaactcacattgttcaagggtcagctgcagtctctaggatggcataatctacttgtggatataatgtattcttagaactttcaagaatatattctaacacagattaccatagacaagtttccatggtccatcactaccatttctctgagaraataaattctcgccccaagatctctgccagcctccatcactgatastttaatataaaaaatacttttaaaaagaatttgtgcttccatgaagttacaaaaaatacagtgaaaatatcgttaaagaaattaaaaacagaaaaaacaaagagaaattaaaatgctacattagaaaatactcatttatgcaaaatmaaccccactaaggaataagaaaggaataaaaagacgagacataaaaacaaaaagtaaaacattagaggtaaatgtaattatataaaaaataacatttttatataaacaattctgagaatgtaggaataaactttctcacacttctgacaccagatgtgtgggtgtctcaccccacataacaagcaatcagttctgcagtgtacacaccaggtgggtgtcctctaattcattttaattccaagactatctatatgaagatagtgtcagatctcatcagtttagggctcagtcctgcaagactgcccccactttttttttttttttttttgagacggagtctcactctgtcacccaggctggagtgcagtggcaccatcttggctcactgcgagctccgcctcccaggttcacgccattctcctgcctcagcctcctgagtagctggaactaccggtgcccaccaccacgcctggctaattttttgtatttttagtagagacagggtttcaccatgttagccaggatggtctcgatctcctgacctcgtgatccacccacctcggcctcccaaagtgctgggattacaggcgtgagccactgtgcccagccgagactgccccccacttctgatgccaacaccaagtcccaggttattttacctgtgcttccgaccgaccagctgtaaactgggattcccatgtcccgctcctttggtttgtcgtgttagagcagctcacagaactcagggaaacaccttatcagtttattataaagtatattaccaaggattcagttcaagagatgtagaaggcaaggtcacatgagaaggggcacagcatttccatgccctccctgggtacgccaccctctaggaacctccacctgctcagcaacctgaaaagccttctaaactctatcctttccggttttatggaggcttcattgcacagatctgattaattaaaccattggctattggtgatcaacttaacctcaccccctccctctcaaccaggtgcaccttcaaaggtgtaagaaatgaattccttttcttcataaaggcccctgtttcagttattctgctataagtaacagaaaatggactaagatagacaattggtaccaggaattaggggtagggctgaaaagtcccaaccctttaatcgggccttggtctttcaggtgaccagccctccattctgaaactaggggatgtcagccataagtcaactcattagcatacaaaaaagacatttatcactttggagactgctcgaattttaggagtgtatgcctgaaaacagggataaagaccagagatatatttcataatatcacaatccaaaagacagagaatgtcagtctggattttaaaaactatccaactatatgttattgtttccaagagatataccttagatccaaaaacacagactgaaagtaaaatgatgaaaaartatcacacaaatagctacaagaaagctggaatgcaggccaggcacagtggctcacacctataatcccagaactttgggaggccraggtgggtggattacctgagatcaggaattcgataccagcctgaccaacctggtgaaaccccgtctccaccaaatacaaaaaattagccaggtatagtggtacatgcctgtaatccctgctacctgggaggatgaggcaggagaatcacttgaatccgggaggcggaggctgcagtgagctgagattgtgccactgcactccagcctgggcaacaagagtgaaactccgtctcaaaaaaagaaagcaggaatgcctatactagtatcagacaaaacagactaagacaaaaaatgctgataaagagatgcattttataatgataaaaggatcaacccatcaaggtaacaattacaaacatatatgcactgttgtctaaaacgaaggttcttgaggtagaaataatctgataaaggtttactggaggccaaatgtgaggatcaatctgggaagacataccaacagagttcaaagtgttctggagtccgctacaagttggaaggcttttatatgaaattataggagaagggagggggactcctaatactcaaattgtcttttttcgttggaggatacaatactgaggttataatcattggctactgattgcaacatataggctaaaatgtctaagtgcaagaaaacttgcatcaataaaacctgatttacaaataaagcagcacccttttgagtgttaggttatgcattaatcagtatacccatttgaggaatgtgtaagattctttactcaaggacaggatgtcaccatcttgtatcacaatacctccccaaagcaagttaatctggaagcttgtttacttaaaactgtcaaatgtgatctgtaggttattaatacctaaaagagcatcaaaatacaagaagcaaaaaccacaattcaccaataagagtggaagacttcaattccctactttcaacaatgaatagaacaaataggtggaaaatcaacaaggaagtagatgtcttaaattcccacccacattcccttccagtgaggtgaaagaaaaaggtccagagtacctcaacatgtaggtgggtgactaactgtccattagtagacttctaggtataattctgcttctcttcttttgcagattactatggattgaatccaatagtccaagtattcttgaagttgtgaattgcaaaaattaatttgtgaatcaggaaataattagaagtaaacagctgcaagaaagcataaagataattatggatgtggactttcatattaaagatctcactaagattaacaatatctgtgaaatttaaaaaatattctatatccacacaatgcaaataactgaaaagttgtcaacccagcagcttcctttatttgtaaattgggcttactacagaaaattataaagcaaaaaataatctaaaattatacctataggaaataaccatattactatccatgttaaacacacatgcacaagcacacatacacatgaatagaaagaagyataagaaaatagacctaggctgggcacagtggctcacacctgtaatcccagaactttgggaggccaaggcaggcagatcacttgagctcagaagttcgagactaacctgggcagcattgtggtagcacacacctgtattctcagctacttggggggctgaggcattggatgaacccagggggttgaggcagtggtgagcgggaatcatgccactgcactccagactgtgcgacagagcaagactccgtctcaaaaacaaaagaaaaccaaacaaaccagaaaatgaacctaatattgtgaatatggcatggtggccaggtctgctgtaggtcagataaaacagcaagaaatagaatatggaagtataaactgagccacagcaagaattttggtttattttttttgagacagggtctcactatgtcatccaggctagagtgtagtggcacgatctcagctcactgccaactccacctcctgggctcaagcaattctctcaccacagcttcccaagcagctgggactacaggtgaatgccaccgtgtggctaatttttttaatgttttgtagagatgaggtttctccatgttgcctaggctggtcttgaactcctgaggctcaagccatctcagcctaagaattgttttatacacaggggttaccactggccaggtgtggtggctcacacctataatctcagcatgctgagaggctgaggcagagtccagcagttcaaaaccagcatgggcaacacagtaagacccagtctctacaaaaaaataaaaataaaaatagaaacactagctaggcgtggtggtacacgcctatattcccagctacttgggaggctgagatggaaggatcacttgagcatgggaagtcgagagtgcagtggactatggtagtgccactgtactccagcctggatgacacagcaagatctgtctcaaaaaagggaaagaaaagtgggttgacaatttattaaaggtaagtggaacatcatcagagtgaatcwaagtactattaacagccaatacgacaggcataaaagtctttcaggccaacccaaaagacacatgcatgtagataatgtctagcaggtttcagtatttgctgaataaacaaacattatctgaacaccccattaaagagaagtcctaggccgggcgcggtggctcacgcctgtaatcccagcactttgggaggcmgaggcgggcggatcacgaggtcaggagatcgagaccatcctggctaacacggtgaaaccccgtctctactaaaaatacaaaaaattagccgggcatggtggtgggcgcctgtaatcccagctactcgggaggctgaggcaggagaatggcatgaacccaagaggcggagcttgcagtgagccgggatagcgccactgcagtccagcttgggcgaaagagtgagactccrtctcaaaaaaaaaaaaaaaagagaagtcctaatgtaaacttatagatgggaaaaagtcctgaccacttctgtttccttttctatctatgccaaccacagacatagcatgatttcatctgtaagcatttmagtacctaaaagacgtaggacttaagaaataaataatatacattaaaatactattcttatacctaaaatatataaattcgctctggtattttaaattgaaaacttcccttatggcttttaaagttccacttcttatgttccacaaaggaaagtttatttgaagagtatccactgatatggttaaactgagtaaagtctatttttcattgaaaacctgacttgcaacataagcattcgaaaaattagagatacctgtagaaagttaacaaaccaccaatactaacaattcagtgtaaaaagccacttttcaggaattccaaatgtaacacaatttattcaacctgtactagctctggctttctgtcaccttagtcacagaaaaaattagcctatcagtccttaaataggctttctagaatccatttttctaagcccagatggtcctggaccacaatacaatggtatgacttaataattttgactttacaatgatgcaaaagtgatacaggcattcagcagaaattgtactttgaattttgatcttttcccgggcctgtgataggcagtatgatattcttccacgctgggtggtggcagcaagccakagcacccagtcagccacgtgatcatgagcattaacaatcaatgaaaaacacacacacacacaaaaaaaacaaaaatcccccctgcggaggcaggctggtgttgtggggggtgggggtgggcgggcgtgcagggctgcccctcccacggcacattaaaaaaaacaaaaaaccaatcaatggtgtactgtgttagctaagttttttggatgttgtgttttcccatcccatcatgtctataaaaccccatttttgacttacattttctacttaatacaggtwatcgaaatgtaactccatcgtaagctgaggtacatctgtactactataaacaactaacatttgaaaatctgtatgtaaagaactatgtggaatgcttcatatacttttatctcatttaagtatcacaacaaattaacaaagactmgcaatcctccctcttgcagcacagtggttagaaggggcagaacagttctctatgcttctgtaactgcagtcagcaaaaggccaaatggattcatatattactaagtccaacagcaaaatcaagatcagtatccccagccccacgggatgacaccaagccagatgagaacaccaaactgtggccattttatagccagcaagtataccccccaaggtggtaaagtcctatgcacaattgaaaccaaggaggcagatgagaaactgctttgtgactgtttctcacagggctgcttttctctcactttgttcttggaggacctgcagggttgtcctgccagaatatgggtcagcctgtgattaagcctaagctttgcctccatggtctatgagaagagcaagtcatcagggcaccacggtgaagctgttcacctacaactctgccttcccatctttcatgtatccagctacaaactctattcagaaccacaggccatccaatcagatatcctaatccattgtactttgtcttaggcaacactggattaaaaagtgcctgcaatcgtgattcccagcaggatgatcacacctattgtggaggacataccaaacgttccccatgcagagccaagtaagctaaatatatcccaactaccaagcttcaccagtgagagccacagggctttctccctaaaaaagggagaaataaattgctctactttttctgactcgttaacacaggtacagcatgaagtgctggcaatcacacatcttgactggccagcaggaagttcagaccaatgcaacagactatcatcattcaggctagaatactgacactagtctgttgtgccttcagagcagagaagccagagacaaattttagaccatgttttctatttgtattattccctaaaatgggaattaaagacaacagagaacacatgaagcggaagccagttaccctacgagaattctgccaagtaattcatttcggagccctctggatacccaactcaaggaaacatctactaaatcaagcttgtccaatccgcggcccatgggcagcatgcagcccaagacggctttgaatgaggcccaacactaattcataagcatgattaaaacattatgrgatttwttttttgcaattttttttaaagctcattagctattgttagtgttagtgtattttatgtgtggcccaagacaattcttcttccaaagtggcctagggaagccaaaagattggacacaccgtgtactagaggtctggtgatcttaaatatctgaaaagcgctgacaagcacccccaagtatacatgacacatcagtgtgtggcaggcgggtacaaaccatattaagacaacactgtgttgaggtaaaaactgtattcgaagtatcacttctttttttttttttttttttgagacgaagtctcgctctgtcaccaggctagagtgcagtggcgtgatcttggctcactgcaacctccacctcctgagtttaagcgattctcctgcctcagcctccccagcagctgggatttcaggcacacgccaccacgcccagctaatttttgtatttttagtagagatggcttttcaccatgttggccagaagtatcgcttcttcatcgctcctattatgagtgagtcaattttctgccactggagatagacaaaatgccttcagtggaacagaagagttcctctaaaccatgcagttgagggtagytgtccaggttcttggcgtcttgaacaaagaactgaacaaaccacacaagcaaggcagccaaagcagagacttattttaaaggacagcacactccacagggtgggagcgggggcagcagtggctcaagacagtcaagttacataattttctgcagtttaaatactctctagaggtttaccatggattcacgttatgtaaatgaagtagtggccagccactagcctgattggttgtgggaggggaccaatcagaggtactttcattttctgactgccactcagcaactttgacacagaaaaaggaggggttgaaaagggagtagccggcagggagcagtggctcacgcctgtaattccagcactttgggaggcagaggcacgctgatcacttgaggtcagaagttcgagaccagcctggccaacatggtgaaacctcgcctctaccaaaaatacaaaaattaccgcggtgtggtggcaagtgtctgtaatcctagctactttggaggctgaggcagaagaatcggaagcggaggttacagtgagccaagatcacaccaccgcactccattctgggcaacacagtgagattcagtcttaaaaacaaaaaacaaaaaaacaaaacgacaaaactacaataaacaagaccatatagtactgacacaggacaggcattgatcaatggaayagaacctagaacccaggagtaaaccctcacatttatggtccctagtaaggaaggatcagaatccaggatatcttaaaaacttacaacctgacaatccaaagacaacacaaatttaaggccaaaagttttgaatagatacttctccaaagaaatcaacatgcacataaaaagatgcttaacatgactaatcatcaggtaaatgcaaatcacaaccacaatgagctaccacttcaggctcacttctatggctataaaagttaagtgtctatggatgtagaccaaccatctctcaaacattgctgtataaaattgtgcatgtctattcacaatagcaaagacccagaatcaacctaaatgcccatcaacggtaaaccgcataaagaaaacagtacacatacactagggaatactatgcagccataaaaaaagaatgagatcatgtcctwtgcaggagcttggagctagaggacattatccttagcaaactaacacaggaaaccaaatattgcatgctttcacacataagtgggagctaaatgatgagaacacatggacatgtagaggggctcaacacactggggcctataggcaggcaaagcgtgggaggagggagaggatttgaaaaaaaaacaactaattgggtactaggcttaatacctgggtgattaaataatctgttccacaaacccccatgacrcaactttacctatacacgtacccccaaacctacacacgtacccccaaacataaaacaaaagttaaataaaaaataaagtggtaaatctactttggataatagcctggcagttcctcaaaatgttaaacagttatcataaccaaggaattccactcctaggtatttacccaaaagaaataaaaatacacgtctacataaacactatgaatgatcatagctgcactattcacagtagtcaaagagtgaaaacgtgtcaaacgtctgttaactgatggaagaataagcaaaagtggcatatccatacaacggaatatctggtaataaaaacgaatgaagtaacatacatgtgttaacataaatgagccttgaaaacatgctggatgaaaaatattatgacttcaattatatgaagtgttcagaatatgcaaacctacagaagtagattaatggttacctagggaaaggtgcgttggagaaaatggggagttaccactattgagtatggagatattttgggggtaataaaatattcttaaattgacgtggtgatgggtgcacaactctgaatatactaaaaaccactgaaactgtacactgggtgtaaatgagtgaataaatggcttatgaattttatctctaactatagttacaaaaggcatgctctgaacaacttgaagctgcttgcatctggagatgtcagggctgcccagtggagggatggtctgcctgaaaaccaaagcagaggacagcagagctcaaagatacagtgtcccaaatctttaaaactctcttttggatttagatcctggatccatcaaaacccaaaggttgcgctccrtgaacttttttttttttttttgagacagtctcgctctgtcgtccaggctggagtgcagtggtgtgatctcagctcactgcaacctcccctcctgggttcaagcaattctcctatctcagcctcctgagttagctgggactacaggcgcatgccaccacacctggctaattttggggtttcacctgttagccagggtggtctcgatttcckgacctcatgatccacctgccttggcctcccaaagtgctgggattacaggcgtgagccactgcgaccagcccatggactttattttctaagacagagtctcactctgtcacccgagctagggtacagtggcgcgatctcagctcactgcaacctctgcctcccggatagccgggatttcaggcatgtgccaccacgcctggctaattttttgtacttttagtagagatggagcttcaccatgttggccaggctggtctccaactcctgacctcaggtgatctgcccaccttggcctcccaaagtgctgggattacaggcatgagccaccgcacccgaccctgatccatgaactttaaaagtatgtcatctaatgaattctcctttggggcttgaaaaataataatcaccttatggtttctgtttcttaaaacttcactggacaatacaatttcttttaatacactttgtcattttaatcaccttatttacaaatgaaaccttgtaatttgatacatcaagagaatcttaagttactgtcattaaatctttgcgatcatgaaaaccaggagcataaaaygtatagttccaatctcacttgagattatttacctcaacagcctccaactttgctcttcacttacaagtacacttaaggtattaggaatagtgtaagtattgcatagttgccacccaacaaagcatttagaattcctcaaggtccaagattctttcttcacaatcttcttccaaagtgaatgtttaacttgcgtatctatagccagggttagtcaactgttatcctggacttatctcaaaatgaatacactccctgtctgttttacataatagagtgtgcctctaatgggggagggagggaggcctgattagattcttgaaattcaccttcacaaatgcttttttttttttttttttwaaaaagacagaatcttgctctgttacccaggctgcagtacgatggggtgacttcaggtcactgcaacctccacctcctgggttcagccacttgagtagctaggattacaggcatgtgccaccacgcccgactaatttttgttattattagtaragatggggttttgccatgttggccaacttgaggccagggctggtctcgaactcctggcctcaagtgatctgcctgccccagcctcttaaagtgctggcattataggcgtgagccaccacacctggcctacaaatacgttttaagcaacattaaatcaattccctaagcatttgagctccaattatatccaagacactgataatctaggagggaagagagattcctgtacaatcacagagataatgtagaacaacaaagctttggggcaagtttgtcctgcctaggaatttggaggcattttttattccaaacaagcctgcaggtaaatccagatgtggaccagtagtgacaggtacttcctaacaaaacaagacctacaaaaaagagaatctaagaggatctacagtgatgggtttaatcaataaaaagctcataaatttagagcttaaatgaaccagctgaatttctgctaaggcagcattacatgtcccaggccacaaaatctatttcctctaacatgacaatagctaacatttattgggcacttaccatgcatcaggagctgtttaactgtgatatgcatgaaactcatgtaactctaccataacaatcctatgacattagtgcttgtccccattttatagatgagagaacaggcagaggtttattttccagggttggctgagtgctacagccaagatctgaaccaaagcagtgtggttacagggaccatggtcttaatcattaggtgagacttcctaacacactttgtggttacagatgaaagccctggacatgatcactttggctgcacgggaagcatcctyccagagtggtgctctgygccacattcccctatgtgccaccaacagtaataaaatataataaaaacaatcaaataaacacagcacagacagaagcagacctctgcccaggtaacttccaccacaattcccttaccaaagacctctttccttattttgctaagattaacaactgatttttcagtactatgccaacaacatttcttctcaagctttgctgtcaattccattgtgacccacagtttaatttaaaaccgatgttgattcactgagctagtaattttattcggtaataggtgaattactccatagttgagtgtgaataaccgcctggttaaatcagggcgggtttcttagaggtgatacacttaccgttgagcacaactttactctttaattatcgtgtacattcccatttccctccaaacacgtcagtccctctccacacagtgtttacttctttggtcctagggacagcaagaaacattttataataaaagagcacatgctaatgtgtttactagatatgacactgctgtgcaaaactgttttcttttatggctgcactgaaagcatgctaagtttactgaattcttattaagtgtcctaagtaacagaaatagaaactaggtctggcctgaaaataccattcacttaagttagaatttatgtgcgctcctctaggtccgctattgtagtatcactgcaaaacaataatactttatctctgcacttgtctttattggattaatattaaacagaaaaaaatccgactgcacaggggaaaaaacctaaaaccttaacatgcatgcacattaacagtgactgaaacatgattaaagctaacacatttagcagaaaaatgcaatccccaaacaagctctgcggcccgcctactgaaatgcacccgcccgccactaaatgaaaatgcgcctcaagctcatacacatccttatgttaagacagtatgcactcgatgtactacaaataaattgttttcacggaaatgattccccgaaagtttgctgctgaactcaggaccctaaggacgtttgcttagggaatccgtgtccctcgagaacacctaagatgggtatgcgtttgtgcatttaaaaatgcctcaaggaactattgctgaggaacagaaaccatcgccggcgcagaagcgttcgcggaccacttggagatagatgccagtacagcaattctgttccaggaggcttcggcttaagagggccggggaggaggagaaccctcgggaaatagcaaaaaaaaaaaaagatttttctttttcactccagcgacaggaaagccttaaaaacataagcagctctcatacccacccgcctcaccagccgcgcctcgcagttcgacaaaatgcgtcctagccttcgccactcgcgacctctaccgcgcagagccaggcaatgagggaaaacagccagcgaggcccgccctccggtgcaaggctcggcatccgcggaggcccagggccggccccggygcggcgggcagaagcaagcgcggcggcccggcccagctccggtgggcggacggcgggacgcgcgagccggcggggcccgaggcccgggttccggggccgcccgcgactgcgtctttgccgcagaacaaaagcgctctgcgccgcgcgcaggcccggaccgcgagtgcctctggctcccggctcccggcccccgccccgcccggaccccggaaggcggagggacctcggggtgctcgtctcacacttaccgacaaagggaagaggaccaccccggcaagcggggagaaaaccggcggcctcccgggccccagagtttaagtcaagtggggtccgcctccaggggcgggtcgaggagccaggcccaggatccaggaacagctasgctccgcctcacgcccgaggcggtggctgcgagggccgcgccgccgcggtcctagtgccaccagagaagccgcggacccggcccgcagataacacccgggcttgcagagcgctttcatctgcccgacgcggaaatctcctgcagcgatcttctaccttcagcgtgcatccgcagcacccagagggcacgttaaagagagattgagaaccaccagcaaaactgctgattcagtaggtttggggtggggctgaaaaatgtgcatttctaacaagttcctgagaccgactgttgctgctggcctcaggaccaattttttctataaagcgcatggaagtcagagtgcacccaagagattgttaacccttaaaaaacagaaaaaaaaaaaagaaatcaacaagttagagrsaaataagtgtgaaagaaagtggrtagtctatttggggattctgaaagtccctgaggaaagttgactttggagaccagatcacgaagcacgacctcttaattgccgaccttttgttatagattaactcccttattttcttgttcccagctcagaccagatggcatctgagataaaatacgcattgaataagataaatgaccgcttgactattacatccttaatgtggaatgttaaatagacccttcccaaaaagaaacactgccttgaaccaatcaaattgctatgcgttaaccttctatggaaaatgttgacatcctgttaagcttcccagaccctgcctgtgtaaacgaccctcaaacttctccctttcgaagcactgacccccatcttttggagtctgtgtcctaccgggtcgccatcctcaaactttgcactcaaataaaccaatatttaatcatattgcccgaatctcattattaaggtttacgtaagcgtttacttagtaatgaaggttgcaaccaggatggcaaatcagagattgtgccactggagaggggcaagggagcttatgtttataggaatttatttgttacataaattgtcagattagttcattggtgaattaaacgaagaagtctttagtcattactagaagagtgcgtttgcgtctgtcagaaacaaaacaaaaaaactacatacagaatattctttcttttttgggggggggacggagtcacgctctgtcgcccaggctggagtgcagtggcacgatctcggctcactgcaagctccgcctcccaggttcacgccattctgctgcctcagcctcccaagtagctgggactacaggcgcccgccaccatgcccggctaattttttgtattttagtagagacggggtttcaccatgttagccaggatggtctcgatctcctgacctcttgatccgcccgccttagcctcccaaagtgctgggattacaggcatgagccaccgcgcccggccagaatattcttaaagattgggggtggccaggtgtggtggctcaggcctgtaaccccagcactttgtgtcacgcgcatccgtgtgaagagaccaccaaacaagctttgcgtgagcaacaagactgtttatttcacctgggtgcaggcgggctgagtccgaaaagagagtcagcaaagggtggtgggattatctttaattcttataggttttgggagaggctccgcggaacaatgttttgcgggcagggggtggatctcacaaagtacattctcaagggtggggagaattacaaagaaccttcttaagggtgggggagattacaaagaaccttcttaagggtggggagaattacaaagaaccttcttaagggtgggggagattacaaaatacattgatctgttaggatggggcagaaacaaatcacaatggtggaatgtcatcagttaaggctattttcgcttcttttgtggatcttcagttgcttcaggccatctggatgtatacgtgcaggtcacaggggatatgatggcttagcttgggctcagaggcctgacagtttgggaggctgaggtgggtgaatcacttgaaatcaggagtttgagaccaacgtgaccaacatggtgaaaccctgtttctactaaaaatataaaaattagccaggcgtggttgtgggcacctgtaattctcagctactcgggaggctgaggcgggagaattgcttaaacccaggaagcagaggttgcagtgagccgagatcacgccactgcactccagcgtgggccacagaaagagtctgtctcatgaaacaaaacaaacaaaaaaagattggggatcaggcgtggtggcttatgcttgtaatcccagcactttggggaggatcacttgaggccaggagtttgagagagcagccttgccaacatggtgaacccaatctctacaaaaaatatacaaaaaacaaaaaaaattagccaggagtggtggcatgcgcctgtagtcccagctacttgggaggctgagatggggggatcacttgagcttgggaggcagaggttgcagtgagccaagattgagccactgaactccggcctgggtgacagagtaagagcctgtctcggaaaataataataataataataatattgagaccagctttcttgggttgtgtgttgttgcaaaaacggttgtgttagatatgaattctaaatttctcttcaaagaatcaatatgtcagtatggtcaatctttgccttttacttttaaacttaacttcctcgtaaagcaacctttttccatcacctgctccaccctgactcatttcaatcacctgctccaccctgactcattccgatttcctgccccgccttaaccatttttcctgccaaaccgctcaccccatcactctctttaaattagccaatcagaattagtttagcctgtgcggtctaaccctagccaacaggggaacgacacagcagcagaggccacgtgcatcaggaataagaaccccttcccctcccttgcccaggtgtgagctcaccattgctccatctgtgagggcgcacccgtctatagaagtacattgccgccgggcgcagtggctcacgcctgtaatcccagtactttgggaggccgaggcaggcggatcatgaggtcaggagatcaagaccatcatggctaacactaaaaaatacaaaaaattagctgggcgtggtggcaggtgcctgtagtcccagctactccggaggctgaggcaggagaatggcatgaacccgggaggcggagcttgcagtgagccgagattgcgacacgcactccagcctgggcgacagagcaagactctgtctcaaaaaaaaaaaaaaaagaagtacattgccttgctgagaattaaaaagaaaatttatattcgagtgctatttcttttgcaacaccaaaactttatttataacagttgtttgtgaaggaaatatttttcacagtttcttcgtgggcctcaaagtttagcagcagctcagcatggagtcaatagcccaagatggagtcactgatatcaagcctggaaaattgctaagctgcattaaggagactttttttttttttcatgctattgtagtaaggacaacatccattaatgcagaggaatcttttcaaagaaartgaaatagacttagggtttttataggaggaagtaaacaaggaaatcttgtctgaatgattaagggatgagaaagggcagaggtggttagttagtgcttgtgacataagagggcagactattcctttgcgcttgaggtttgttggttttggtttttaatttttgtagtcttcagtatctcctatatccaccaccatcaccacctcctccatatggatctacataatcttttccaccataatctcccctcccaccatcatctcctctgccttagaaacctcctttaccacctccatcccacctcctccctctcccccaccactttcccatcctcctctaccccagccaactcttccacctccacccccacagcctcttctactaccacctctacctccacaaccaccaccccaaccaccccttccgccactgccttcttgtctcttttgccaagggggcatttcagagggtggtggttcaatttcatttggccagcctcccctgtcaggcacccttcccatcagcaccttattaatggcacatgccatcatctggctggctccactgcttgtcctaatgatcttggatagattatcatgagcagcaagtagatgcaccattataatcgctgtcttgggtgacaaagcataacactgaggctggtaaattcttgctgtgtcatcttttcttaccttggctgtatcacaccgtgcaacggactgtattgccgcatctaattgtttcataacattcgctagaggcactcatgttcacaggaaagagcatcattgactctttccagttgttctgcctgtttcaaatttaaattaattttcagcagagtggttttctttaattttaataaaaaaattaacaatttttaaaaatttgaaataagatgggatcttgctatgtcacccaaattggtctccaactcctgggctcaagagatcctcccatctctgcctcacaaagtgctgggattataggcatgagccactgcgtcctgcctgtctttcacctttgattccacttggtttagcataaccagaatgtcagaagttgtttacttgggtacaccaaggttatcacacagaacttgaacttcctgataaatttcattatttttatctaattgagaattttaatgtttcttgttctgtaatatctgtgaagcttcaagttctgtacttaaaaataataggagtttcaaacagtcctttttatatttttttatttacagtggcgcgatctcagctcactgtgggcttgacctccttgacttaagcaattcttccacctcaggcccccaagtagttggaacaacatgcatgcaccactacacccagctgatttttgtattttttgtagagatggggttcaccatgttgcccaggctggccttgaactcctgggactcaagcaatctgtccaccttggtctcccaaagtgctgggataacaggtgtgagccattgtacccagccagtcctccttttttaaaatgatctttagtatctcctgatatgagtacagaatatggacatgccatttcttttaaaaaaatcatttacctcaagctggaagctctctagatcatctcttccagcagaagtcatactttcttccaagttgcataatgattttatttgaaagcctaaccatatcctgtataggaatttatatagtttatatatctattcctttacagtatataccaccttcttcctgtataaaagcctatatatataatcctataccrtatatgctcctacatatagtccactctgctgccttcataagggcttgctcctctagcaatggtcccttataccccagcacctccagtgtgtctagcacatctccgtctattgttggttcaggacccggctctggccctctaatggctctttggctcaaacctgttcagtgctcttaagtatgccccaaggtttgaatcttgttttgcagctccctagtgatagaactttgtgggaaaatcacttcatttttttgttttttcgctcttctgaaaaatggggataacaataatacttaccttatttaatttttgagatagttacatgaattagtacatatacctcactaggagcagttcctggaacatagctggacacacttggctcagataagggattttctagcacctagccacgcaggtcagcaagtaaaaacaaacccaaggagagggacttttgttgccggaaattctgatagggaccccactcctatacagcctaaggagggcttagtgtccgttaggatttaatgtctgggaagcatttgggataaagtagctgatctctctgccatgtatccttgtctgtacttgtgctgattttatcctctctctgctaggtaagtaaaggttgtctgatttttccaaaagtgtttgatctttgcacagtcttaaagtacaagtgatattcatcaatagagtagtcttaaatggtcaccagtaagaaacttgcaaagggagaatgcaatctcatggacctgaaagtttgtttactcragagccaagctttacactgtcttctctctaagagatttacaacctagtgtgccagaaagccttgtcaactggtcaggcttgggaaagattcccctcatagattagattgctccatactatgctccctttcataaattacgggatcctctccctatgtttcccagcattcaaaaacaaaggctctcttagatgctatctgagtctttcatgagcatagtacttagccttaaggcttgttaagtctttttttttttgagacggagtcttgctctgtcgcccaggctggagtgcagtggcaaaatctcggctcactgcaacctccatctcccaggtttaagcaattctctgcctcagcctcccgagtagctgggattacaggcacccgccaccaggcccggtgaattttttgtatttttagtagagatggggtttcaccatcttggccaggcttgtcttgaactgctgaccttgtgatccacctgccttggcctcccacagtgctgggattacaggcgtgagccaccgaaactggccaaggcttgttaactcttaaacttataaaatatgttttagaaaatgttttaatgacatcattaacatatctatagtaaaagttattttggtttgcaaaaaaaaatgcctattcatttaagttgtaaatgaggtcattagttctttttcttttcttgattgctccctataatctgtttcccgttcttcctttttttttgagatagaccctcactctgtcatctaggctggaatgcagtggcatgatcttggctcactacaacctccgcctccctgctttaagcgattgtcctgcctcagcctcccaagtagcagggattacaggaccgcaccactacacctggccaattttgtatttttwgtagagatggggtttcaccatgttgtccaggctggtctagaattcctgacctcaagtgatctgcttgcctcagcctcccaaagttctgggattacaggcatgagccaccacgccaggcctccccttcttttttgtttctttccccttcwtgttagtaatggttagctgggtacaaagtcagtttgtatgtagtcacttggaatgtaagtagagattatattcccccaagtctctcttgcagctagatgttgtcaagtttcagttctcataatgacatataagcagaaatgttatatgcaacttctgcctaagggaatggcttaccgtgaaactcttcttacatttgcttggattggaatgtagaaatggcagtaacttaatttcaaccatgcaaaaaaaaaaaaagaaataactcctgagggcaggaactcttctctgtttttttgaccataaacctctttggtagtttggtagagcccatggacaccttcttagaatcttttttyttttttttttttttttttttaagacggattcttgctctgtcrcccaggctggaatgcagtggcacgatctcagcgacaacccctgccttccaggttcaagagattctcatgcctcagcctccctgagtagttgggattataggcatgggccaccaagcccggctaattacagacagggtttcaccatgttggccaggctggtcagaaactcctgacctcaagtgatccaccygtctcggtctcctaaagtgctgggattacaggcatgagccaccatgcctggccagaataatcttttgaatgcataaaataaaatatgtgagattacaaaggaaattaattcaaaatgaaagttatcaaatattttaaaaaatcaaatatgtaaaatgtggttaggctctgtttccccacccaaatctcatcttgaattataatccctataatccccatgtgtcaagagagagaccaggtggaggtaattggattatgggggtggtttcccccatgctgttctcgtgatattgagtgagttatcttgagatgygatggttttataagggactcttccccctttgctcagcacttcttcctgccaccttttgaagaaggtagcttgcttccccttcttctgtcgtgattgtaagtttcctgaggcctccccagccatgtggaactatgagtcaattcaatctctttgtaaattacccagtctcaggcagttctttatagcagtgkgaaaacggactaatacagtatttatacatttctttaaaggggagaaggcatgtgggaaggagggggtagggtggtgaggcaaatggttatacttttgtggaactattaattaattagagctcagtaaatctacattttatacagataaggtgattatattataaagaattcagagaaaaagggagtagaggaagaatcaattatgcaaacatctcasggtaggtggaggaatgatttgttctgctcctgggaagatcagcttgtaattgacattatcagtgtgactctagcaaactttagttttaggagctagacttagatggtagacctaaagttaaaatggacatggttcttgttttatgggaggatgtacatcttgaaaggttttgaggccagcaaagagtttagttgggaaaaatttatgagggccatcatgtggagatggtatcagaccttctgcctttctgtgagggtctgggtaatgtatgatgctttgacaccaggttgtaaagtaatagctgtctatttgggaaaaggatagcagtgctgcatgacccagcactgctgcataacaagtttgggggtcctaagatgtttttatttctcctttacaagtcacagggactgctcagctgaatgagccctgcttccaaccgtctcacaactttgaatcatcacctcagccttttttttttcttttttattgagatgagttctcactctgttgccaggctggagtgcagtggtaaaattacggctcactgccgcctcaacctcccaggcccaagagatcctcccacctcaccctccagggtagctgggaccacaggtgtgtgctagcacgcctggctaatttttgtatttttttgtagagatgtggttttaccatgttgcccagattgttcttgaacttctgggcttaagtgatccacccacctcagcctctaaaagtgccatgattacaggtgtgagctactgtgcctacttragcctttttttttttttttgagactgagtctgactctgttgcccaggctggagtgmactggcacagtctcagctcactgcagcctccacctcccgggttcaagccattctcctgcctcagcctcctgagtagctgggactacaggtccgggcaaccacgcctggctaattgttgcatttttagtagagacagggtctcaccatattggtcaggctggtcttgaactcctggcctcaggtgatcggccctcccaaagtgctgggattacaggtgtgggccactatgcccagccccacttaagccttcgttacctttattgtctttggtataagcctctggatatgatttgtttttactactcaaggttctcacagatgacctgggctcatagttccaagagawttttggggcctgtgtatttatttcttctttgttctttttatttgaatatgagctcaatgttgtgcggtaaatagaattaaatattggatcctatggcagaatcttactaaggacattctagaactttagtggctgttctggtgaactttggatgtgaataagataatctgtttttggcaccttacagtcaatggttaaatgttcccagatattcaataattagcgtttttaaatgaccaggaagagtcctctcaaaggaaaattctaaaatagcttctattaaggacttattagaaaaggccaataaaaatatagaggacctaaaagccaacgtttaaatctcttctccatctcttgcctaacccgggattaacttacatcctagacccctggccctcaacttcctcctgcctttctattgggggagcccacccccaatatttcaatgtaggttctttctattttgcataagtgttggctggctgagaaataaagagagacagtacaragagaggaattttatagctgggctgccaggggtgacatcacatatcagtaggactgtgatgcctgcctgagtctcagaccagcaagtttttattaagggtttcaaaaggggagagggtgtaagaacagagagtaggtacaaagatcacatgtttcaaagagcaaaaagcagaaccgctgataagagtctaacaaagatcacatgcttctgagggaacagggcaaagggcaaaagcagaaccactgattagggtccaacaacgatcacagggcaaagggcaaaagtagaaccactgataagagcctatgttcagcggtgcacatattgtcttgataaacatcttttttttttttttctagttgtcaaatgattctttattgaaatattttcctttgtgcttaactggctgggcattccacagcaccactgttgatgtcatctatgatgtcatgagggtagtggccatcaacattacagcccacagactgggcrgtccccaggatctctttaatggttccagagagttctctggctaaggatcagtgccgcatctgtcaagcaatgttgacgatctcatcaaaagttatattcctactgtgtttaatgtttttctattaatttctgtctcttggtgcttccttgagggctttgatgatcagggcagaggcagaagccaccacctcaatctgggtctgtctgttctgaatggtcaggttsactgtaatcctcaggcccttctagtcacctgtttccttggcaatgtcatcaccaaccttttttggagacagaccagggggccgatcttgggggccagtgcagaagtggcactgacttcacctccggtgcacctcaggtatacgactttgatctcattagggttgaacttcggtggcatggtggaggcggctggtgtcagatgaacctggatttgggatgactaaagaaagttgcaccttggcctcctctgaggtgaaagctgagagtgatgaaacatcttaaacaacagaaaatagggtttgagagcaaagaaccagtctgaccacaaatttactagcgctgagttttcccaaccctagtaagcctaaggattctgcaggagaggagggcttatctcagtccttatctcaactgcacaagacagacattcccagagtggccgttcatagacctccccccagggatgcattcttttcccagggtattaatattaatattccttgttaggaaaagaatttagcgatatgtttcctacttgcatgtccgtttataggccctctgcaacaagaaaaatatgactctttttgcccaaccccgcaggcagtcagactttatggttgtcttcccttgttccataaaaatcgctattattctgttctttttcaaggtgcactgatttcatattgttcaaacacgttttacaatcaatttctacagttaacacaattgtcacagtggtcctcaggtgacgtatatcctcagcttacgaagataacaggattaagagattaaagtaaagacaggcataagaaattataaaagtattatttcagaactgataaatgtccatattaagatgaaatcttcacaatttatgttcctctgccacggctccagcaggtccctctgttcggggtccctgacttcccataacacctttctttgactcattcccttcctgctgtgtcttccttaggtcctcttcgctttcctccattactccttcctaaacacccccctttcactggacagtatcccttcgtgatgccttacacctaagtgatgatgacaaccaacttagctaagcttattgttttaaaccttggtcaatttcaggtttgcataatctagttaagaaccttctaaatcctcctacgtaaagagaaaaattcattgaaggatttaggattattttaagaatttataggatggaggcctggtgcagtggctcacgcctgtaatcccagcactttgggaggccaaaatgggtggatcacggggtcaggagttcaagactagcctggccaatatggtgaaaccccatctctattaaaaatacaaaaattagcagggcgtggtggcacatgcctgtagtctcagctactcaggaggctgaggcagaagaatcgcttgaacccgggaggcggaggttgcagtgagccaagatcatgccactgcactccagcctgggcgacagagcaagactccatctcaaaaaaagaaaaaagaatttataggatggatactgtaatctctatccatgagtttatctccttacagaattcagagatgatgaaactcttatataattaatggatcttctcttatgctctccagatagaagatcttgaagaatttttattttatatatatatttttaagagacaggattacaccatgttgcccaatctggtctcaaactcctgggctcaagctgtcctgcctcagccacccaaagtgcagggattacaggtgtgagccacggtgcccggccaaatcttgaagaattagggacataacttctcaaaggataaatccagttttgttttgttttgtttttgagatggattctcactctgtcgcccaggctggagtgcagtggcatgatcttggctcactgcaacctccgcttcccgggctcaagtgattctcctgcctcagcctcccaagtagctgggattatagtcgcctgtgactgcgcctggctaatttttgtatttttagtagagatggggtttcaccgtcttggccaggctggtcttgaactcctgacctcgtgatctacccacctcgacctcccgaggtgctgggattacaggtgtgagccactgtgcccggccataaatccagttttatcagactaaagtgaattatcttgatcatgacatcatcatgcaaaagggaaaatctcttttccttcagagaaaggaagctctttatgattttacctggccaattaccagaacataatttagagaatttcttggactcrtgatattgtagacactggattctgaatttgtctatactggctccccctttctataatcaaaactagttgacacacctgagttcttgtcccaaataaactcactacccttgaattccctaattgttataaactctactttctatttgtgtataaaaaatcaggagaaattttagaggtgttaacagcatgatggacatcaaagacccgtttcttgttacatcttctcatttggccccgtagcagttgcctaccctctttgggtacttacagctgcaaagttaactaaagccactgaagayttaatcttagtagcttcacttaacctcattgtcatgccattcagaccttattgttcttttactttttagagatggagccttgctatgttgcccaggctggtcttgaactcctgggctcagcaaaccttccatctcagcctcctgcatagctgggactacaggcaaaagccactgtgcccagctcagccctcattcttgaatgaaaacaccacttttctgcctctagatttgaggcaggaaaatagggtctagaggcagggaacctaaggccgattgctgactggatatcagagactactccctttacaacccctcctttttytgcatggcagttgaaaaatgaaggtacagccaggtgcggtggctcacacctgtaatcccaacactttgggaggctgaagctgrcggatcacctgaggttgggagtttgagaccagcctgaccaacatggagaaaccccgtctctactaaaaaggcaaaattagccgggcatggtggtgcatgcctgtaatcccagctactcaggaggctgaggcaggagaatggcttgaacctgggaggtggatgttgcagtgagctaagatgtcaccattgcactccagcctgggcaacaagagcaaaactccctctcaaaaaaaaaaaaaaaaaaaaaaaggaaacgtgaaggtacttctgattggtcccctcccgcatcctatcagactggttcttggccactactttatttgcatagaaccaacgggaaacctctagagggtatttaaaccccagaaaattctgtaaccgatactgtgaaccacttgctggagatggctccaaccctggggagtgtactttcatttaaaataaatctctgctttcactgtcttgctttgtgtgtttgtccaattctttgtttaaaatgccaagaactgggacagctaccctcaactggtaacatattttggtgagccagccaggaggtaagcccaaagtttgggatttatttttctctttttcctctttctctttctctcttcctttccaatttgggatccttggtggacagcgcctaagcatggaggcaacagcatgtttctggccagggccactctccagtgaaactgaaaggtttccatgtggaagcgcctgaccgccaccaactggcttgagaccaagtcctttactttttcggtctttcagcggccattttctagtagactgttggtaattgaaggcaactggctggggccagtctctggtgtwacctgaaggccaaggagtgaatggggatggctgccttgcctggaacggggaaggactcttttctatcttttctggttatagtccctgatccctatgtgtgacgtaattggcagtggaagctcacccggggctaactcatacakgtttcaggtgacttaaaccttctttccttatgctgaattctttccttccctactcgactggctaaggacaagtcagagggcttgggcatgttgtagatggtctgtgtgagtcatgggggtggattmataagagggaatttatatacaatttaatcttgcctaaatgtagagagttaaataattgttttaagtgggataggaaaaaaaatccaaaggtttgactacaaattaattctagaagtcaaggccttcatccagggacaagagggaaagctcatagtgggccatcagtggtggagggaaccattccaaagtggtgctagcacccatgtgagtttagcgacatctgacaggctaagatggggcccttaagggtatgccccctgggaaccccaatcaggggccagaatttttccagggggataccccagctaaaatttcggttacttaatgagccctcaacttttcaaagttctcttctcttttctagaccactatgggcaactctccatcaattccacctgattccccacttggctgcatcctctgggattgaaatcaatttgaccctgacaatctaaagagaaaacgtatgatttttgtttctccaatactgtttgtccccattataagctsyccagcctggaacaatgggtggtcaatagtagccttaattatgacaccatcctgcaattagacctrttttttaaaaggcagggcaaatggtcagaaatcccatatgtataggccttcatggccctataccaaaacctaataattcccccacagggaagtccaaaggcagaactagatattatagatgacccccttttacaagggccacctgtctctcagggtgaacagcaactgcctccatatagccgcttgccaagtgttcctgaggctaaaacccaaacactggggaccctactcagtccccctcacactcggaggggaacagcacattcaactctccctccagccctgctaccccttaggaagtagcagaagccaaggggccagtcctagtgcaggtccccttctctataactaatatacaataacataagggaaagtgaggaagctgttctgagaatcccaggaaattcatagatgggctccagactttgaccttagcctttgatctctcatggagggacgctcaattcattctagcaatctgttacacctcctttgaaaaggaacacatccttgaggctgcccgccaggaagcagayaatttatttgcccgaaaccctcagggcaatcacccaggaccagacacagtccctactactgatcctaactgggactataacacacccatgggaatgaacaactgggctaaatttctttaggctctccttggaggaatgagaaagggaataactaaagcagtaaattatgataaagtaagggaggttacacagggaaaggaggaaaattcagccatgtttcatggcaggctggaggaagcttttaacaaatacactaatctggacccttcttctcccaaaggcaaaataggaatggcacagcatttcattagccaatctgccccagccgttagacataagctccaaaaactacagatggggccacaaactaatcaaaatcagcttcttgataccacctttatggtttataacaatcgtgacctggtggaaggaaaaagggagcaaaataaaacggcaagcaggctgggcacagtggatcacacccgtaattccagcactttgggaggccgaggcaggcggatcacctgaggttgggagttcaagaccagcctgaccgacatggagtaaccccgtctctactaaaaatacaaaattagctaagcctgctggcacatgcctgtaatctcagctactcaggagactgaggcaggagaatcacttgaacccaggaggcggaggttgcggtgagccaagattgtgccattgcactccagcctgggcaagaaaagtgaaactctgtctcaaaaaaaaaaaaaaaagaaaagaaaagaaaaatggcaagccaaaattatggaagccatcattggcgatgctgtgaatgcccaaagagtgtccaaaggaaaccagaagagccataaggataatgccagcaagggctcttgcttcaaatgcaagaaagctgggcattgtgcaaagaattgtactaagcatatgccaggcccttgccaaaaacgtgagggtactggttatgacccctggcactggaggattgactgccccagttcccactgaggggctcagtcagtcaaagctctagcagtacaaaaggaggaattagatgaggagccccgggtaactctggctgtgatgggcccccaaattcagtttctttttgatacaggagcaaattagtctgtccttactgcttgtgcaggaaaaccttcctcccagtcaatgagtgttatgggaatggaaggaaggccacaaacaagcttcttcactcctcctttgatttgtcaatttgagaaacaatttttccaacaggaatttctagtagtaccaagctgcccagtcctcctgttgggaagagatattatggttaaaataggggcactactacaatttaagcatcacccagtgaaattgctaatagtcaaaaatacaatgtcccagaccacattaataaacaggctaacctgctagcatggtatactgggaaaccggggaaggctaaaacaaaagtkccagtcaaaacacagcttaaagaccccagctattttcccaattgaaaataataccaagccagggctgggcgcagtggcttatggctgtaatctmagcactttgggaggcggaggtgggtggatcaagaggtcaagagatcgagaccatcctggccaacatggtgaaaccccatctgtactaaaaacamaaaacttagctgggtgtggtggtgcacacctgtagtcccagctactcaagaggctgaggcaggagaatcacttgagccgaggaggcggaggttgcagtgagccgagattacgccactgcattccagcctggtgacagagtgagactctgtctcaaaacaacaacaacaactacaaaaaaatacccagccaggcatggagtctcatgcctgtaatcccagcactttgggaggccgaggtaagtggatcacctgaggtcaggagtttgagaccagcctggccaacatrgtaaaaccccatctgtactaaaaatacaaaaattagctgggcatggtggcacatgcctgtaatcccggctactcaggaggctgaggcacaagaattgcttgaacccaggaggtgaaggttgcagtaagccgagattgtgccactgcactccagcttgggcaacagagtgagactctgtctcaaaaacaaaaacaaaaataagaaaccarttaagctggaagcaagaaaaggcttcatagttaaaatagttgagctatccagagctgagatattacttacccatgggctctgaaaacccttcaattctccttgcaacatccccatcttacctgttctaaaggctttgagggaataccagctagcacaggatctcagaataattaatgaggccattatccctggccatccattggtggtggatccatatataccctcttggctcaggtgccaggggatgcaaaatagttctcagtcctagacctaaaagatgctttcttctccattcctctgcccccagagtcccaataggttttttgcttttgaatgggaaaatcctagtaccagagaaaaataatacacttggatggtgctccctcagggcttccgggatagcccccatttctttgcctgagtcttagagagggatctgagggatctgcaattggagaatgggagtatactctagtatgtggatgaccttcttgtgcgtagccaacctgggtggcttctgaccaaaatactatacaaactttgaatttcctggaatacgggatacaaagatggctcagattaccctccaatggttccaatattttggatatgtcttaacacccggagcctggcaaatatccccagaatgagcacrgaccatatgtggtttgagccctgcctccaacaccaagcagcagcttcattctttttggggaatggctgggttttgcagaatatgggtaccaaattttgggctcatagcaaagcctctatatgaagcaacaagggggcctgaaaatgagctaatggaatgggccccagaaatgagagaagcctttgccaagctaaaacaggcccttacccaggctctcrctcttggcatcccagagctaactaagcccttctccttgtatgtagcagagaagagggccatagctatgggagtactagcccagaaattaggatcagaacccagaccaaccacctrcttcttttcttttctttttctttttctttttctttttctgagacggagtctcacactgttgcaggggccggtgtgcagtggcacaatctcagctcactgcaacctccacctcccagattcaagcaattctcctgcctcagcctcctgartagctaggattacaggcgcccaccacctcgcctggctattttttttgtatttttagtagagacagaatttcactatgttggccaggctggtcttgaactcctgactttgtgatctgcccacttctgcctcccaaagtgctgggattacaggcgtgagccaccatgcctggccccaactgcccacttttcaaagaagttgaatggagtggcctcctgatggccaagttgcctgcgggcaatagcagccactgctatgttagtggaggaagccactaaaatcaacctgggccaactgctggaagttctaacccccaatcaggtaaagtcagtcttagagataaagggacacagccaggcacagtggctcacatctgtaatcccagcactttgggaggtagaggtgggtggatcacctgaggtcaggagttcgagaccagcctggacaacatggtgaaaccccatctctactaaaaatacaaaagtgagctgggcatggtggtgggtgcctgtaatcccagctactcgggaggctgaggcaggagaatcgcttgaaccagggagttggaggttgcagtgagccaagatcatgccmctgcactcaagcctggcaacagagcgagactccgtcttaaaaaaaaaaaaatcagcctcttccagattctgagggtgactggttcatagatggcagtagttttgtgtcaaatggggagtgcagagctggatatgtaatagtaaatcacaacaccattattgaagcccagccactgccccctggcacatcagcacaaaaggctgaaatcattgctcttactggagcattaatgctgggacaaaggaaaaaccttaacatctatacagattctaaatatgcattctttgtggttcatgctcgtgctacaatctggaaagaaagaggactactactaactagcaaacactgtcctataaagcatgggcttgaaattattcagttattagcaacaatacacctgccaaaggccgtagctataatccattgtggggggcatcaaaggaacttaactcctatggcacaaaggaacagaaaggctgatagagaagcaaaagctgaagscctcagggtgcaatcccaacagatcctagcactacttcctttctatgatttcccaatagaacctgaatacacactgtagagttaataacggagsgggggacaaaaacaaggatcctggtggtatatgggatcaaaagcatatctccctcaaacagcccaatggagaattgtaaaaaccctgcttgactccttccatatggggagagatgccaccctggccatggttaacaggctcttcattgggcctaacttagcaggtctgtcaagtctgctcactgggtgcacttaataacccgggacacaaaatgcctcccctaatagaactagtccagaggagaggaacttagccaggggaagactggcaattagacttcacccatgtgccagcttgtagaggataaaagtttttttttttttagatggagtctcgctttgttgccaggccgaagtgcagtggcgtgatcttagctgactgcaatctccacctcccgggttcaagccattctcctgcctcagctgcccgagtagctgggattataggtgtgtgtcaccacacccagckaatttttgtatttttttagtagagatksggtttcaccatgttggccaaattggtctcaatcttctgacatctggtgacctgcctgcctcggcctcccaaagtgatgggattacaggcacragccaccatgcctggctaattttatattttttagtagagacagggtttctccatgttggtcaggctgctctcaactccttacctcaggtgatctgccccmctcagcctcccaaagtgctaggattataggcgtgagccacctcgcccagcctaaagtttctcttaaaaagaaataatccctaagtttaggttacctcagagtctctaaagtgataatggcctgacctttatctcccaaataactcacagtgttgctaaggctctcaaaatctgtattagtcaaggttctctagaggaacagaactaataggatagatgtatatataaaggggagtttattaaggagtattgactcacacaatcacaaggtgaggtcccacaataggccgtctgcaagttgagaagcaaggcagccagtctgagtctcaaagctgaagaacttggagtctgatgttcaagggcaggaagcatccagcatggtagaaagatgtaggctgggaggctaagccagtctaatccctccacattcttctgcctgcttttattctggctgcactggcagctgattagattgtgcctacccagattgagggtgggtctgcctttcccagttcattgactggaatgttaatctcctttggcaacattgtcacagataacaccaaggaacaatgctttgcatccttcaatcaagttgacactcaatattagccatcatagaatcaaatactatttacattcagcatgaaggcctcaatcctccaggaaagtagaaagggctaaycaaactctaaaatgagtgttatctaagctatgtcaggaaacattagaaactttggtcagcctactgcccatagccttcttaaggacctgtaatacccctagagcagaaattaatataagctcataggaaatgttatacggaagggcattcttcactaatgatctaattactgattcagaaacagccagtttagtaaaatacctagctaacctaggtcaatttcagcaggctttacaaaagtttggaactcaaaggctccctatactgggaactaaccagtaacccaaaatcaagtcaggataaggtacttgttaaaacatgcaaggagggatcacctgctcaacaattgcaacccaaatggaaaggaccattttcagtggtaatggccacaccttctgtggtcaaaggactgggattagatcgttcaatacatctttcaaggatcaagtctgcgatacctgaagccccagacctggaacctgaagttcccatcatccactacactgtgaacctgtggaagccctgaagtacctgtttagaaggcagccaaaagagaagaagaagcctaccaattttccttggtgttttgttgcatcgttactgtaggctggataacagtagccatgtttttatattttttgcagattgatttccatctttcaaacggttggaatcacttcctttgtagtaattaaacaattttttttttttgagaaggagtcttgctctgtcaccaggctggagcacagagacgtgatctccactcattgcaacctccgcctcccgggttcaagtgattcttctgcctcagcctctgagtacctgggactacaggcacgcaccaccacgtccagmtaatttttgtatttttagtagagacagggtttcaccatgttggccaggatggtcttgatctcttgaccttgtgatcgcctgcctcggcctcccaaagtggtgggattacaggcgtgagccaccacgcccggcctaaacagaacgttgtttttgttttgtkttgttttgtttttgagatggagtctcgcactgtcgccgaggctggagtgcagtggtgtgatcttggctcactgcaagctctgcctcctgggttcacgcccagcctcctgagtagctgggactacaggcrcccaccaccaaccctggctaattttttgtatttttagtagagacagggtttcaccgggttagccaggatggtctagatctcctgacctcatgatccacccgcctctgcctcccaaagtgctagaattacaggtgtgagacactgcgcccggccaacagaatgttttaattcattcctataatatccctgacagcataggtatccacccctgaaattcccattaaatcttttaaccaaattcattttctctcgcctagagaccatcaagcttcagatgatcagcaacagggtttccagccagttccaaattaagacagcacccctggccatcaagaaactactctgctgtctgggcacagtggctcacgcctgtaatcccagcactttgggaggctgaggtgggtggatcacgaggttagaagatcgagaccatcctggccaacatggtgaaaccctgtctctactaaaaatacaaaaattggctgggcacagcacagtggctcatgcctataatcccagcactttgtaaggcagaggtgggcagatcacctgaggtctggagttcgagaccagcttggccaacatggtgaaaccccgtctctactaaaaatacaaaaattagctgggtgtggtggcgggtgcctataatcccagctactcagaggctgaggcaggagaatcgcttgaacccagcagggtgacaagagcgaaactccatctttaaaaaaaaaaaagctgtctgtgggkgggcactatgtgagaatcaaacarggaaactatcaagccacacacgctgtcacaacccactgagatttgctcagatcccgccatccctcaggccaaatctgcacaagagtttgatagtttttatctgaacaaatttctatttagtgcgatatataattcattcaaaattacatcttttgaagcaaacaaatttttttttaaatttaagagtcagggtcttgctctgttgcccaggctgaagtgcagtggtgcaatcatagctcccctgcaacctcaaactcccgggctcaagtgattcctcacctcagcatcccaagtagctaggactaccagcaccaccaccatacttgttgttttctgaactattgtaggagggcctaaaagtcacctctactcatcttagttcttaagtaggactttcttaagtagggtccagaaatcaaattgacacaagacatcaaaaagagaagagcatacatgttttattaatttttgcatgtacatggggaccctcacaagagagtgaagactcaaagaaatgacaaaagtaggaagattttttacttttcagataaagaatgataaatttgtgaagaaatgacaagacaaagggatctgggccggagtagtaaattctagggcagtcactaggagatttatggagaggtgtaaagctagtggaagataagggttagtttagtaagtttatttatacaggcctgttggagcatcagttcccagtctctggagataggggttgttttctcaccctggtacaaagaagcattctcctcaaaggaatttttatggattgtaacaggtagaaaaggacaggtcagctacctctttctttttttctttctctctcactttcttttctttttcttttttttttcttttttttttttttttgagtcagggtcttgctgtgtctcccaggctggagtgcagcagcatggcatggtcttgactcactggaacctgtgtctccctgcctcccgggttcaagcaatcctcccacctcagcctcccgagtagctgggaccacagtgcatgccgccacacccagctaatttttgtattttttgtagagatggggtttcactgtgttgcccaggctggtcttgaactcctgagctcaaaaacgatccacccgccttggcctcccaaagtgctaggaatagaggcatgacccaccgcacctggccctttctttcctttcttcttgacagtgtctcactcttttgccaaggctggagtgcagtggcacgatcacggctcactgcaacctcaaactcctgggctcaagtgatccttccacctcaaccttcggagtagctgtggcacaggcgtgtgccaccatgcctggctagctcgccctttctgcaactacagtttctaaagtgtctttagcttaaataatcagtatactaattcagcagattttggagtggcacatccttcactccttcactatgaattcatctcacagaaatgagaaggtaactggctttgctgttagaagtccccgaatttcgggccgggtgtggtggctcacgtctgtaatcccagcactttcggaggctgaggcaggcagatcacgagatgaggagatcgaggccatcctggctaacacggcgaaaccctgtctctactgaaaaaatacaaaaaattagccaggcgtggtggcgggcgcgtgtggtcccagctactcgggaggctgaggcaggagaatggcgtgaacccgggaggcagagcttgcagtgagccgagatggcgacagagcgaaactccgtctcaaaaaaaaaaaaaaaagaagtccccgaatttcaaaataaaagtcttgggcttaaaaagtctgaatgttatgctgtgtgttttttgcctccaagtttttagtttcagactaaagtagccagggttataagtaatacaaaagtgtgatggctttgtactctgtcgacttrgataaattcaaactaagtgtcccagcttccttccctgaatgattctgagttgcagttgaccacagaagaaacatgaacaagttttagaagccacaagtgaagcatctgccattttctttgtgctgaaagtaaggctatagtggcaggcgttattgcagtgaggcgttattgttgctgattccctagctggccttgctggggtggggcagggtggcattatgatgtatattggttttcatccatggtccctgccttggtacagtcttgttgtaatatggggtgtgtcagacctcggaggcgggcctttgagcttctcttgccctcctttcacctgcctcaaggcaggacactaatgtttccctcctttctgattgtgggtcttaagacccttgtacaccctgggggaagaaatgctgacatcatgaagcttccataaaaacccaagagggtccgggctcagtggctcatgcctgtaatcccagcactttgggaggccgaggcaggcggatcatttgaggtcaggagttcgagaccagcctggccaacatggtgagaccctgtctctactaaaaatacaaaaattagccggatgtcatggtgcgtgcctgtaatcccaggtacttgagaggctgaggcaggagaatcacttgaaccccggagacgaaggctgcagcaagccgagatcatgccactgcactccagcctgggcgacagagtgagactccatctcaacaaaacaaaacaaaacaaaygaacaaaaaatccaagaggactggattcagggagcttctgtatagcaaacacgcggacattcctggaggatggtgcacctagggagggtgtggaagctctatgccccttcccccaaacctcaccctacacatctcttcatctatatcctttgcaatatcctctataataaacaggtaaacatcagtaagtgtttccctgagttctgtgagccactccagcaaattaattgaacccaaagagggggtcatgggaacctcaacttgaagccagtcagaagttccagaggcgcaggcttgtgattggtttgtgtgagggggcagtcttgggtactgagccctcaacctgtagcatctgacactatctctgggtagatagcatcagaattagagggtacccacatgctcttcacagcttggtatgtgagaaaaaaaaaccacacaacacatggccacagaagtcttctgtgttgattgttgaggtgtgagagtaggggaaaaacacagttagggagagttttccctacacggtggtatccacggcccctcaagctcctaccatatctcctccttcagcttttcttagacctgggccaggtgattgggtggttctgtggcagagggcaacagcttctcctgcaggtcgcccaatgtcattgcttgtccttgtgatttctagtctatccatatggatcccaagtcttgctcttccctactttacattcagccttcctgactgccagcctgggtgacttcagaccctacacaacccacaacccaaggcgacagccttgtgtagacctctccaacagctcccacaactgtctatactctaatccctatgataaatcctcataatctctatcgtaaaccatactctgttactcatagtgtttatgtttctctggtcaaactgactgatagtaggaktccatayacttatgaaataaacatctgaagaggaatacaaaattttgtgccatgtgccaggcattttgctaagtgtgccttatctcacttgatcttcaccagaacaccattgtacaggtgaagacattgagctcraagagatgaatacattttcccaagggcacattgctagactatggaaagctgtgcagtcaagagaatttctacttataaactctgtgccatcttgtaaccacccagtgggttcaccttgctcgctgcctcgacagtctcactctgtcgcccaggctggagtgcagtggcatgatctcaactcattgcaacctccatctcccaggttcaagtgatcctctcatataagcctcccaagtagctgggaccacaggtgcacaccaccacaccccactaatttttgtgttttcagtagagacagggtttcgccatgttgcccaggctcctaagctcaagcgatccacctgtgtcagcctcccaaagtgctgggattataggcatgagccatggcgcccagcctgagaaagaattattcatgaagacctggctgtgtgggaaatcagagttttattattactcaaatcagtctccccaagcattcgagtatttggtgatcagagttttgttttttattttttattttttttttgagatggagtctcactttgttgcccaggctgaagtgcagtggcacgatctcggctcactgcaatctctgcctcccaggttcaagcaattcttctgactcagcctcctgagtagctgggactacaggtgtgctccaccatgcatggctgatttttgtatttttagtagagatggagtttcaccacattggccaggctggtctcaaacttctgacctcgtggtgatcagagtttttaaggataaattggtgggtggggaagccagtgggttgcaagtgctgattggttgggtcagagatgaaatcacagggagtcaaagctgtccttttgcttgagtcaggtcctgggcgggggctacaagattagatgagccagtttaccaagctrggtagtgccagctgatccatcaagtgtacggtctgcaaaatgtctcaagcactaatcttatgttttacaatagtaatgttatccccaggagaaatttgaggacagtcagaatcttgtagcctccagctgcataactcctaaaccataatttctgatctcgtggcgaattttttagtcctacaaaggcagtctagtccccaagcaggaaggaagtttgtttggggaaagttaaactataaattgagttcctccctgagttagttctacgtacacccaggagtcaaattggatagcttgaagcaagatggagttggttagctcagatctcctttactgtcataattttctcagttataattttgcaatggcagtttctatcttgtctctccaaagagcataatctttacctggtgccttcagaatgaggaatttttaccccataggtgttttgactttattcatctttgtttgaaggggatctgaatatgcgaccccaaaatatgacacattgtcataggaaaattttgagctgaaggtaattgagaatcaggagatgcaggtggctgggagcggtggctcatgtttgtaatccgagcactttgggaggccaaggcaggaggatcacttgagcccagaaactcgagaccaacctgggcaacatagtgagacctcatatctgtggcaggccagttctccctgacagtcacacagacagggctccatagcactccatttacatagatgaatttccacagcgcttgccttaatattgggctaacaattaagtctagggaaaatcaatgctcggacgtcagaaccagaaatgaaatatatgttcagtaagtgccttgcacaggcttctcctaaaacctggagcacgtcaagataatggagacagccttacattccttgtaccaggatctgtctcgggttgacatctggggcgagtcaaggtaacatagacagtccttgaaacgatttattttaaggaggagggtctggagcaactcttaggaccaaaccgtaggtaagataaagtagaagtaattgctctggtgccaggatcctccttaagtaaatttaggagacatttcttaatcaccctggtacgaggaccctcacggattaggtagatttagarggcatttttggcctctgaccttctagttgaagcaaaattaattactgataaacttaggcaaatgtgatactgcacgtaggcatgtagtccaaacatgtatgagcatgggaagaattgtaataccttgagttggtctggcgaataatctctgatcttctccctgtatccagttacagaaataaactcccttctttcccagtccatctgcatctcattattgggctgtgagaacatacagccaggcctggttcggttcgggaacatctccaccaaaatttttttttttaattagctgagtgtggtggtgctagcctgtggtcccagctacacaagaggctaaggcgggaggatagcttgaaccctggaggtcgaagctgctgtgagccatgatcatgtcactgcactccagcctgggtgacagagcctaaaagcagggcataaatttcccattgaggaaggtgcttccccacccacccagtaccagggagagaagagtgatttttaccaaagatgggaattaacaccaagatgaatttgcataaacagatctttctaaaatagcccttatcttccattaattcccccatgtttcctactcagtgccccacaattagttccttgaagctcaaaccctctttcctttgttaaaaaggtacataaaaccgcaagtctaactacttctttcctgagaactcttttgcatgcaaatattaataaaaatggtgtgccttttctcctgttactatgtcttttattagtttaatttgcaggccctcagttacaaaacataagagggttgaggaaaatttttcctctctgacatgtttcagttaaaaaggaaccagcctgaccaacatggtgaaaccccgtctctactaaaaatacagaaattagcccggtgtggtggtgcatgcctgtaatcccagctactcaggaggctgaggcaggagaatcgcctgaacccaggaggaggagaatcgcctgaacccaggaggcagaggttgcagtgagctgagatcctgccaccgcactccagcctgggcaacaagagcgaaactccgtctcaaaacaaaacaaaacaaaaccagctgaagaagttcctttgattaacagcacagcacggaaatgttagctctccttagccaaaccttgaaagatactcttatttaatcacagttttaaatgttagcttgcttaccttaaaaaaaaaaaaaaaaaaagccagaagtcagatattcatgatgtgagataaaattcttaagtgtggagggaacaaaaactacaaccttttgtaaaagtcacaaaaggccaatctattgtatcacatatcctcaaagaagagtcagggcatgctgaaacatgctgtgttttgtttttactaacattttccttattacaaaaatgttacattctcattagataagaatacttaaaaaaataaaatattatcaatataattaatgcactggtgtttttcctcctataacttttctgtgcatagttttccctttctttaattacatgttataatgtaatccttataaacataattttaatgattgaatatgtttccaaggaaaagaaatatagtttactaaaccatttctctagtcgtggacaaagagttsatggagacatttattgtgtgtgtgcttttacattgacattttaaaaacaagaacttctgaaaaatacaaaagtacaaaaagttgcaaaaattcaatttcctactttcctccccagaaataaccactgtttaattttattttgtgcatatctttccagacctttgtctttgaacatacattcatattgaaaggcaaaatccttacacaaatttgctaaattagttataagattgcttaactttctcaggrcaataaagacctggaacatttggaattaatgtctctatcaggtggcaaaagcatcctaacaatgtatcaatgtttacagattaatttctaatcttatagagcagtagtgcagtagtttttctgtaccttcgtcagatgttggttcttgtcggctctycatatttgtgggttttacatttgaggattcaaccaactgcagatcaaaatatttttaaaaaagyagttgggggcggtggctcacgcctgtgatcccagaactttgggagaacaagatgggggaggatcatttgagcccaggagattgagaccagcctgagtacatggggagactccatgtctacagaaaataaaaaaattaggcactgtggtgtgtgcctgtgggacacagctacttgggaggttgtggygggagggtcrcttgagcctgagcagttaaggctgcagtgagccgggatcatgccactgcaaaactgcactccagcctgggtgacagagcaagaccctgtctcaaaaaaacaaaaaacaggctaggcgmggtggctcatgcctgtgatcccagcacttcgggaggctgaggcgggcagatcacctgaggtcgggagttcgagaccagcctgaccaacatggggaaaccctgtctctactgaaaatacaaaaaattggcggggtgcagtggctcacgcctgtaatcccagcattttgggaggccgaggtgggtggatcacgaggtcaggagttcgagaccagcctggccaatatggtgaaaccctgtctctactaaaaatacaaaaattagtcgggcgtggtggcactcgcctgtagtcccagctacttgggaggctgaggcagaagaatcacttgaacgtgggaggcagaggttgcagtgagccgagattgtgccactgcactcctgcctgggcaacaagagcaaaactgtctcaaaaaaaccaaaaaccaaaccaaaaaagaggcctagcacagtggtgtggagttccagctactcagaaggctgaggtgggaggattgcttgagcccaggagtttgaggctgcagtgagctatgattgtgccactgcactccagcctgggcaacagactgagaccccgtctttttttttttttttttttttcagatggagtctcgcactgtggcccaggctggagtgcagtggtgcgatctcggctcactgcaagctccgcctcccgggttcacgccgttctcctgcctcagcctcccagtaactgagactacaggcgcttgctaccacacccggctaattttttgtatttttagtagagacggggtttcaccgtgttagtcaggatggtctcaatctcctgacctcgtgatctgcccacctcggcctcccaaagtgctgggattacaggcatgatccaccgtgcctggccgaaacagtttattaacatgtgccgcctgtatacacgcctgaccctgtctcttaaaaaaaaaaaaaagattgcttctgtactgaacatgtacagactattttttcttgtcactagtccctaaacaatacagaattacaactattwacatagcatttacattgtattatgtattataagtaatctagagatgatttaaagtgtgtaggaggatgtgagtaggtcatatgcaaatactatgtaattttacataagagacttaagcatccgtggattttggtaactgagggtggatcctagaaccaatcccacatggatacttatcatttcttacgagtgtgacattcgggcaagtggacttggaaaatgatctggcatggtatcaaaaatcaagcaattggctgggcrcggtggctcacgcctgtaatcccagcactttgggaggccgaggcaggyrgatctcgaggtcaggagatcgagatcatcctggctaacaccatgaaaccctgtctctactaaaaatacaaaaaattagctgggcgyrgtggcaggcacctgtagtcccagctactcgggaagctgaggcaggagaatggcatgaacccgggaggcggagtttgcagtgagctgagatcgcgccactgtactctagcctgggcgacagagtgagactctatctcaaaaaaaaaaaaaaaaaaaaaaaaaaatcaagcaattatcatttacctctttacagaattggtatacattttctttaaatatacatagagtatacatatttaaggtatatatttatacacacataccttctcacttggaagttatgaaagtattttctaaaattttttttctgttagctttatatctttattkggcttaaaatttttaaatcccccctgccctgccaccaaaagtatttattatttgatatgatgtaaggatttttatttttcttgaaaacaaacaaaacagcacctgttgaatagttcatctttccccacaatttgaaaggaaactttaggttgctatatagtatacatatgcacttgagtctatttctggaccttattctttttcagtggccaatttgtccctgcttaaatatgacaatgttattttttcttctttttttgagacagagtctcactatgttgcccaggctggtctcacaatcctgggctcaagccagtctcctcccccaacctcccaaagtgctggtattgtaggcatgtgccaccacgcctggccaacaatgttttgatagctttatattttgatatctgggacagcatgtctcccatatttatccctgtactcaaaatatgtgatgtatgttaatcaactcttcatgtttttattaataatttatattatttttaactggtagaatctaggcatggtcaaaagaataaaaggaaaaattaatcacactcccaattctgcatctcagccatccagtttgcttctccaaaggcaactaatattctagcttcttgggtatcactatatggatattctatagatcatatttgagttgtttctatcttttggcttttgcaaaggtgaaatggacattcttaaaatatatatatatatatatatttttttttttaagatggagtctcgctctgtcgccaggctggagtgcagtggtgtgatcttggctcattgcaacttctgcctcccaggttcaagcgattctcctgcctyagcctcccgagtagctgggactacaggtgcatgccaccatacccagctaatttttgtrttttgcagaggttgcagtgagctgagatcatgccattgtactccagcccaggcaacaagagcaaaactctgtctcaaaaaaaaaaaaaaaaaaacttagccaggcatgatagtgggcaactgtaatcccagctactaaaaacacaaaaaattagctgggcgtggtggcgggcgcttgtagtcccagctactcaggaggctgaggcaggagaatggcgtgaacccggaaggtggagtttgcagtgagctgaggtcacgctgctgcactccagcctgggcgacagagtgagactctgtctcaaaaaaataaaataaataaataaataaataaaataaactcagtcattctggtggataacacagataactttgtggctttcctcttcactatgggggataacagctttaactgtttgctatttgtaattcctattttatgtaatgcctgcttaagactttagcatgcttgggaagaggatgtacatcttttcctkgttttcattatggatttacaactttgcaaaatgtttacatctttgagccacctagaattaactgtaatggaaggtaagctgtaggagttcaactctcgttttccagctggctactcagttgtcacaatactatttattgaacaattcatcctagataaatatagaatcaatttttgtgcatgtccattttttatctattggcaactaataagaagtaaaaccaacactgcagacaagcatatgagagaaggtattttaattgagatcttttataaattgcaatttgagagacacaaatcgagcaagcagctaaatcayattccatacagacaagctgggcaggggcttataaaggttcctggcaagtttatayaagtggaaaattttagcacagtctatgattgrcaatggctgattgacagcttagatgtctcttggtgatgaacgacctaatttggcacagctgtcttctcaggagatttgtgatcaggcccagtgtaaacagttcacatcaaattcagctgcttctttaggatgtttgtgatttggtccaatttgaacatgtcaaatttcatctgagtatatgggtgatgggggtccaactccttatgccctcctggctcctttttagagacctctggcataatcatctccattttggatttcttttcagattttccccttttkatttaaatatttccttagaaaccactgagatcaattatttcagtaagccctttggttctggaatagatttgtcccaggaagtcatgtcccatggaggagggagtcatrgtaatgatagtggatgatctgtgtcaaatggaatagtccaaatttgagcaacaaggaggagttgaggatgtgggccccaattgtggtgcacatatgtggttagggtaggattcatgattgtaggcctratctgtcagttcaatgtgttgagccaccataattttagtttcgttgacagcaacagygtggcatcaagctgagagaggagaaaagaaagaaccagctaggaaggcggttagggcaggtgctcwgtagaattctttcaracaaaggaacaacctgaaaactcaggctacagatacagataagggmactagcacaggcagcttgcctaggatatacccatagctgcacagataaggaagcaaggcccaacatagaagcacctttgttctttgtgtaagcagcagccttccaggaaatagtttcttttccttytgtgggcatgtagatggtgggctgtggtgagtacattcctttccttttttgggcatactttggactgtgagccaaacctctatgaatcatcactccaacactaggctggttgtgagccaaggctccagttggtcctttacaccatcatgccattttctaagtggtgccttttctaaagacaaccaccagtcagcsagcacactaggggtacagggtggagctaccagaaattcacaacttatgcaatttcagttatgcaaatgaaatgcccagacccatctggttcctctgggttcctcataacagcctttgtactcaattgtgaaatggcaaccctctcaggtcccctctctgcagtggagagctttcctctttcacttattaaacttttgctctaaactcacccttggtgtccacattccttactcttcttggtcatgagacaaagagctccaggtaatacctcaggcaacaagactacctcaaagccatttaacaagaatatagtttaacgaggataaacatgactagggtcacaaacaagaataacaggataagttggaacccagatcttaaaatatttccaataactgtaggaagcaaacaaaaaagatcagaaaattcaagattaacccaattaaaaagactaccagaaggtataccttttaaggatctgactaatcttggaatcttcgaggtttccagtactacctgaatttttttwttattattattttttgagacaggctatcacrtcgtcaccaggctggagtgcagtggtgggatctcagttcaccgcagcctcaacgtcccaggctcaagtgatcctccaacctcagcaccccctagtaggtgggactacaggtgtgtaccaccacacctggctaatttttgtagttttattagggatggagtttcaccatgttgcccaggctggtcttgaactcctgcctgccttggcctcccaaagtgctgggattagaagtgtgagccacagcacccagccttgaattttttatttacccaagcagaacaagaggtgttggatatagcagactcctccttgagcactgagtaaataatctgaaactcttctattatctaatctttcacatgctagggattctaaggagttttgttgggtctaatgtctcttcctacaaagacagcaaattgttaytgaacttatgcaaatgactatattgccataaaagaagattaatcacaaatggtttccaaattctgaagggaccaggtagacagaaatgcaaatgtttcaattctgctcacaaaagtctactttacccaattgatctaagctataaatagcttaaagaagaataaaattttccttgactctgaagaacaaaatataaagaatgtggaatgcttcagataaaaagaactcataaaaaatttcaattcttcatcagttgagtcccatgtaattaattcttgtttttcttgatgtcggattaggaatcttcatgaacactttagtttactcatyagagttctggaagtttttacctagtccaatggtatgatctcaaaaattataaaaaatctgtattcaagaatgcttgttatggttttttttcatgaatttccttgaagaagcagcaaatttggggctgcatgtcgtgttttatgcctgtaatcctagtactttgcaagrtcaaagcgggcagatcacttgagcccaggagttccagagcagsctgaacaacatagtgagacctcatttctacaaaaaaataaaaataaattagccagccatggtggcatgcgcctgtggtcctagttacttgggaggctgaggtgggaggatcacctgagcccaggagktcaaggctgcagtgagctatgatcacaccactgcattycagcctgagtggtgacagagtgagaccctgtctccaaagaaaaaaaaaaaaagcaaattttagactgtagctgattataaaccaccttttgaagagaatcaagatcaaggtaggccaggtgcagtggctcacgcctgtagtcccagcactttgggaggccaaggcgggtggatcacgaggtcaggagtttaagaccagcctggccaaaatggtggaacccagtctctactaaaaatacaaaaaattcgccaggcgtggtggcaggcacctgtaatcccagctacttgggaggctgaggcaggagaacggcatgaacccgggaggcggagcgcttgcagtcagctgagatcgtgccactgcactccagcctgggcgacagagtgagactcagcctcaaaaaaaaaaaaaaaaaaaaaaaaacaaggtaaaataacaattgcctgtggatgacaaaagagaatagtcatgattaatgatggaactgataaggaagtatggttatttctgtggtgtcaacaatttaacacaataattagaattatgactgataacacataccaagatatatcagatctttttagaaattttatacaattttggaacacatattaaaaatgcatttatacaaatacaacttcaagaaggtaaaacgttatttcttatttgacaatgaaatacctcctgtataatttaagtaaaagttgatatttaggctatgtatttatacatatataatacatataaatcttttttttttttttttttttgagagagagagggtctcactctatcacccaggytggagtgcagtggtgtaatcatagttcactacagcctcgaactctggggctcgagggatcctcttgcctcagcctccagatagctgggattataaatgcatgctgccatgctggctaatcaaaaaaatatatatttgtagagacttcgtctcactaygttgcccatgctggtcttgaactcctggcctcaagcaatcctcctaccttgttctcccaaagtgtgggccatctcacccagcctgaattcctctcctcttaaactccagctgactatatgtgctccacctctctgctttttttcttgttgacattaattttgccaaggataatgtaaaatttatttggctttttgggaacaagacctcaaactggctcctctaagacttgttcttccatttatatccctccttcctcttgccacctttgctaccacatgagggcaactaacaactatgttttattatttttgtttaatattattgaatttttgttaattgtttgtagaaagagggtctcrctgtgttgcctaggctggtcttgaactcctggcctcaagcaatactctcacctcagcctcccaaagtgctgggattataggcatgagccactgagcccagctggtaaygaagacttataacagtcctgggtctccttgaggaccccttgaaggccacakattccttttctgggggtgggaggatcactgttttcctcgtagagccccaagagctgtgggtggataggttcctctcaggtctaactctctactctttttcatatttaaccttgatccttttggcttttagatacatacatgtgagttgggcatagtggcacatggctataatcccaggtactcaggtcgctgaggcagaaagatcatttgaactcaggagtttgaggccatcctggacagcatagcgagaccatgtcccaaacaaagaaacaaagccaaatagrcacatacatgtgtatgatatatgttgtatctacatgtatttatatgtctatacatatgtttgtgtattgtctacatggtaccaaattaacttaaaaataaatgagtgctcataaataagttgaaatattttttaagtttatgtgactttagtaaatcttttggtagacaaggctagtttaatattgttggtttaataaaaacaattatgtctcctgagttgtcagcaaaacatgcatgtatttaactttaagtttcttacttttatgatatttacctaacatacagtaataaaaaatggttacctttagaattttgctaagctaaattaaattayggatagtcattgaatatctaggtcatttccaaataagatataatgctaagacattaattactaaattcgagtttaagcttatatacttttggctctgtttgtttggttatttgagacagagtctcactctgtcaccsaggctggagtgcaggggcacgatctcggttcatggcaacctctgcctcccaagttcaagggattctcatgctctaaaaagtcaaaagtcaaaagtcgattttgactgtagagctcttaaaaaaaatcttttgaccagattttagatggacaaatagcaaacattcctatttcttggcttcatttctgaaatttgcaccaagaagaagctttttgtttttgttgttttttgtttgtttgtttttgcaggggtgggggtatatttgcctattagaggtctagaataatcactattttatttatttgtttgtttttcccgagacaactctgtcacccaggctggagtgcagtggctcggtctcagatcactgcaacctccacctcccaggctcaagtgattctcatgtctcagcctcctgaatagctgggactacaggcgcgtgccaccatgcctgggtaatttttgtgcttttagtagagacaggatttcactatgttggccaggctggtctcaaactccaggcctcaagtgatccgctcgcctcagcctcccaaagtgctgggattacaggcgtgagccaccatgcccagcactagaataatcactatttaaagctgttgtctttgaaatgttttaataaacttgttgagtatgtggttccatttagctcaggagagaaggctgaacaaacaaaggaacaaaaagttttcataaatttataaatttcataaatttaaatataaactatataaatattttatatttaaaatataaaccgatgtttaaaatcaaaggtatacctgaacaaatgagaaaaccaacacaaataaacacacaggagacccaaaccaagaagcccttttaaaccaagcccttcattaaaacttggctttaatcaagtttcccaaagagggagcaaaagttagcagcccttacaggatccagaccctcccaaggacagcttagagaaagcttccctagcaacaattggggtgcaaccccacatttgttcaccatattctctatggcctcagcttttcagcccagtgtctgccagaccttccacaaaggcagaccttcccttgtgtgcccagcagacagacaatgagaagagacagtcactaaaagaggaaaacaaaagctgcccatgggggtggaaagaattacaaatgggcaccccaaaacctcaagagtcacaccaaaaattcaaaacaattaaccaagctaattcttataaatgtttctcccctgagctaaagacatcccctgaggaaaggaattttttggttggtccggagaactttagctctgtttcaaatccaatctcgmtggaatgctgcttagctaattccctaaatgctaacatttcaaaaacatggtaaggtttacatctccaaaggactgagaaaggcctggaaaatgctggagtgactttagtaaatcctgcagcaaagttgagcaggcaatttgaacatttaaagaattttctgcgggtgttaaaggagaactctccagaaaaaaaagttttagccgttaacagtccaaatttccaaaggttggccaggtgcattggttcatgcctatagtcctagcactttgggaggccaaggctggaggatctctgagtccaggagtctgaaaccagtatggggaatatagtgagaaagccatctctacaaaaattttttttaaaaawttagccaggcatggtggcacatgcatgtataagtctctgctacttgggaggctgaggtgggagaatcacttgagcctggaatgtcgagactacagtgagctgtaattgtgccactgcaacctctgcagcttgtctcaaacaaaacaaaacaaaataaatttccaaaggtatacctctaactgggactcaaaacctgtaagcctttttatggtatataatcagatgcataaattatgcctgaagagggtgcaagtatgcagttcccctcaagatctgaaatttcttctgaagatagcctaagaaagtaaagaccctcattatcaaggcaatgaaggttgagacaattaagacaaatttccctgagagatgacacatttgaaaaaacagacatttcagacccccggctggactcacagctggccatctgacataagctcaacaatgtacgctctctgaggtggtagagactggagaataaatttgctggtgacaaagccaagcttctcaagaaattaagcaggatgaaaggagaatcttatgatttttcctccttatgagaagccctacaaaaagagagcgacaagggaaataaagaccatctttggaaactaaagaacaataaccaacagtacctgaagcagattcacaagagtcacatttcaaaaaactaattgttttttatttgtaatttttttttcctgccaatctgaacctggaaaagaagaaacagggaaattttttaccttcctctcttgaccaggtaccacaaatagaagtctgggagaagctagttgggcgcagtggctcacgcctataatcccagtactttgggaggccgaggcaggtggatcacgaggtcaggagttcaagaccagcctggccaacatggtgaaaccccgtctctactaaaaatacaaaaattagctggatgtggtggcaggtgcctctaatcccagctactcgggaggctgaggcaggagaatcgctgtaacccaggaggcagaggttgcagtgagccgagatcacgccaccattacactacagcctgggcagcagggggagactctgtctcaaaaaaaaaaaaaaaaaaagaagtctgggagaagctgactttcataaaaatcctacctatttatattggcttctgcaagttctcccaggattccacttataggtcttggagtgagtggagtgtctctattggtcccaactgagttgycaaattgtagaggagaaaatataatttttttctttccctcataggttcttatttgagacactccccaaaacaatgaagccatccttgtaattaaaagtggcaacagaaaacacctgaaaaaaggcctcaatctgaaccatgtcaggaggtttagaacayaagaggactcacccagtgaattccagrgctatcaagatcaatggagtgcaaaagcgtcctgcaggtacctttgcttgggtccatggtggcatcagagatcaagagggaactgctctgtatcccacttctgacaccacgtaatataaactaataagaaataaaaccaacgctgtggatcagcaaacaaaagagaagatattttagcccagcatgatggctcatgcctgtaatttcaatactttgggaggcttaggtgggaggatcacatgaacccaggggttagagaccagcctgggcaacatagtaagacattgtctctacaaaaaataaaattagctgggcacggtggcgcatgcctgtagtcccagcttgggaggctgaggtgggaggatcacttgagcctgggaggtggaggttgcaatgagccaagattgtgtcactgtgctccaggctaggtgacagagcaagagaccctgtctcaraaaaaaaaaaaaaaaaaaaaggtattttaattggggtctttcatgacttgcaatttaggagacacaaatctgttccattcagacaagactgggcaggggcttataaaggtttcttgcaagtttacacaagttgaaaattttagcacaatccatgattgacaatggttgattgacagcttgtatgtctctaggcagtaatgagcttaattcagcacagttgtctcctcaggaggttggtgattagacctggtgtaaatagttcaaatcaaatrcagctgyttcttaaagaagttttaaatttggctcagttcaaagaggtcaaattccttctgggtgtgtacgtgactggggttcaactcccaactccttatgccctcttggctcctttttagagacctctgacataatcatctctattttggatttcttttcactctatctattatctatatatctatctatagtatatgtgtgtatgcataaatactgttaagaattcctttgtatttcacagaatgcatagattaattggaagagattttcctgtttttaatttttaattttatgttgagtcctctgatccagagactgtctctccatttatccaggtgttcttttayatccttttttttttttttttttttgagacagggtcttgctctgtcacccagtctggagtgcagtggcataatcttggcttactgcaacctctgcctcctgggctcaggtgatcctctcaccttagcctcccaagtagctgggactacaggcatgcaccacccaccacacccagctggtttttctttttcttttttttttttttttgagacagagtcttactctgtagcccaggctggagtgccgtggctcaatctcagttcactgcaacctctgcctccccagttccggttcaagcagttttcctgcctcagcctcctgagtagctgagattacaggcgtgtaccaccatgcccagytaatttttttttttttttttttttgagacagactctcgctctgttgccrgrctggggtgcagtggtgcaatttcagctcactgtaacctctgcctcctggattcaagcgattctcctgcctcagcctcctgagtagctgggattacaggcgcacaccacgcccagttaatttttgtatttttagtagagacagggtttcaccacattggccaggatggtcttgaactcctgacctcgtgattcrcccgcctaagcctcccaaagtgctggcattacaggtgtgagccaccatgcctggcctagtttttgtrtttttagtagagatgggatttcatcgtgttgtccaggctggtctcaaactcctgtgctcaagtgatcctcgcgcctcaacctccctaagtgctgggcttacaggcatgagccattgcacctggttgtttatatctttttatacaatcatacagttttatgcagtctttgtaggtagtctagtttctcctgctattgtaaggaaacttttccattgtgtttcctgatttattattttgtcctatatatttagttgtgataagtatatataacataaaactttgccattttaggccaggcacagtggctcatgcctgtaatcccagcactttgggaggctgaggcaggtggatcacaaggtcaggagttcaagatcagcctgaccaatatggtgaaacccgtctctactaaaaaaatacaaaaattagcygggcatggtggcgtgtgcctgtaatcccagctactcaggaggttgaggcaggagaattgcttgaacccaggaggcagaggttgcagtgagctaagatcgtgccactgcactccagcctaggcaacagagcaagactccatctcaaaaaaaaaatttgccattttaacaatacttaagttgttaagtattgttaaaatggcaaatttttatgttatatatatcacaactaaatatataggacaaaaggataaattcactatttccaatctacttaatacaataattcagcattaagtattgtgatttctctgaaatgtatatttggtcttcatcttgtttctgggcacacaacttctaaaatccttagaatcttcatttaaaaaaactatttatttrttaaaaaaaataaagacagtgtctccctatgttgcccaggctggtctcgaactcctgggctcaagggaacctcytgccttggcctcccaaagtgctaagaatacaggcgtgagccaccatgcccggcctccttagaatcttcaaagtgatgtgtctttttgtatgctaacgagttgacttaaatttggcagcctctaggtagcttcagtggggtctggttacctcaaaaaccaacrtcagaataagaattgggactttcagccccacccctcaacctccagggagcaaagaagggctgaagkttaagttgatcaccaaaggcaaatgatttaatcaatcatgcctacgtactgaacgtactgaaacttacataacaagagaacagggttctgcgagccttggaatagctgaacatgtggaagttcctggagtgtggcgcacctagagagggcaaggaagctctccatcctttgccccatacctcgccctatgcattgcttcctcggtatcctttgtaatatccttcataataaattggtaaatgtgttttcctgagttctgtgagctgctttagcaaattaatccaamccaaagacaggcaacatagtgagaytcctgtmtctacaaaaaattttttcaaaaaattagctgggcatggtcgtgcacagctgcagtcccagctactttgggaggctgaggtgggaggactgactgaggccaggagttcgagactgcagtgagctgtgatcacaccactgcactccagcctgggcaacagagtagkaatctctttttttttttttttttttttttttttttttgagaaggagtctcgctctgtcacccgggtgggagtgcagtggtgctatctcggctcactgcaagctccrcctcctgggttcatgccattctcctgcctcagcttccccagtagctgggactacaggcgcccgccaccacgcccggctaattttttgtgtttttagtagagacggggtttcaccgtgttaaccaggatggtctcgatctcctgacctcgtgatccgcccgcctcggcctcccaaagtgctgggattacaggcgtgagccactgtgcccggcctgtctcttcttttttttttttgaggtggagtctcgctctgttgcccaggctggagtgcagtggtgccatctcggctcactgcaagctctgcctcctgggttcaygccattctcctgcctcagcctcctgagtagctgggactacargcaccygccaccacgcccggctaatttttttttgtatttttttagtagagacggggtttcaccgtgttagccaggatggtctcgatggggttgaactaggtggcctctaaatatctttgcatccctgaacagcagcattatacatttagcccttaactggaagccctcaaggaaacccagactctgtgcttcctccttcatacctgtcaggccactgaatatgacttttcatttctaggctacttgccttttccttttttcttctttttgtctgccttcctcccttctctccctgttttcttccttcctcctctttctttcattatcatgaaaaaatttatctcacataatgagaagtctgggtgaaaacaatgctgccttttaatgggtttggtgcaaaagtaactgtggtttttgacattaaaagtaacggcaatggccgggcgcagyggctcacacctataatcccagcactttgggaagccaaggcggtggatcacctgaggtcaggagttcgagaccagcctggccaacatgrcaaaaccccgtctctactaaaaaatacaaaaattagccgggtgtgatggtgggcgcctgtaatcccagctactcaggaggctgaggcaggagaatcatttgaacccagaaggcagaggttgcagtgagcagagatcatgctgttgcactcggcctgggcaacaagagccaaactctgtctcagaaacaaaaaacaaatggatggcaataacttaatatgaaatgtatactttttttgaaaatcttttggggaaaggaaaacaccttgtgattttgattaccctgaggatgtcctaggtatggcttggggatttatgtaactttaaggaccaccctagagtaagcatgttaattatggtggcttttgtccactaacttcagaagtagccattaaataaagctgcaacctaagtcctcagtttcctaatcctccctagggatttattaagtttacttgttatgggatgtttttatatgaccaatctttatatttcaaccatcttgcctcagttacctcttcttgagtcttttcccacatccaacttgtccttggtttacatcaacccttccaaactcataccctactggctggtctattttttttcccagtcttacttattaccattccagttcaggccttacactgcagcctcacatacctcacatacaccataatatatgatgtaggcagtaaaaattstttaaaccctggcttcatggagtttggaatctttggggaagcaagatacatagacataaaactattatgaatcaatatagtctatggttgctttgaaaatgagaatgatatagagtgtaaagtctctcatcayatgctatgaataatgaaagattttaaaccaaaaaaatagaaagtataaagatggtggccgggcgtggtggctcacacctgtaatcccagcactttgggaggccaaggcaggtgcatcacctgaggtcaggagtttgagactagcctgaccaacatgaagaaactctgtctttactaaagatacaaaacattagctgggcatattggggtatacctgtaatcccagctactcgggaggctaaggtaagagaattgcttgaacccaggaggtggaagttgcggtgagccaaaattgtgccattgcactgcagcctgggcaacaagagtgaaaatgacycaaaaaaaaaaaaaaaaagatggtaaggagattttacaaacyatagatttttacatttaaagaatcctcaaattaaaagacaaatagagaacaaaaatttaaacaagatgacaaatggttaatatccttaagatagagagctgaatattaaaaagtctttatgttattmggaaaagttctacagccatagtaacaagtaagtagcagaactggcttaacccactgaaatcaatggcagcttgctttggtgaaaatgtcttcaaaaaccaactaatcagagacagctcaatgtctgaaacgcagctagtcagcaacagtcttgccaggacaagctactctagtctctgtaactaacacaaggcatagttctatgatccactattgcctctataatcaatacaactgtaagggtttaaggaagaagaaagaaacacaaaaaggggctcaataatcacagacaagtgtattttggagaataaacctgagaggggattctggctggtttaggtcggggccttctctcttatagactaagaatatttaagggtttagggagggagagcttatcgcagatttggaatrtttctgggtggaggagagttttattgtggggttggcatgtttctggtcggagggggatttatcttggggttggaayrtttccggttggaggtgtcatttaatggtcatgctgacattrgccattagggtgatgtttctggggctggattaggcrttttttaatcaagggsaacttaaaatggcagtgtttgtccaagatggtgatgctcttgctctgtcaatccagatcctatagttataraaggacaaggggcggtgtgttctttctggctacttcctgctaaggggaggagtgcggagagttctttgatctcagattgactgtaggactaatgctgtctgtagatgtttttgggtagttgtctgtgaaatggccatgatcctgtcagttaaaaatctttgaaaaaggttaattaggcagggtaaaaacattagtcctaggcacatcattaggagagggcccaggaatgggatgacccatgttgtgattttgttccaaaaccaacaatctatttggttgttttggtattcccttagtcttttagccctttctgtaagtttttcagcagcatctcttactaggcttgattggttgaggtakaggcaacattcctcatccaacgagaggcagaggccatttaagatctcctttttcagccattataagatctagtccccctctattttggaggattactccagccaagcagtctagttggtcttggactcttataagactttgggctgtatcttctaaagaacgctgtagttctgttgaaagagctttaaagtatgttaaggaggtggccaatctgcctgctcccaatctaagtccggcggttatacccaaggtggccatcaagggaatgacatggaaagccctcctcttcctaacatattgggcagatggaatgggcaaaggttgactaggaggaattagtccaatgcagggagaaagataaactagagtacatgttctggtacagttggtggggagacaaagatatgtactggttccatataaaaataataagacttggctgggtgcggtggckcacacctgtaatcccagtacgttgggaggctgaggcaggcagatcatgaagtcaagagatcaagaccgtcctggccaacacggtgaaaccccgtctctactaaaaatacaaaaaaaaaaaaaaaaatagccgggcttggtggcacacgcttgtagtcccagctattcgggaggctgaggcaggagaatcacttgaacccaggaggtggaggttgcagtgagccaaaattgtgccactgcactccagcctgggcaacagagtgagactttgtctcaaaaaaaaaaataaaataaaataaaaaataagccttgttgtaaatataggcagagatatggaaagaaagcaagtgaattaaggctgaagtgtyttttctttcctgtggttcattactccagatggacaaggaggaggccagagagacatccactatagtagagatataggaagagttattctttatacatttaatacaatcagatgttgcaccattgatattgagccatgaatamagygggcactagggacagcacaaattaggtcagaggcatcggttgagggagaggctgtaaaacgagccagttgtggaaatgccccatttgcatcaggtgatatgtgatagtcaactcggttagtgtgatggtcagaggggtgtttaacaatgatagtgcattggttaggtgttaaggaccctacagggaaatttccctcacaggctgaaaagcaaagtgaggcttgttgtaaaagggcggtgtgtttagttatgggcccttcaatgggagggccttggggcttgaggcattgtagggagttgtaataggtttgaaatgatttgttggcttgattggccctggaaggggcataatcacctaccagggygtcagctctttcaaaaaaggaagctcctttttggagtttatagattatggttatgtttcctgttaaaaggtcatgaaagggtgtaggaagggctgtataggctgaggaagacagtgataagcacatccaggattctggagcaaaggaagagttagcttgcagcatgagggattgtgtaaggtttatagagcattccagtttgagagcagtgaggagtggttgtattggtaaggttgatgtgattacagaatttatattgaaagaaacaagcaaaaggagaaaaaggttatttgagtaggagtaaagtcctggaaaattscttgaagccgtaagtcccatagaatagtaaggagctgatcaggatggataatgggagtttcataatggtaycaataaaggtctgtaacaagattggttgggaagcaatgaaagtttgagagagaaagagacatagcagcttatgtaaatttctcttccttttcctccaggatttggtgaggcgaagggaagtgggtcctgtggagacacaagagaaggctgaagggggttttgatttggttgttttggtatgtagtgaagtctgttgtcttgagagatgtataatgaaaccagctggggagtccctggggttttgctcctgtggtgttgcaggaatcaagggacagaagagaccaatgggtgggacaggaggatttattaggtgtgtaccagcccagaggattaacatccaaaggctgagccccgaacaaagacagggcttgacttttatacatgcatccaaaagggggttggctatacrtgcatccaaaaaggggctcaccagtttgatggtgcaaaacctgtagggcgggcaagcaggcttacagaagcagaacaaaggcagtttgtgaaacagtgacagattgtgcaacttaaacatatcttgtgaccttatacagaaggaaaaacaggaacttacaaaactttgcaaaataattatgagaatggtaaggggggaaggggaagctgaaagaggagaaaaacttgtttttctcacccctgctccaagatgggagggagaggctctggggctcatcccttgagggccctggctctgcagacagggctatcaaagccctgccagagccctgcctatcgctgagcctcaaagtgagttagcctagtacaagaaactttttttttcctgcttaagtgggtgtagtaaagatgatctggtaagacccattccatttaagtgtgaggggaggattgaggagaggactgggatcttttaccagaacccagtctcctggctgtaggaagtgattagagaagtcggygatggktcgtgtcaggtattcgtcagcatattcccaaatgaaatggcagatggtatgtagaagtggggaaatgaggccaggcacggtggctcacacctgtaatcccagcactttgggaggctgaggcgggtggatcacgaggtcaggagttcgagaccagcctggtcaatgtggtgaaaccccgtctctactaaaaatacaaaaattagccgagcgtgatggcatgcacctgtaattccatctacttgggaggctgaggcaggagaattgcttgaacctgggaggcagaggtcacagtgagccaagatcttgccgctgcactccagcctgggtctcaaaaaaaaacagtaacaaaaaaggttttaaaattagctggttgcagtggtgtttgcctgtagtcctagctactcaggaggctgacgtgggaggatcatttgagcccaggagttcaaggctgccgtaagctatgatcatgccgctgcactccagcctgggtaacagtgagacccctgtttctgaaaaagaaacagaaaaacaaaccccaaacagccagtctctgtaactgtgagaaataaatttctgttatttaagtactcagcctatgatatatttgttacagcagcctaaactgactgagacaactactaaggcatttagtttatttacctttaatgaaattagtctcaaaaaatctattgccctagtttatactatctttcacttcctattctttttcttttgagagagagtctcgctctgtcacctaggctggagggcaatggtgtgatctcggctcactgcaacctcygccttccgggctcaagtgatccttttgcctcagtctcctgagtagctgggattacaggcgtgtaccaccatccccagctaatttttatatttttagtagagacgggattttgccatgttggccaggctggtctcaaacgcctatcctcaagtgatctgccagccttggcttcccaaagtgcttggattacaggcatgagccaccatgcctggccttcctattttttttttttgactcttttttggtattaattatattcttccttgctagtttggaagttaaatactctattcaggtttgagatgctttttttgccttttgttttttgggttgattttttttggttgttaccctataagctgcattgtgattacttaaattacaaagttaatctatttctttatctcctccagaacacagacctgtcatatgttttaatattatcttttttctttcaaatttaamtattactaaacattatcattgttttatagttaatattttatacttacccaaagtcttttttacatgttgtttcttcttgtagcttcatttaggatcaatttccttctagctaaaatatatactttagatttttcctatagggagagtttgctggcgaaagagtgagttttatttgtctgaaacaattttattttgtcttcattaaaacaaattttagggccgggagaggtggctcacgcctgtaatcccagcactttgggaggccaagtcgggcagatcacaaggtcgggaattcgagaccagcatggtgaacatggtgaaaccccgtctctataaaaaatacaaaaattacctgggcatcatggcacatgcctgtaatcccagctactcgggaggctgaggcaagagaatyacttgaacctgggaggcagaggtggcagtgagctgagattgagctcaaaaaaaaaaaaatttaattgggtttagaattccaaattttcagttgcttttcctcagcaatttgaagataacatttcactatcttccagcttacattgtctttaagccagctgtcactaactcagcttcttttgagatgatctccttgctggcgcagtagctcacacctataatcccagcactttgggaggccaaggtgggtggatcacctgaggtcaggagttcgagaccagcctggccaacatggtgaaaccccgtctctactaaaaatacaaaaaaaaaagtagctggacatggtggtgggtgcctgtaatcccagctacttgggaggctgaggcagggagaatcgctggaacccggtaggcggaggttgcagtgagccgagatcgagccattgyattccagcctgggtgaaagaacaagactctgtctcaaaaagaaaaaagaagataatctcctttctctcctgctgttttataatcattctttgtcattgttgttctgaaatttcaccattttatgtctgtgtgtgggtttcttttctatgtacatagacatacctatgtacatagactgaaacttatgcacataggtttattaagatatattcataggttataaacatatatacataggttgtaaacatataaacatagcctaaaaaaaatataaagcaaaaacatcacaagaagaaacaagctgggtatggtggctcatgcctgtaatcccaacaatttgggaggccgaggtgggcagatcacctgagatcrggagtttgagaccagcctgaccaacatggagaaaccccatctctactaaaaatacaaaattagccgggcatggtgacggatgcctgtaatcccagctactcaagaggttaaggcaggagaatcacttgaacctgggaggtggaggttgtggtgagccgagattgcgtcactgcactccagcctggcaacagagtgagactctatctccaaaaaaaaaaaaaagaagaaacagacaaatttatattcaatcatattggagratttgaaaattaataattgacagaaaatgttcatcgagtagatttgataaacatgattacatatttactatggtagaagcatagaacgctatactaacaactgcaaaaatcacattctttttaagcacgcaaaatttttattaattgaagacagattgtctgtaaatcaaatctcaagaaaattgacagaattaaaatgaggacattctctgaccataggcacatgtcagagatattataggttcagttccagatcattgcaataaaacaaacatcacagtaaagtaagtcacacaattttttttggtttcctagtacataaagttatttttaaactataatgtagtctatttagtatgcaatggcattatgtctaaaaatataccttattttaaaaatagtttatcagtaaaaaatgctgacacaacgacacaaaagtgagcacatgctgttggaaaaatggcactgatatacttgctcaacacaaggttgccgcaaaccttcgatttgtaacaaaaatacaatctagaaagcatgataaaatgaagtgcaataaaataaggtatgcctatgtataatgctattaagctacaaataaacaataaaaaaagctaaaaaatttcctttatgtgctaggaaataagaaagacacaaattaaacattttgaatgtaataaacagtattacagatgacggccgggcacggtggctcacgcctgtaatcccagcactttgcgaggccgaggcgggcggatcacgaggtcaggagatcgagaccatactggctaacaaggagaaacyccgtctctactaaaartacaaaaaattagcyrggcgtgggggcgggcgcctgtagtcccagctactcgggaggctgaggcaggagaatggcgtgaacccgggaggcggagcttgcagtgagccgagatggcaccactgcactccagcctgggcgacagagcgagactctgtctcaaaaaaaaaaaaaaagtattacagatgacaactgtgggatgcagctacgtagtgtgtagaaagaaatgtataaacttggccgggcgcagtggctcaygcccgtaatcccaacattctgggaggctgaggagggcggatcacctgaggtcaggagtttcagaccagcctaggcaacatggcgaaaccctgtctctactaaaaaatgcaaaaaatggctcggtgtggtggcaggtgcctgtaatcccagctgctcgggaggctgaggcaggagaatcacttgaacccaggaggcggaggttgcagtgagccgagatagccccactgcactccagcctgggcgacagagcgagactcggtctcaaacaaaaacaaaaacaaacaaacaaaaaataaatgtataaacttaaaagacttatattagtaagtaatcatttataataagtcagaaaaacagaaaataaatccaaagtaaaaggaacaaagcagttattttaaaagactacacaaaatttggcaagaatgatcaacaacaagagagaaatgtgaacatacattttaccaaataagttatgtgaatggcaaaaaaccaacatgaaatgatgctccacatcacttggtcattggggaaatgtgaattaaaaccatgaggaaatatacttcacacccccccaaataccacctgtaccgcaataacttatggaaatataataataagaaaataaaaactatacttcacacccactaaaatgactcaaattaaaaagactaacaatatcaggcgtggaagagaatttggagcatcaggaacattgccggtaagaatgaaaatggtatgttccttagtccattttctgatgctatcatagaataccctagactgggtaaattataataaaacaaaatttctttctttctttttttttttttgagacagagtctcgctctgtcgcccaggctggagtgcagtggcgccatctcggctcactgcaagctcctcctcccaggttcacgccattctcctgcctcagcttcccgagtagctgggactacaggcacctgctaccacacccagctaattttttgtatttttartagagacggcggtttcactgtgttagccaggatggtctcaatctcctgacctcgtgatccgcccacctcggcctcccaaagtgttgggattacaggcgtgagccacagagactggcttttttttttttttttttaagaaggggtctcactctgtcacccaggctggagtacagccgcgcaatctcggttcactgtaacctccacctcccggattaaagggattctcctgcttcagcctcccaagtagctgggattacaggcaccaccacgcccggctaaattttgtatttttagtagagacagggtttcaccatttggccaggctggtcttgaactcctgacctcaagtgatccacccgccttggtctcccaaagtgctgggattaccggtgtgagccacctcacccagacgaaatgtatttggtaaagttctggaaactggcaagtgcttggattcaaggacaaggagtcacaactgcagggggccttcttgctgtgtcataacatgtgaaggcatcacaggataagaagagtgcaaggctggcttttatcacaaacccgctcttgagataacttattcccttccactataaccccactaatctgttaattcatgaaaagattaatccattcatgagggcttaaggtctgtctcttaaaattctcacctccccttttttttttagagtcaagattttgctctgttgcccaggctggagtgcagtggcatgatcatggctcactgcagccttgacctcctgagctcaaggtatcctcccacctcagcctcctgagtagctaggaccacaggtgtgtgccaccatgtctgtctaatttttaaatgttttgtacagatggggtcttactacattgaccaggctggtcttgaactcctgtcctcaagcaatcctcttgcgctggcctcctaaagttctgggattacagacgtgagccaccatgcctagcctggtcccacctcttaatagagtcgccatggtaattaaattccaacatcagttttggagggacacaaaccacagtggtatgaatactttgaaaagagtttggtrgtttctgattatgtgaaagacagagttaccacatgacccagcaatccaactgttacgtacttccccaaaagaaatgaaaacatgtccacacaaagacttgtgtgcaactgttcattggagtttttttcatagtatgtatctcccaactggaaacaaccaactggtgaatggatacactgttttacatccatacaatgcaaagctacttaccaaaaagagctactttagatttttctgtttgtgagccaaaacaaaatagaaacacacaaacaaaaaacctaccaatacacatcacaacatgtatgaatctcgaaagcattatgctgaagacagctgggtgtggtgactcacacctgtaatcccagcaccttgggaggccgagtggggtggatcacttgaggtcaggagtttgtgaccagcctggccaacatggtgaaagtctgtctttaccgaaaatacaaaaattagccaggtgtggtggtgggcgcctgtaatcccagctactctggaggcagaggcacgagaatcgcttgaacctgggaggtagaggttgcagcgagcccagatcacactggtgcactccagcctagcaggattgtctcaaaaaaaaaaaaaaaaaaaaagcattatgctaaatacaaggagccagacaccgaagattctacgatatcattccacatttataaaattttagaaaaggcaaatattgtatatagtgatagaaagcagactgatggttagattaatgtgaaatattttgccacataatgcaatggaaataacataaataaaaataaacaaaaaagtcagtgtctatcatcaagatagcttctaaggaagcttctactgatatttacaatttattgtctatatcaaaggctattttatttgtggctttttggagaggccagtggagattacagctctgccagattacttttttgtgaagcaatttgcaatcacattcttgttatatggagaaaaatccttgttcttgaagggaattcttaaagggaagkgatggttgctgtcttgctcttcttcatttttcctgcagatatctaatgtatattcacttgaagtaagtcttatttggggagtgtagcaatatgtcaaggcacttaacattgtgtcaagggtcacagtgccaagcaccatgtcaaggcagagggaagatgattgatgatgtatcctgaagaatactgcagtcaaagcttggagaatgagttgagtgctgtggaaaccctgatgacagggactacaatgaggaagaagacccagagcagcgaaagctttggcaatctggccagggagactattggataactaggtatcctggatttatgcaaaggctctacaatgagattactcagtttataatttggattaacctgtcgtttctgtgggctcacccaggaattttccttacagtatgatgtagggaaatgcctttgaccactcccctatctctttatcaataccagggtcacacctctacctagcctccttccttccttccttcctttcttttcttctttctttctctttcttttctttcttctttcttttctttcttctttcttttcttcctttctttttctttccttcttgcttccttccttcctttgttctttccttacttcttacttcttttttttttttttttttttgagacggagtcttgctgtcacccaggctggaatgcartggtaccatccaggctcactgcaacctctgactcccgggttcaagtgtttttcctgcctcagcctcccgagtagttgggactacaggggtgcactaccatgcccggctaatttttgtatttttagtagagacggggtttcaccatgttacccaggctggtctcaaactcctgacctcacgtgatcaacccgccttggcctttcaaagtgctgggattacaagggtgagacaccacgcctggcccctttcttcttttttttccttcctgcctcctttcctccttccttccttctttccagaaattagtgtcagttcatcctgtttcttttttattgactagatcggggtcagaaaactgacctgcagcctgtttttgtatgacccatgggctaagaatggctttatctttttaaatggtggataacaaatccccaacatgcctgtcttttgagttatgcctctcccagtccggatcagttgctttctacatttgctgtttttgatcctgtgattttccttcgccatcactttgcgtctctcctgtttcttctattcccttccctttccctcccctcccctcccccactccccttcctctccctccttccctccctcccttctttctttctttccaggggaattggcaggggagcaggaagtcaaatcatatgtcaccatgtgactcttgggactccttcttctcatgtttcttcttctttgtagtaggggcagggccagcagcaggagctacagagccggggcagcagaggcggccacagccttgtgggagagcacaatggcaacttgccaataccctgggcaatgacacctttaatgttttttccattcagctcactgatgatcttgctgcactggttgccattggccttattgcttatattgtacaggatcttcttgacrtccttggtgctgggcaaggggttgcccccgagggcagccagtaggtaggaaggacgaccttctgtgtcccggaggaaaagaaagccacaccttcctcttttagtttgtttcttttcttattcctgtgttgctgctgagaaacccaatccaattccgactcccccaccacccttttgtgccacccttctaccccttctggaagcctkagaatctcctgtttgtcctagatattttacatttcacaatcatatgctttagtgcaggacaattttcatctattatgatggacactttcaatttggttcttctattctgagtgtgtttcttcaactatttcttttttttttttttttggagatggagtctcrccctgttgcccaggctggagtgcagcggcccagtctcagctcactgcaacctccgcctcctgggttcaagcgattcttctgcctcagcctcccaagtagctgcgactacaggtgcatgccaccacacccagctaattttttgtattttagtagagacatggtttcactgtgttgcccaggctggtcttgaactcctgagctcaggcaatccgcccgcctcagcctcccaaagtgctaggatttcaggygtgagccaccacgcccagcctgaactatttcattgttgatttcttcccctctgttttactcttcctggaaattctattatttggctgctgaacttcatagakttcataaattttcttaccttttttctctcatttcctatctccttgtctttttgccacgctttctgtgtaatttcctcaattttatctttcaattcttcattaaaatgttcatttcttatcatgtctttaacgtctaaaatttcttcttgttctctgaatgttcctctttttacaaaataacatcttgttcttgttttcagaatgcagtatcttttcttatcttatctttctcaagactgagaaatggaaaactacagaaaccacaacttgaaaaacagtacagagaccacaatttgcaagacagataaactatgtcagcaacagctcagcttggacccaggtgttcaggaaacaaaaccacagactttttcacagacagccttgcctagcctatcracacagtcagtgactcaactttgcaacttttgaccaattctttcctgccctaactctacccttccttcctgcccctcccccaactcttgttatccccgccctaaaagcatcctttggctaacgcctcctcagtgaaactgtataaaactcaaatgttaaagctactcggcgtccatttgactgactccatttgctcactatctcccttgcctggcacatttctaataaactaagcttccttagttattgttatttgttatttgtttgttctatgttttaaccataacagatttctttgctgctcttttatgagaaactttctttttttttgagacagagtctcactccgacggggtttcaccatgttggccaggctgatctcaaactcctgacctcaagtgatccgcccgcctcagcctcctaaagtgctaggattacaggtgtaagccacygggcctggtcttttatttatttatttttttgagatggagtctcgctctgtcacccaggctggaatgcagtggcgctctcggctcactgtaacctgcaccccctgagttcaagtgattctcctgcctcagcctcctgagtagctgggactacaggcgaccgccaccatgcccagctaatttttgtattttyagtagagatggggttttaccatgttagccaggatggtctcgatctcttgaccttgtgatacacctccctcggcctcccaaagtgagtgagggagccaccgcgcccaaccggcacctggtcttttatgagaagctttgactgaacatgagttagttttctttcatccacatagtattctgtttctccaaggtgctttccctgcttgtgtgctttttgtcttgcatgatagaggcttactttagagttctggtaatttttggtttcttacgatgaggaatgaaggactacagctgattggaagtttgcagtatatggagagctcttgtatttctgagtttactgtagggccatttatttgttgggtaatcttatcagtttctcttctttcctcttgggctgctttgattcctgagagaaaggtgtgacaatccccttcctagagggtaaagatctggctgacatggtttgggcactaaatgattgatgaaggctgtgaggcaggaggcaggggcttagcaatcagcaagcatgtgattgtgtaaacctccatttttgtttggtatcaaagctctcagctgtacttgatgtttcccagtccacagactccaacttctgctgaaactagggagaaacagtcatccagcagcatgagagcaggtagaagatctgggtctgtttgtgattctacaatataatcatttctgttttcaatttttctctactgttgccacataattcagctttctcagttcttctgagttagtctgcaatcatctctttgctttttagctttcaaaggtttatcatcggccaggtgcagtgtggytcatgcctgtaatcccagcattcgggaggctgaggcaggcagatcacytgaggtcaggagttcgagaccatcctggccaacatggtgaaaccccgtctctactaaaaatacaataattagccatgtgtggtggcatgcgcctgtagtcccagttactgcagaggctgaggcaggagaatggctagaacccaggaggtggaggttgcagtgagccaagcttgtgccactgcaatccagcctggtgacagagtgakactctatctcaaaaaaaaaaaaaaaraaaaaaaaaaagaaaaaagaaatgtgaagacaggagatttgagaggggccaggggcagaattatagggtttggctgtggctgcacccaaatctcatcttgaattttagttcycatagtccccacatgttgtgtaagggacccggtgggatgtaattgaatcatggtggcagtttctcccatgctattgttgtgatagtaagttctcacgagatttgatagttttataaggagcttgctgcttcacttgaccctcattctccttcctgctgccctgtgaagaagaacatgtttgcttccctttccaccatgatcatcartttcctaaggcctcctcagccatgctgaactgtgagtcagttaaacttctttcctttctaaattacccagtcttggatgtgttcttatagtagtatgagaaaggactaatacaagctatttcaataagccataaaaagcagtaaaaaggccagacagggccaggcacggtggctcatgcctgtaatctcagtgctttgggaggctggaggcaggtggaycacctgaggtcaggagttcaagaccagcctgggcaamatggtgaaatgccatctctactaaaaatacaaaaaattaaccagatgtggtggcaggcatctgtagtcccagctacctgggaggctgaggcaggagaattgcttgaacccaggaggcagaggttgcagtgagctgagatcgcgccactacactccagcctaggtaacagagcaagattctgtctcaaaacaaaacaaaacaaaaaatgggtcaggcacaawggctcatgcctgtaatcccaacactttgtgaggctgaggtgggaggatcacttgagtcccagtatttaagaccagcctgggcaacatartgagacgcatctctatttatataatcaaaaaagaaaaaagaaaaaaaaggcaatattcctttaacagtgtgagtgtctcaatgaaatggaatggaaatcaggtatttccattcccctagagttgttttttttttttttttctccctctgttgcccaggctggagtgcagcggctcgatctctgctcactgcaacttctgcctcccgggttcaagcgattctcytgcctcagcctcctgagtagctgggattacaagtgcgtgccaccacgcctggctaattttttgtatttttagtagagatggrgtttcaccatcttatccaggatggtctctatctcctgacctcgtgatccgtccacctcggcctcccaaagtgctgggattacaggcatgagccactgcgcgtggccgagcatctcttattttctccacccacaggtaaagaatactttcaccaatattctgaattgtattttctcaagcccatttgataaatctgcacattcttgtcctttaagccaagagtcttacctactaataagtaggtggagctgtacctgtatattaattcagtagcatcacctatgagcaaagtgtccatttggggtaatcaatatcatcactaattctaayacaaaatgttttggcatagtcatcaatgacacgtaattcctcaaaataagtggctgtcattgcttcagtctcttcattctgcctctggtagctccttgcrctcccttcagccatgtggcccctagagcagccctggggctggtgctgaggtccagaagcgcagggtggaatttttagtttccaaatattttttatctgtggttggttgaatccccagatgtggaacccacaaatacagagggccaactgcrkgtgtrtgtgtgtgtgtgtgtgtgtgtgtgtgtgtgtgtgtacatgttgaatgttggtgtttataccttatgttcattttttagaactgtcttttttttgagacagggtcttgctgtgttgcccaggctggagtgcagtggtactatcatactcactgcaatctcaaattcatgggctcaagtgctcctcctgcctgcctcaacctcccaagtagctgagaatacaagtgcttgccaccacacccagctaattttaawtttttttgtagcaattgggtctcactatattgcccaggctggtcttgaactcctggcctcaagtgatcctcccacctcaggctcccaaagtgctgagattgcaakcatgagccaccacacccagcctgatgtttggtgttttcattgtattagtccattcttgcactactataaagaaatacctgaaactgggtaatttttctttttttttttttttgaaacggagttttgctcttgttgaccaggctggagtgcagtggcacgatcttggctcaccacaacctctgcctccagagttcaaacaattctcctgcctcagcatcccaagtagctgggattacaggcatgcgccactatgcctggctaattttgtatttttagtagagacggggtttttccatgttggtcaggctggycttgaactcctgacctcaggtgatccacccacctcagcttcccaaagttctgggattacaggtgtgtgccacyggaaactgggtaatttttaaataaaagaggcttaattggctcacggttccacaggctgtacaggaagcatgctggggaggcctcaggaaactttcaatcatggtgaaagacaaaagagaagmaggcacrtcttacagggccagagcacgaggaatagagagagtggggaggtgctacacacttttaaacaaccagatctcctgataatccactcactatcacgagaacagcaccaaaggggaaatttgcgtacaagatccaatcatttcccaccagaccccgcctccaacattggggattacaatttgtcatgagatttgggcagggacacagacccaaccatatcattcattatcactcaatttaagtatgtcttaaaatttaaaaaaaawwtttttttgtcttataactgatgaagtggcaaatatttcttaatttttctcatgacatctgcttggtcccaggagttacttaatggtgcacttttaagtttccaagtaaattttaagtaatcyttttttttttttttttttttgagacagagttttgctcttgttgcccaggctggagtgtagtggcatgatctcggctcactgcaacctccgccttctgatttcaagagattctcctgcctcagcctcccgagtagctgggattacagatgcccaccaccacgcttggttaatttttgtatttttagtagagacggggtttcaccatgttggtcaggctggtctcgaactcctgaccttgtgatccacccacctcggcctcacaaagtgctgggattacaggcgtgagccaccacacccagccaattttragtaatctttaactttaaawttttaattgccagaaggtcagagactgtggccagtagaatattctgattagtagatattttttccctccattttaactctaatgccctttccttgagctaaagcttttcttcttaactctgtcttcctctagaataagggaagacattttcgggaggttcttattttcctctgacccctggccactagtccaactagtgcaacacatacctgaatcttagagtaagtggagcacaggattaaactgcaactcgtgccacacatgtcatttttagccctctccacagtgcattgcacgtaggactagtagatagcatttcttgaaggctcaccatgtgctgggcattgtactgagaatattgtatacagtatctcatttaatcatcacaacacctttattttctgccattttgtgcacgaggaaatggagggaatgagaaattgagtaactttccccaaggcacacagcttaaggtgataacaccaagagaagtgccyastgtttgtctgaccacagagcccacgctatgtgagcactcacatgagatgtgctgaacaaatcttattttgtcatttgctgaaataagatttgttcagcaaatgaacacattcagtgaatctgttcagtagttcacggccaaaatggaattcgttgccactgggttatgcatccacataatcctctgttatcactttatatagtacactcaacacttggkgaaaatcctcaggaatttggaattatcttccttttggactrttttcaaactatctctgaaacaagaatgtgaagaaatacaaggctggtaaattattaaagctgytacctgtctcttaatgtcagtggttttcatgttacatgtctttctgacaaaccaatagacacctaaccacatccttgttcttaatgcttcctgttaatgctgttaaagctcaggaaattgtgaactttctaaattacttaagataatttgcaatcatcctcaaaaatcactttttgttgcttcatcttgttgcataactttgctttatcctcacgatagatcccattttccacaattaattacttatatattttaaatttgtgttgtatatgttcatacaaayaaamataaaataaaacarattgaatacatatggagtacactttattatttatttattttacttatttatttatttttttcragagggagtcttgctctgtcacccaggctggagttcagtgtcacaatctctgctcactgcaaactccgcctcccggtttcaagtaattttcccacctcakcctcctgagtagctgggattacaggtgtgcaccaccatgcccggctaatttttgtatttttactagagaccaggttttgctgtgttggccgggttggtcttgaactcctgacctcaggtgatccacctgccttggccttccaaagtgctaggattacaggtgtgaaccaccaacgcctggccttattatttttagagttttgtgtggtttttcttttttaaagttttcttcttgaattcaatgacaacaagcaatgtttgaaattatcttttgattttaaatagctactgtttctactttaaaatgaaagaaacacgatatgtacaagttaaaacaayagagctgtttatgatcatttacttttttattgtgacaaagtatatattacataaaatttawcattttaactttttttttttttttttgagacagagtcttgctttgttgcccacgctggagtgcagtggcacgatctcagctctctgcaagccctgcctccccggttctcaccattctcctgcctcagcctcccgagtagctgggactacaggcgcccgccaccacgcccrgctaatttttttttttttgagacagagtctccctctgtcgcccaggctggagtgcagtggcgcgatctcagtcactgcaagctccgcctcctgggttcacrccattatcctgcctcagcctcctgagtagctgggactacaggcgcccaccaccatgcccggctacttttgtttttgtatttttagtagagacggggtttcaccgtgttagccaggatggtctcgaactcttgacctcgtgatccacccgtcttggcctcccaaagtgctgggattacaggcrtgagccaccgcgcccagccaattttttgtatttttaatagagacggggtttcactgtgttagccaggawggtctcgatctcctgacctcgtgatccgcccgcctcagcctcccaaagtgctgggattacaggcgtgagccaccgtgcccggccttttttaaccgtttttaagtgtaacattcggtggcattaygtacactcaccgttgcacaactgtcgccactgaatttcccccagattgcagagttactttgggaacactattttggtgatctgaggattttcagaggctttcacttgaatgttcttaatataatagccctycctcgcttcatcaatcaaagaacagttgctaaatataccttttcccaccrttcattctgagactagagaagtaaccactgaatggctccatcacgccattggacacactgggaaactgactctggtcaaggttccatctatcacctgggttctgtaaacttctactctgagtggtggactatgctggatktgttgttgttgcrtttgtttcatttcatcttactttattttgtgtctccatggattagcatcagttcagagccaaaatcaattagccsccmcctccaccaaaaaaaatatttacctgtctccagtttatagtcacactgggaaatggccctacttatttctggggaatgttttactgaagatccacaaaacacacctgtggtcacattgcagtgtgctttcgggctccaagtctgaactagcttagtttgagaaactggctaagagtgtgtgaattcccactacagtgacttaaactaggtttctgcccactagacctagaatcattgcctggatatgtgaagaagtactttgggctgcccttgtatttaattcctacagtcttatgactgattacacgatgttacatatcccgaaagttcataccctgtgatcgtacacacttcatccctgtgggttactctggtaattgtactcaccttgtgttatgcaatttgtgttcccccaaaatccgtaagttgaaaccctaaccgccaatgggatggtattaggaagtggggtctttgggaaataattaggtatagatgagctcatgagggtggagctcctgctataggattagtgtccttagagaagagaaagagaagagctctcactctctttgccatgtgagaagacagccatctgtgaaccaggaggcaagcctttacygcaaaccagccatgctggcaccctaatctcaggacttccagtctccagaacttgagcrataaatgttcgttgtttaagtacccatctatggtattctgactgactaaacccaaactgactaagacaccttgtcactgcaagctaaggattgcaactggcctctaccactcctggatcctttattccagctgagatcaggaaattcaattccatggcaacatcctttgccaccatctcctgctggcaaagaacagctgcaacacagttttataagaatgctcaagtctccttactgttgcatctgtaatgcctgggtataggggacgtcctccaggctcttccagggatgactgtctttcagagtggcagggcaggctgttcrtaacagattcatgcatcattcttgtttccctgggcctttagactccttcctctacttgtatacartgttcataacagcattattcataatagtcaaaaagtggaaacaacccaacatgtgttcattggcaccatcctaaggcttagtgttcatctgccctttatttaagatgaagaggttttccttgcacatccatttattcrccctgttaccgaaatgccaggggttctgtctaggtactgctgcttgatcactgagacaatgggtattgccagggaagaaggctttagttgggtgctgcagctgaggagatgggagatgagttctagatcagtcccaaatccatctccctgactgattaaaattaagggtttgtataacagaaaagaaatgtaaccatttttgggaaaacaagaattagggaggggtaaaggggaggagttggtcaacaagaagcaggtggttgcttaggcaatcaygatgggtgaggggtctggctcctcattgtccagatgcagtgatctggtaagtttcagttccttgataatatctgggaggcctgatggttggcttcatgaggaaggaactcagattaagacaaatgtaactttctcaagttttaagactgggagggtcagttttctttcagtttctttcttttattcaaaagaaaccacaaataccagttctatcagacagttgggccattttcaactcaaggcatctgagttcctcctcatcaaggtagggtgactttaaatgtctacaaaggtgggatgtggattgtcctcagattctgtgtttgtttatagggktgtgtgaaaaatttcccctatcattcagccttcatgatggaagatctttttctcctttcttcttcctttaagtctctatttcctttcactttcccctgcaatcaagctgcttgttcttctatctccttcctattcccagctgtgattttatctagtctttgtgaattaagaaactggtttaagaaactggtttstaagcatgcattttaatcatttcaagtcacagtcaagttagcaattcttgaactttttttctgcaacattgtggcctggggaaggcgggaaaggagcttttgggggatcattaagagagcamagcacaaaggtatacagcaaatataagcaaatrtatacttcaggmcctaaccatgccacgttataacagaaacacttttctccaggactcttgttggcatcaccccttaggatccagatatgctggagaagatacaaatcattctgacttaaagaatcttcaaatcagtaaatattttttgaggatcattgccataccatgtaccatgcaaaatgccaggaatacarcagttaaacacaaacacacatggttcctgaatttgtggaccatgtttttatgaacctcatagtaccggctagaattgtgaaatcattgtaggcaccatctctactgcagagaagaaaacttttgcatatattggagaactgagcctctagtcatatttcaatattgtctccaagtcccttttaattcaaggccttcttcattacaatccacatcctggaatagaaacttagactagttgatagcgtacaagagttgacaaggcagaggagatgctcagagatagaaaaggaggcttgtcagagtttccaagctaactacattgtatatctcagatgagagaaaaagggtttctctcgttaattaagaaattcctttggagattaatgaggacagaatgcaggatgtacaagagaatattctcaaaccaaacagcttttaacctgggagaataaagagacccaaagggytagtctttgtctagagcagagaaaacacagaagaaaatttaaaaatattcctccattccaatatttgtataatcttgaggaaaaggcctttttaagcaaaagacaaaatctttaatccagaggatatagaagaagaaaaagatttatgtttggctacataaaaattaaaaacagcatagtaaaacatgtgactaaaatgttaaaaagcaaagagcattctggggaaaaatatttgcaacacttaagattggcacatatatttcttacaagtaataagtccaacaacttaataggaaaattggcattctactgacactcgtttgaatttgggaaaaaagtttttttaaaaagaaaattggcaaaagatataaacctactgttaaaataaaaataaatattaaatagcatgcattaaatactaaacaaaataaatatggcatataaacaaatgagaagatgttcaactgcattcataattaaggaaatgcaaattaaaatagcagaaaaccattttaacttagatggataaatctccatggtgctggggaatttgctggaaaatagacatacttggaactataaatctttgtagctgcattggtgggcaatttggcwttttttttttttatactttaagttctgggatayatgtgctgaacgtgcaggtttgttacataggtatacatgtgccatggtggtttgctgcacccaacaacccgtcatctaggttttaagccccgcatgcattaggtatttgtcctaatgctctccttccccttgccccccacccyctgacaggctccagggtgtgatgttcccctccctgtgttcttgtgttctcattgttcaactcccacttatgagtgagaatatgcggtgtttagttttccgttcctgtgttagttcgctgagaatgatggtttccagcttcatccatgtccctgcaaaggacattgaactcattcttttttatggctgcatagtatttcaaaatgtaaaacacaatattctttacaycagtcatttcctgtttgctttccaacccattccctacccttctgctctgctctgtyccacagaggctgagccctgcaaactacagttcctaagcccctttgctaactggcttttatttagaatcagccaatggaaagtgctggcaggagactgaagggtgaataattgaatgggagagccagcatatttctttcccctttctgcatctgggggtcttcccagcagcggctgcatctgtctcatatatgacccagctcccaccaggcaggacagcccttcccacccagcttctagcctctggtcacacyggctcctcaatttgtccctctagcccttggtggttttatsttgttgctgatctttttttttttttttttgagtgggggacactgtttcattcttgttgcccaggctggagtgtaatggmgccatcttggctcaccacaaccaccacctactgggttcaaacgattctcctgcctcagcctcctgagtagytgggattacaggcctgtgccaccacactcggctaattttgtattttggkttttttttttgttttttttttgtgagacggagtctcgctctgtcacccagactggagtgcagtggcgtgatctcggcttactgcaagctccgmctcccaggttcacaccattctcctgcctcagcctcccaartagctgggactacaggcgcccgccaccacgccyggctaatttttgtgtattgtttttagtagagatggggtttcactgtgttagccaggacggtctcgatctcctgatctcatgatccgcccacctcggcctcccaaaatgctgggattgcaggcgtgagccactgcgcccggcctaattttattttttgtacagatgaggtctcactttgctgcctaggctggcctcgaacttctagccacaagtgatcctcccgtttcagcttcccaaagtgtggggattataggtgtgagccacctcacctggtccaaccattttatttataataatttttccttcattcttagctgtgtgagcgtctgcaggcaaatacctcagcacaaggatactcagtgaagcattgcttttaagggaaaatgcacagaaacaatctaggtatttattgattggtgattcatacaatggaatactatacagcaaattaaaggaacgaggtagatttatatacgtggaaagataggcaagatattgttaagtgagaaaagcaagatgccaaacagcatgtacagtatgagttaaaaaaaaaaaaatacacataggccgggcgtggtggctcacgcctgtaatcccagcactttgggaggctgaggtgggcagatcttgaggtaaggaggtgaggagatttgagaccatccgggctaacatggtgaaaccctgtctctactaaaaatacaaaaaattagctgggcatggtggcatgagcctgtagtcccagctactcgggaggccgaggcaggagaatcgcttcaacccaggaggcagaggttgcagggagctgagattgcgccactgtactacggcctgggtgacagagcgagackccatctcaaattaaaaaacaacaacaaacaaaacaaaacagcacagccrggcgcagtggctcacatctctaatcccagcactttgggaggccaaggtgagcagatgacttgatgccagcatgtccagaattggttccttctggtgggttcttggtctcactgasttcaagaatgaagctgcagaccttcgtggtgagtgttacagctcttaaagatggtgtgtcaggagtttgttccttcagatatgtccagagtttctaccttccagtgagttcatggtcttgctgacttcaagaatgaagctgccraccttcatggygttacagctcttaaaggtggtgcagacccaaagagtcagcagcagcaagatttattgtaaagagcaaaagaaaaaagcttccacagcatggaaggtgacctgagtgggttgccactgctggctgggggggtggccagcttttattcccttatttggccccacccacatcctgctgattggtccattttacagagcactgattggtccattttaccgagtgctgattggtgcgtttacaatcctttagctagacacagagcgctgattggtacatttttacagagtgctgattggtgcatttacaatcckttagctagacacagagtactgattggtatgtttttacagagtgctgattggtgcatttacaatcctttagctagacacagagcgctgattggtgcgtttacaatcccctagctagacagaaaagttctccaagkccccacccaacccaggaagtccagctggcttcagctctcaccaggagttcaagaccagcctgggcaacakgkcaagacctggctctacaaaatttaaaaaattagcaaggcatrgtggtgcatgtttgtggtcttagctrcttaggaggctgagagaggaggatcgcttgagtctgggaggtcgaggttgcagtgtgctgtgttcatgccactgtactccagctggggcaacagagtgagaccctatctcaaaaaataaataaataaaaattttaaagacatacatgcatacatgtgtgctttaaaaaatagtgtctaaaaaacactctggagctagacagcctgggattacatctcagtttcactacttgataacttgttgggcaatttacttgagttctctgtttttgtatctatccctggttccttatctgtaaaatggtgttatgataataatcctcataaggtttttttgactattacatgagtataattcaggagttagcaaactaatagccataggccaaatctggctgttgcttgtttgcttttttttgagatggggtctcgctctgtcaccaggctggagtgcagtggcccaatgtcagctcactgtaacctccgcctcctgggttcaagtgattttcctgtctcagcctcccragtagctgggacttcaggcacgcaccaccatgcccagttaatttttgtatttttagtagagatgggatttcaccatgttggccaggatggtctcgatctcctgacctcgtgatctgcctgccttggcctcccaaagtgctaggattactggcgtgagccactgcgcctggcrctatagcttgtttttwtaaataaagttttattggaacatagctgcatccgttagtttacatactccctatagctgctttcttactacaacaaagtgttgattagttgcaacggagaccaagtgctctacaaagcctaaaatatttgctatgtaactttaacataaaaaatttgctttctgctgaattaatgcatataaagtgtttaggagagtacttgacacrtagtaaatgttcaatgtttatggtggttattgtataaacatggaaaatttctgcaaggattcctrcttgggagtctgggacaccattctttgacaccatttgactttttctttttgtcttatacctttttatgtttgrttctccataaattatttctttagttaaaaaaccaattagcaggccgggcacggtggtgcatgcctgtaatcccagaactttgggaggccgaggtgggtggatcacctaaggtcagrggttcaagaccagcctggccaacayggtgaaacccggcctctactaaaaatataaaaattagccaggcatggtggcactcgcttgtaatcccagctactcgggaggctgaggcaggagaattgcttgaacccaggaggcagaggttacagtgagccgagatcgtgccactgcactccagcctgggcgatagagtgagactcagtctcaaacaaaaacaaaaacaattaacttaaaaataattttaattgtcattaattatataatttatattatttatatttaatgtccttttacattaagataagcagaactggragggatctcgtagtttggcacactataaaccctaaactgggccaagagcagtggctcacacctgtaatcccagcattttgggaggccarggcagrtggatcacctgaggtcaggagtttgagaccagcctggcmaacatggtgaaaccctgtctctactaaaaatacaaaaaattagctgggcctggtggcacgtgcctgtaatcccagctacttggaacgttgaggcaggagaatcacttgaacccaggaggcagagcttgcagtgagccgagatcacgtcattgcactccagcctgggcaacaagagcaaaactctgtctaagacaaacaaacaaacaaacaaaacctaaactgtagattctaagatttatgtggttttgaaagatacaaagctattsgggamctttaggggtccatctgggatggtttgtcatatccagagctgcatttgagggctggttcatttgcaagttcccaggaaggcagagataacatgaattggtattttccacagcagcttgtcaagagctttatcttttctcccatctgtttggattggatacttaacagctctacagctgytctttggaggaatcttacaaattctgaggagagagcactttgcctggaaatcatgctaaagttatctttgtagctacttcagttatctattgctagataataaaccactccaaactgctcctgtttctgtaggtctggacactagacagggcttggcttgatggttcttttagttcatgtggtgacagccatggtcactcactaggatggcttcagtgagacgatgggctggggttctgacaagaaaatccacaatggagatggttgatggttttgttggaggtatctaacagttgagttgagaaggcatgaagagttggaccctcagatgaaatctgactgtaaytgggccaaattgtaaaaccagctgcatttgatttgaactgtttatgctttgcctgatcatcaacctgaagagtgtaaaccaaaaattatatcctaagcccccaaccaactgaacagasagctgtctaggccgaggggaccccagagcaagctgaaaaactaaattccaggccatgatgggaaggaagggttggacgtacctcattatactctctcccttttaaagtttaggtataacagaccagcattaatattaaaatagagatcataagactgacaaaaacagactctttggtaagaagataccaaattccaactggtataatatcacatgacagataacagaccttgaagaaaattaaaatattttacctcaaaatatatttctttggcatattttgaaatggtcctgagaagccatcttttgagaaagaaattttgcatctgtagaggatctttattaatgcagctaggcttttcccagatctagcagagattaactaagagtctgacacctgtgaaattccaaaagagacgtttaccatctattctctctgaagcctkctatctgaggcttcatctatataacaagaatcacagcccacccccccttatctcaacccaagcatttctttctaytgactttgkcttttttttttttttttttttttttgagatggagtgtcgctctgtcacccaggctggagtgcagtggtgcaatcttggttcactgcaagctctgcctcctgggttcacgccattctcctgcctcagcctcccgagtagctgggactacaggtgyccaccaccacgcctggctaattttttttttttgtatttttagtagagacgggtttcaccatgttagccaggatggtctcgatctcctgaccttgtgatccgcccgcctcggcctcccaaagtgctgggattataggcgtgagccaccacgcccrgcctgactttaagtcttcagcttaactcttttgaccaattccaaatcagaaaatctttgaatccacctatgacctgtattgctccttccttaagmtgtcccgcctttcctggccaaaccaatgtataccttagatgtattgatttgtctttgcctataacttctgtctccctacaatgtataaaaccaagctgtaattcaaccacctcaggcacactttctcaggacctcttttagactgttccctgggccatggtcactcatatgggctcagaataaagctctttaaatattttgcagagattggcttttttttttttttttttttacygacaagagacagctatgctgaactagattgatcatcaaagacgtactaaattgttaaccagccatcatccattatgaactatgctaaaaccttccagatgtgtaaactcacagtagtccttctaagcctctgcctaatctcaccaagacggaacatgattttcctatttgctggatctgtgtctcccaattgcaattcctgagacccagattaaaatgcattttcttttgtttgccactccacagtgttggttttacttcttattagttggctggctcaaaagtccaaaaaggcttcactcaatgcgtggagccccagtggtcctccacrtggcctttctctctccatgtagtctcttctcttccagttgtcttggctgagcttcttcaaagcatagcatctagcttcctgaaacaaaaatggaagcttccaggcccctgaaaatttaagcctagaacaggaacataaaacacaactataytgggaataaaacctttccatcactaaattaggttcaagtggtggtggggggaggaagtgggcctgcaaatttcytgacattagacagtttaactagagggaaaaaraacatgctttatattcatacatgtgacagcattagaaagcagtagcttgctgaacagctaggggtaagggtatattacaacaacaatttaataggcagaaggagcgggaaagctagagcttctgtgggaagtamaaatgggcttttagggaaaccaatggcaggtattacagtttatgataatgtttgtttatgcaatttctcacccaggtgctaacagtcaggctccttcctggctggaagctcccccagagaggggatttatggcagcttcattctccmaaggccctgcctatagtcagataagggaagctcagaagaggcttctttctgcatctataacttgaatgtcttaaaagaatcattgtaccatagggtgggttrtgattccctttaacttccacctcattctgtttattagtcaagggaagtcgcaaaaccagacggaattcaagggaaggaaaccgactccgcctctgatggctgcaacagtatgcacattcagggaggaaaggaattagcagtggtcatctttctggaccatctaccacagtggctaaagttaacacctagaaaggaaggtcstgttttcagcttctttgactgctgctccaggtgtcaaaccctgaagggtgagctgacgctaaagactgagtggttattttytccagaagaggagaaagattgaaaatgtggccggccrattctccctgatgatcacacagacagacctgcatgacagtcaaacagacaggcctgcatagcaccccagttacacagacgaatttccccagagctgccttaacattgagcaaatagttaaacctagggaaattggtgcccagacagcaaagctagaaatgaaacatatggtcagtaggagccttgygtgggcttctccctaacctggagcaaaccaaaataatagagacagtctttcattcctagtgccaggacccgtctcgggtcaacgaaatctgagacagtcaaggtaacagaggcagctgttcgaatagattcattggagagtctaaggcagccctccagaccaagctgtraagcagataagatagaaataatcactctggtaccacagyagacagrccttgtaggtactgggccgctcacagcttaatccgacttagaaagcatttttgcctctgaccttctagttgaaacaaaattagttaccagtagacttaggcraatgctacactgcacacaggcgcataaycccaacctatataaacactaagacaattgttracactttragttggcctggtggaattatctccagccttctgcctgtatctggttacagcaataaattcccttctttcctagtctgtctgcttctcgttattgggcctcaagaaaatgcagccggacccggcttggttcygggaacaaaaatgcatattttaggtaggatgtaattayagggattgacaatcaaacacatacaacatactgaaaccatggactatgtgtagcattagacagaaacaggaagcacccaggatagggaaatggctgcttcctggagtctctccactgccactcaccactgccacactggctgctcagatatgtggttaagaagccaaggctcacgtgcccaagagtgttctgcccaggaggggaaaaattctttttccttctactcatyttagatttacaggctgggccctgtaaattagattgacaaaagacagattaacaagataaaaacgtytttattttattttatttattttttatttttttatttgtattattattattttttgagacggagtttcgctcttgttgtccaggctggagtgcaatggtgccatctcagctcaccgcaacctccgcctctcaggttcaagtgattctcctgcctcagcctcccgagtagctgggactacaggcatgcgtcaccatgaccagctaattttgtatttttagtagagatggggtttctccatgttggtcaggctggtctcgaactcccaacctcaggtgatccgcccgcctcggcctcccaaagtgttggcattacaggcgtgagccaccgtgcccggccaagaaaaagtttatttttatttatttatttatttatttttgagacggagtcttgctctgtcacccaggctggagtgcagtgcagtggccccatctcagctcactgcaagctctgccttctgggttcacaccattctcctgcctcagcctcccaagtagctgggactacaggcgcysgccaccacgcccagctaatttttttcgtatttttagtagagacggggtttcaccttgttagccaggatggtctcgatctcctgacctcgtgatccgcacgccttggcctcccaaagtgctggattacaggcgtgagccaccgcgcctggccgaaaaagttttttaacatgtgctgcctgtatacacatgggagcattcagtgatgagtaactaaaaagggtggctagaactggggcttgtccagcawcttaacaaaatgatgaagggaaacagtgacgggttagtcaaagcacataaaatggagtcgggaggccatttcggtttggacctcaggcctgtctttttaaaaaaaaawttaaattaattatttatttatagagacaaggtcctactacgttgcccaggctggtttagaactcctgggctcaagcaatccccctacctctgcctcccaaagtgccaggattacaggcatgagtcacggcgcccagccaccccacgcatgtcttaagcagagaacttcctggctaaacaactgccaaaacatctgtgactgcttcctgctgagctgggaagtccccaggaacaggccaccttttaaacaattacagcctgtctcctgactccaagactgctttagatacgatcacactgatcataatagttgaaaaacaacttttttttcccttccctttcctccttgcctttcctcacctcttccttcctctctttcccaccacctcccttccctctccccacgttctcaccccctccctacctcatctccyattgtctttcagtattgatggagctgacatctgacggtgtgggaggcctatgtggatcccaagcccttggtcccttgaaaagtacagcctgaatcttcatcctgcccccccactgcagcccagcctgcaatgtcacttataaagcaaactcaactttggtgtctcctccttctcttgtagctgtcaccacaggtctgggtccaacagaccstcttggcatctggtgggcaggggaggagccacttgacttcaagaaggtgtgtgagccactgtccacctycagcatccagtctcagcctgtggaagtccttaagttctttttctttccaggccctgggctgaggtggttagtgaaggagaawytggagagacagcaactgctttgctctcgcctccccttcccttgccaggtcacactgtgctttcactcacccagtacctggtattctagtgcctgcctttccaacctcccagctgaccccaggcctgtttatctgcaggatgagaatgctcccatctgccctgcatctcctgtgcttcctggaagatttagaggagcttggaaatgttaggtgccgtggacttttaaagttccattttgcaaatgggaaacccacctccccaaagccccagacctagcgaaaaacaacttttctagtcgcccctttcctgattcatcctttttttcttttaaggcccgagtctcttttttgatttctggagcacttctcaaggtaacctggaagtgttttcagactgcagtcactcacatttggctcagataaattatttgacgtttaaaccatgcctcagttttttctagcttcataagaaagaacatttgtagagaaatgataatacaaaggaaaacgactttaagtttctagggtgataaattgtgggaaagtaaatatgtttaaatgggggaactaatagatggtaagagctagttaatgaagtttgaaatgtagattcctctggtgtcatctctgggctgataagaatctacagttgtctccagtgattaactttggtccttcctggtagaaagggaagggcagacacctttaaaaatttttgtcctggtgaaccaggcgtggtggctcacgcctgtaatcccagcactttgggaggccgaggcgggtggatcacgaggtcgggagatcgagaccatcctggttaacacagtgaaactccctctctactaaaaatacaaaaaacaaaattagctggacatggtggcgggcgcctgtagtctcagctacgtgggaggctgaggcaggagaatggcgtgaacctgggaggtggagcttgcagtgagccgagattgcgcccctgcattccagcctgggcgacagagcgagactctgtctcaaaaaaaaaaatttgtgtcctggctggcgtgatggctcatgcctgtaatcctagcactttgggaggcagaggtgggaggattgcttgagctcaggaggttgaggctgcagggagccatgtttacaccactgcactccagcctggtgacagtgcgagaccctgtgtcaaaaaacaaacaaacaaacaaaaattatgtcctgcttttaggcaaatatggagggcaggcagagaagttttcttgtatctgcatctgcttctgatacggacaggggacagggaaaatactggttagaagagggtggatccctggcaaagacctcaccttcaagcctgaagacctgcggccctaaatgaggacaggcattcctgttttcaagacaaagaggttgccttttgtccctccacacyctctatcctgcccccayrtaaaccgcaaaccccaagctccacagcagagcagcaggtgagtagaggaggakaccagcagatggacggtggaacagcacagcagggaaagagagaagaggagagacgtctggatgccaagaggagttcagctgggggcggtaggaaaggagtccagccgctgggcggcctgactccaggggaagatcaccttcccattccatccacccaccrtctggctctccatccatccctctgaaagccacctccaccactcaataaaacctcgcattcatcctttgagtccgtgtgtgacctgatttttccaggacgctgaacaagagctcgggatacagcaagctatcatgttggccctctgcccttgtgaaaaggcaaargktccattaagctggttaacattcaagctgtcttcgggcggccaagctgaaagctttgtaacgctggggctgcaggcatccactcctagacactacrgccgggccagaccccagagcgctcaccccagcctctgcacctgcctgtctgcatgctctctgtctcacaaggggattaagcagtgaggcaactgaacaggtgagctacacttctgttgcaygtcctgcaargggaatcagggaagtatcccatttcccttcctttcactgtctttatctcaaaataatcaatatgccaaagtggcatgtttggagtggcatgttttgctactcttcagttcacttgaagaattcatttgtgggacttaacctttaagttgcttttttgtttcctttttttccttcattaaatgtctcaggaacagtataaaatatgrttttccttctctcaacctcccagccccataacctcccatagtctagcctttacattcaccaccctactgagattcatcagttgagcctcacagtggcattctaatgaacaaatcccatggctttctcaattgctcacaaatcctcttacggcatttgagagtattgatcactccatacttgacatattatctcttcctggtttttctgatattcaaagccctggttctcacctatctgacccttctgcttctccttctgggatatatgtwtatatatttttagattaactttttgaaggccaggcatggtgtctcatgcctgtaatcccaccactttcaaaggccaaggcaggcagatcactttgagctcaggagttccaagaccagcctgtgcaacatggtgaagccctgtctctacaaaaaatacaartattagctgagtgtcgtggcgcacacgtatagtcccagctacttgggaggctattgatataggagttaaaaagaaatgatttaggcagatagtragggtaagaaagtcctcagtaaggttttccttttaatgaaaagcagtccccaagtcatttctttttgaaaaagtcagcctgtaaaattgagctgcagacatagataagcaagctggaaccttgcatgggtgaatgccggcagctgtgacaataggaaaaggttacctgggggctaggcatgttcaacrtggcagctccatcttcccttttctttgtcaaccacatgtccagtaaggaacaggcaacatggctctggccaggtagaaaacccatttgcataataaaagattaaggtggggtggccagcttcttcgtgagctatgtaaacgtcacacctggtctaaccaatctttgggccctatgtaaatcagacactgcctcctcaagccagtctataaaacccgtgcacctcaccatggaactggaagaccyactcgggcacccctctctctgcaggagagggagctattctcttttctctttcttttgcctattaagcctctgctcttactcatctcttgtgtgtccgtgtcttcgatttccttggtatgagacaatgaaccttgggtattttcccaggcaaatgacaccacttcactgtggtgggaggatcgcgggaacccgggaagtggaggtggcagtgagctgaaaatcrttattttctatcttcttggctagctcttcttgtttctcttgccctaccctcccatcttcatttcatcagccccagagactaaaagaattggaaatagacccagccaagkgggcgctgggggtgaaagggtgctcagtaaagtttttggtctctggcaacaagtgygcctcagtgtacgtggaatgatatgagacccactgcaaagacctagcattggtcgggcctggtggctcacacctgtaatcccagcactttgggaggccgaggcgggaggatyacttgaggtcagaagtttgagaccagcctggccaacatggtgaaaccctgtctctactaaaaatacaaaagttatctgggtgtggtagtgcatgcctataattccagttactcgggaggctgaggcagaaccacttgatcccgggaggaggaggttgcagtgagccgagatcrcaccactgcactccagcctgggcaacacaatgagactttgtctcaaaaaaaaaaaaaaaaaaaatggccargcgcggtggctyacgcctgtaatcccagcactttgggaggcggaggcgggcagatcacgaggtcaggagatcgagaccttcctggccaacacagtgaaaccccgtctctactaaaaacacacaaaaaaattagcggggtgtggtggtgggtgcctgtagtcccagttacttgggaggctgaggcaagagaatggcgtgaacccagaaggcagagcttgcagtgagccgagatcrcgccactgccctccagcctgggcaacagagcgagactccgtctcaaaaaaataaataaataaaaataaaataggccaggcgcagtggctcacacctgtaatcccagcactttgggaggccgaggcgggcggatcacgaggtcaggagatcgagaccatcctggctaacacggtgaaaccccgtctctactaaaaatacaaaaaattagccaggtgtggtggcgggcacctgtagtcccagctactcaggaggctgaggcaggagaatggcaagaacccgggaggcggarcttgaagtgagctgacattgcgccactggactccagcctgggcgacagatcaagactccctctcaaaaaaaaataataaataaaataaaagacctagcattaagagctctcttcaacagacatactggtatgcaagcaaaattctcccagagataggagtatctaagacagggctaagaaatgggacagtagaaggaatggtcaatactgcacagtctgtgttctggagaggcttgacagtcttatgggaaggagaagctgaacaatgaaattagagactgtgatattatgaaatatatatttggcctttgtcctgtttcctggcataagaactcctacaatctgtgaaatctgcaaagtgagaaatgtctttttgtatgctaataaattgacttacggctggcagcctctaggcttcaggatgggggctggtcacctgaaagactaaggtaggatttgrtggttcgaacttttagccctactcctcaacctcctgggaggggacaggggctgaaggttaagttgatcaccagtagccaatggtttartcaatcatgcttatgtaacaaagactccataaaaaccccaaaaatcagtgttcagaggtttttcggatgactgaacacatggagattcttggagggtggtgtattcagagagggcctggaagctccatgccccttccctcaccccatgccctatgcatctcttcatctggtgttcatcattattcttcgtaatatcctttataataaaccagtaaaggttagttaagtgtttttctgagttctgtgagctgctgtagcaaatcmatcaaacccaaggaggggtttttgggaaacccgatgtatagcttggtcagtcagaagcacaggtaaaacaacctggagcttgcaaytggcatctgaatggaaaacagggcagtctcgggaattgagtcctcaacctgtggaatctgatgctatctccaggtggatagtgtcagaactgagctgatttagaagacacccaactggtcaggrttgattgattagttgctggsgagaagaaacccctacacattttggtgatcagaggtcacaggagtcttctacgttgattgttagtgagagactaggagaaactcrtttttttttttctttcctatattctcagagatcctaacctgagaggagaaatttaagtgctggaacacaaggattgctaccagttgctcctgggcaaatggccaaattaacgtgccagggatctgactgtgaccttgcctgtgtgtgtgtgtgtgtgtgtgtgtgtgtgtgtccaaactactggggttcctaagagatmgccacctagaaaacaaaagcaaagcaagcaaaaccataaataatcagtctggtctggtggctggaggggactaatgggcagtgatgtaagaaacccataattactgaatcatagctatatttatagttgtatcttctcaaatgctaaagattttacttaacgtattaattaaatgagaaaagtaggcagatgttataacctgttcaaaggcgtcaaagaagaagaaatttatgtggagtaaasaaatgtagaaatgattgtgcaaactggcttggggtggggcaggtgggttggcctccccctaacagaccattgtcatatatatagataagaattattttacattaattcttgtatcttgttatcaatatagtattaattactttgcattgctaacaaacctatagagttataaagtaactctcatagaatcagataaccaggaaggatgcaatttataaaatgcagttttcgatggaagcacaaatttctccctaaaatgtaaaagtctggaagaatacataacaaagtctttgccctgtacaaaggtggggggtgcggcygggagcagtggctcatgyaggcaatcctagcactattaggagtctgaggtgagtggattgcttttagttcatgagttcgagaccagcctgggcaacatggcaaaaccccttcyttacaaaaaatattagccacgcatggtggcatgcacctcccagctactcgggaggctaaggcaggaggatcacttgcacccggaggtcaagactacagtgagccatgatcacaccactgcactctagcctgggtgacaaagtaagaccctgccacaaaaaaaaaraaaaaaraaaaaagaaggttggggatatatctatgtgttttcctttaaacacttatgtaaagttaagtgcttttacaagaatgtattcattgcaaaatttgctctaaaagaaagaaaccacatttaaaagttgacgtgagttgagtgccatatagtctaaaagatgagcagagctctgtagtcagtggctgggtttgcatcccagattcaccctttacagctgtttgatcttaagttacatagcctaaggcagtttcttcagctgtgaaatggaatgatattaatactgcccgttaaaaacattttaactgggggyggagcgtggtggctcatgcctgtaatctcagcactttgagaggccaaggtgggcggatcacctgaaatcaggagtttgagaccagcctggccaacaaggcgaaamcccatctctactaaaaatacaaaaattarccacacatggtggcatgcacctgtaatcccagctactcaggaggctgaggcaggagaattgcttgaactcgggaggtggaggttgcagtgaaccgagattgcgccactgcactccagcctgggtgacagagggagactctttctcaaaacaaaacaaaacaaaacaaaacaaaacattttaactgggaggccattaggctgagatagtctcagctttttgggttcctatgtaagcaaactgaggcccaatgtaaaaagtaaaacaaaactagagacttaaccaaccagaaactgtcaattaacttctaactagggactttccatgggtttatacccaaataagggcaggtctacttgtagccaatcaggagatctttcctcatttgaagatyctggcactcttcttaaaaatgttgaccataaacatgtgggtttacttctggaccctcaattccattcaattgatctacatgacaattcttagactacagccacacaggtttgagtactacagcttttcaataagttttttgtttttgtttttttgagacggagtctcgctgtgtcacccaggctggagtgcagtggcatgatctcagctcactgcaacctctgcctcccgggttcaagcaattctactgcygagtagctgggattacaggtgcccacgacaatgcccagctaatttttgtatttttagtagagatggggtttcaccatgttagccaggctggtctcaaactcctgacctcaggcgatctgcccactcggactcctaaagtgctgggattactggtataagccactgcttccagcccttattaagtttttacattgcaaagtgcgagtcctccaactttgttcttcttgattgttttgagtattctaggtcccttgcaattccatatgaattttagatcattttgtcaatttctataactagctggaattctgatcaaatcttcaaatctgtaaatctatagatcaatttgaggagtattgcttttgtttgttttgtttttgagacaggatctcagtctgtcacccaggctggaatgcagtggtgtgatcacagctcacaccagccttggcagccttgacttcctgcactgaagcgatcctccaacctcagcctcttgagtagctgagaccataggcgtgcaccaccacactcaactaattttttttaaatttatttaatttatgttttttgagagggagtgttgctctcttgcccaggctggagtgcagtggcgtgatctcagctcactacaacctctgcctcctgggttcaagtgattcttgtgccttagcctcctgagtagctgagactacatgcatatgccaccatgccaggctaatttttgtatttttagtagagatggggtttcaccatgttggccaagctggtctcgaactcctgacctcaggtgatccactcacctcggcctcctaaagtgctgggattacaggcatgagcccctgtgcctggctgggctaattcttaaattttttgtaragatggggtcttcctatgttgcctcggctggtcttgaactcctgggctcaagtgatcatcctagctcagcctctcaaagtgctgggattacagacatgcaccactgtgcctggccragtattgctatcttaacaatattatctcccaatccatgaacatagaatgtttttccatttatttggatgttttttagtttctttcaagaatggtttgcagtttggggagtataatttttgcatttcttttgttaaagttattcctaaataatgtattcttattgatactattgttgatgaaacttttattaattttatttttgaactgttcattgcaagtgtgtagaaacacgattgatttttgtgtattgatctcatatcttgcagcyttgctaaaattatttattagttctaatctcccctcttaaggcttaaactctagttggaaatcaaggttaggggaggggtacagccaaggacttacatttcttttttttttttttgaggcagagtcttgctctgtcgcacaggctggagtgcagtggcgcgatctcagctcactgcaacctctgcctcccgagttcaagcaatcctttgcctcagcctcccgagtagctgggattacaggcgcccaccaccccacccggctaattttttgtatttttagaagaggcggggtttcaccatcttggccaagctgatcttgaactcctgacctcgtgatccacctacctcggcctcccaaagtgctgggattacaggtgtgagccaccatgcccggccaggatttacacttcttattgttcacacttcactttttgttttttcatttttacatttattttattttatttcttttttttttttttttttttgaaatgagggtcttgctatgttgctgaggcygttctcaacctcctgggctcaagcaatcctcccacctcagcctcccgagtagctgggattacaggcacatgccaccatgcccagtcactttttgacatataaaactatgcacatgtattgctttcatagagataaaaataatataaaaagtatcctggcacagtccccaggacaactctttacagctgccactcatcagcttagtgtcttgacagttaaggccaggccaaggtcccactgtgacctttttccctccctaaagctgctttgggactctttaccttaaaggggttaaaaagagggagaaatrtttataaattctaaaagtaacttaagataatattttaaagtacttagccattaaaagtaacttttatttatcaagatacaattaggtatctggcaaagatggcatgtcaaatcactgaagtaaagaaagactttgaaaaaatgctagaacaaatgggtaggcacttggaaaatatatatagatgaatacttcacaccatatgtaagaatcaacttctaatagatgagggatctatatgtaaaaaaggaaaccattcaagcaccattaaaagtaacagcagggctgggcacagtggctcatgcctgtaatcccagcactctgggagaccgaagtggtcggatcacctgaggtcaggagttcaagactagcctagccaacatggtgaaaccccatctctactaaaaatacaaaaaaaaaaaaaaaaattagctgagcatggtggcacgcacctgtaatcccagctactcgggaggctgaggcaagagaatcacttgaacctaggaggtggaggttgcagtgagccagtcgtgccactgcactctagcctgggcaacagagcgagactctatctcaaaaataaacaaacaaacaaacacataaataaataaaagtaatggcaaaacctcaatcacttttgcaccaacatattagaaaaacacacgggtagattcctctttaacttcagtgtagggaatggcttttgaactggggctcaaaattcagacgtaataaaagattgataaatgtgatgatatgtaaatgcttaaatttgcgtgacaaaagtaccataaagaaggacaaaggataactgacaaaaataggagaaaatattcacacatataccatagacaaggagtaaaatccttaaaatataaaaaatgcttaaaatttgaggacaaaggaccaaaaactcaacagaaaaatgggaaaagatgtgaacagacaacaaacaaaaaaagatagaaaaatgtctctcaaatatatgaaaaaatgtcagactcattcataattagaaaaatgcagattaaaacaacactgagataccatttttacctggaaaagtttagatagacaaaaatttaaaaatacagactgacagtatattctgttggagagactgtaagggaaatacacagtctcattcattactggtgggaatgaaaatkggttcaacgcttctggagagaaatttggtaatatctgaataaacgacatatgcacttatattttgacccagcaatctcatttctagaaatttaccctgaagataaacttccaacaatrtaaacatatatatgcataagtttattgcaggtttgattttttgtttttgagacggagtctcgctctgtcgcccacgctggagtgcagtggcgtgatctcggctcactgcaagctctgcctcctgggttcacgccattctcctgcctcagcctcccgagcagctgggtctacaggtgcccgtcaccacgcccggctaattttttgtaattttttgtatttttttgtatttttagtagagacggggcttcaccatgttagccaggatggtctcgatctcctgacctcgtgttccgcctgcctcagcctcccaaagtgctgggattacaggcatgagccactgcgcccggccaattttttttttttttttttttttttaagacagagtcttgccctgtcacccagcctggagtgcagtggcgcgatctcggctcactgcaacctctgcctccagggttcaagtaattctcctgcctcagcctcccaagtagctgggattacaggcatgtgccactacttcaagaattgaaaaaacatactggtttttataccttttgcatatttatctttttttaaatttttttagacaggatctcactctcttgcccaggctggggtagagtggcatgatcatggctcactgcatccttgaccttctgggctcaagggatcctctcacctcagccycctgagtagctgggactaggggcatgcatcaccacacacccagctaattttttattttttgtagagaccaggtctcggcatggttcccaggcaggtcttgaacttctgcactcaagcaatcctctcccaccttggcctctaaaagtgttgggattataggcatgagctactgcatctggcctgtatttttatcttgaatacaactaccatatcactacttttattgattcaagtagtttttttttttcttcaaaccggagtccttgggatatacaggcataaatctttttttttttttttttttttttttttgagacggagtctcactctgtcacccacactggagtgcagtggcacgatctcggctcactgcaagctccacctcccaggttcatgccattctcctgcctcagcctcccgagttgctggtactacaggtgcccaccaccaagcccagctaattttttgtatttttagtagagatgggggtttcaccgtgttagccaggatggtctcgaactcctgacctcatgatccgtccgcctcggcctcccaaagtgctgagattacaggcatgaaccacagtgcccggcygcataaatcttataatcagctgaaagatatcattttatcttttcttatccaatatatataccagttgtttaacttttttgtattatgtattctatgtatttatcataatatttaaaataatatagttccacgttctaatagtccatcatttaaaacaggaaaaagaagaaaatcatataaagggaaagattgataaattgtattatattaaaattaagaacttctggttttcaaaagataccacaatgaaaatgaaaatataagctacaaactgggagaagatatttggcacataattgacaaagaattataactgagaaaaacataactaacttctacaaataagtaagaaataccaaacaactcagccgggcacagtggctcacacctgtaatcccagcactttgggaggctgaggtgggcagatcatttgaggtcaggagtgggagaccagcctggccaagatggtgaaaccctgtctctactaaaaaaatacaaaaattagccaggtgtggtggtatgtgcctgtaatcccagctactcaggagtctaaggcacgagaatcactggagcccaggaggtggaggttgcagtgagccgagatcacccctgcactccagcctgggcaatgcatcgagattctgtctcaaaaaaaaaaaagaaaaaaawaaagaaataccaaacaacccgtgagaaaaatggaagaaaaacacatacatacatttcatgagtatacaacccacagaaacacgaacagaagcacagtctcactacttaacagggaaaggcaaattcaaaccataatgagataattttatacccaccatattgcaaaaaaaaaaaaaaaaaggagttaagtttgacacaatcaaaagatggcaaggatgtggagcaataagcaaccttacacacggctgataggactccaaattggtgtattgattttggaaaccaatttggcattatctagaacacctgaaatggatgtgccctatgactcagaaattccatttactgggcatgtgctcaggagaaactcttacatgtgggcgcaatgaggcaaacaagaatgttcaaagctatattatgtatcataacaaaaaactagaaacagcccttatgttctcaattagaatggacaaacaaatcctgatataacaaaataataaaatactgaaagcaatgaaaataaactacatctacatgaattaaaatctatacatttcattgacataatgttgagtaagaaaagagctagctgccaaaaatatatttataatgttggtttcattcatattaagttaaacgtgtaaaaataaaagtatatgtttaaaactatatgttttaaggatacatgtgtatttgattaaactatgattaaattaaattaaacttgattacagaatgaggaaaactatggttggagaaatttgcaggcaggatcagggaagagtctacagcgtatttcttaaaactagatatttcttgccttgacatcycagcaaacaaacaaaactgggtatttcttaaactaggtggtgggtacactggtgttcatttgatggttattgtctatactacttgttattaaacttggctgcaattgggatcgcctaaagggcttaaaaataataccgatgcctcactcccacctcagagattttgatttaatttcatgaggtctggcaaatattatcctaaatggaaaccctaaagattccttaaaatgtattactctaaagataaatggcctcattcctgatgttttttaaaacttttcattttgaaataatttcagacttacctcaaagtttccaaaatagtagcgttcctgtagtatcttttacccagcttcctctagtgttaacacttacgcaacctagtacaatgatcaaaaccgggaaattaacattgctaaatactgttcttcagccgttattcaaatattgccagttttcccactaatgttctttcattggtccaaggtctaatccaggatcttacatttctctaagccatcatgtcttcttagtctattccaatctgtgacagttcctcagtctttctttgtctttcatgaccttaatacttttgaggactgctgattagttattttacagagagtagctgaatttagtttgtctgatattttcttacaattagattgaggttatgcatttttggcaagaattccacagcaggtatgttgcccccttcttggtgcattatgtaagggattatattatgttgatatatctcattactggtgatattaactctgatcacttagttaaggtggtgtctatgaattaatcaagttatcaaatctctcttatttcattctcaaaggaaaactcatcaattattgaggacctctgactgtcactctaatgcatgaataaagaggtgctggattaaaatacatgggcatacagacatacatgcacatatgtgcacatacaaattaaagacaagatatttcaactccattatattcatcagtgatatggtttggctgtgtccccacccaaatttcatcttgtattgtagttcccataatccccacgtgtcatgggagggaccctgtgggaggtaattgaatcatgagggcggtttcccccgtgctgttcccataatagtgcgttctcatgagatctgatgattttataaggggctttccccgcttttgctcagcacttctcctcgctgctgccatgtgaagaacgaaggttttgcttccccttccaccatgattataagtttcctgaggtttccccagccctgcggaactgtgartcaattaaacccctttcctttaaactaccaagtctcaggcagttctttacagcagtgtgagaatggactaaaacagtcagttattaccacaataatgcttcataacacacctcctatgtctcagacttacaacaacaagttcatggatctttgcatgggctggagcaaccttgctttaggctatagggtgcctgagtgtggctcyaggcttctacttgggttcaggactgctcaacatgtttcctcagttctttggaccagcagctaactggggcatgtcctgtaaactttttgtcttgaaataattttagacttactacagtgtttccaaaatagtacagagttcctgtatatcttttacgcagcattccctggtgttaacatcttacacaatcacagtacagcgatcataaccgggaaattaacattcatacaatactattcttcagccattattcaaatatcgccagttttctcactcaaaggaaaaactcctaaatcttcgttaaaaaaatcacaggaacaactgtgtgcagtggctcatggctgtaatcacagcattttgggaggccaaggcgggcggatcacgaggtcaggagtttgagaccagcctgaccaacatggtgaaaccccatctctactaaaaatacaaaaattagccctgcgtggtggcacgcacctgttaatcccagctactcaggaggctgaggcaggagaatcgcttgaacccaggagttggaggttgcagtgagctgagatggtgccactgcacttcagcctgggtgacagagcgagactccatctcaaaaaagaataaataaatacatacataaataaataatcgcaggaacatatcggaaattattgtctcttgaagcaagaactgtcacaccrttccttcaactcatagttcttttcttttttttattatttgtttgtttgtttgtttgtttgttttttgagacggagttttgctctttattgcccaggctggagtgcagtggtgtgatctcggctcactgcaacctttgcctcccaggttcaagtgattctcctgtctcagctgcccaagtagctgggattacaggcgtccgccaccatgcccggctaattttttgtatttttagtagagatggggtcacaccattgttggccaggctggtcacaaactcctgacttcaggtgatccacccgccttggcctcccaaagtgttgggattataggcgtgagccaccatgcccggcctcaactcatatttcattagtcaaagtaactcacaggaaatacatcccttccctagtggggagaactgcaaagtcacayggcaaagagtataaaggtaaaatttggatacagagtatgaaaaactaagaatagtcatgtgatctacctaactgaccttgtgttttttmaaaagtgacaagttgtgaatagtgttgcaaygaaaagataaataaaatcaagtgacatgatctttgacatacagtagtmgcccctaaagtaattggagaaaaacatgtgtttcttackgtgaggatagatctaagggctatggctagattaagagagtactaaaagaaccctcggatagtcacatagtttaacataatttagtcatcccttctctctgttaaacttaactttttctcagtacacctaaaataatttcaaaaagatatgttcttcctcacctacttctaacttgtttcaaagaacataatttgaggcataatgtaaatattgacttttaaaaatagaagttatattactttttctggccgggtgtggtggctcacgcctataatcccagcactttgggaagctgaggtgactggatcatgaggtcaggagttgaagaccagcctggccaatatggtgaaaccccrgytctactaaaaatacaaaaaattagccaggcgtggtggcgtgtgcctgtagtcccagctattcgggaggctgaggcaggagaatcgcttgaacccagaaggcggaggttgcagtgagccgagattgtgccattgcactccagcctgggcaccagggtaagactctgtctaaataaayaaataaataaaaacagacgttatattacttcttaaagtgtatctaccaaatctaattagcatagggttttggtatattccatcattcatcatacaagagagaaaataacactcttcttcaatagacagacattttatataatttattttatctttgaaaaatttttcattccttttcctcacaaaatttgattttaatatgtgttcaaaagtcttttattaatcatcttatcatatttctctgagcaaaaatgtgtctaagaattgaaattattttaaattgtttttatttcctgtcatcttaaagttctttttttttttttttttgaggcagagtctcgctctcttgcccaggctggagtgcagtggtgtgatctccactcactgcaagctccgcttcctgggttcacgccattctcctgcctcagcctcccaagtagctgggactacaggcacccgccaccatgcccagctaactttttgtatttttagtagagacggggtttcacagtgttcgccaggatggtctcgatctcctgacctcgtgatccgcccgcctcggcctcccaaagtgctgggattacaggcgtgagccaccgcacccagccgatcttaaagttctaagtggtcaatgtttcttctggattaaatgatcactacagttattagtaataaacaaacaatcacaaaaagtaaatacacttttaaaaaataattgttaagcattgtaagagaaacaattctcagagaattgaaactcttggtccaggtccagggacacctgggaagctgaccctgaatttactttcttgcaaaattagttctcaaaatgtactaagttayggtaagtgtagaatgttgtgtggaccatgctttttccacctgaagtgtatctggttgttggggctatttgttgtataacctttcattgaggtgctacagctgctcccaaagaatgttatttatggccgggcgtgatggctcacgcctgtaatcccagcaacttgggaggccgaggcaggcagatcatgaggtcatgagtttgagaccatcctggccaacatggtgaaaccccgtctctactagaaatacaaaaattagctgggcatggtggcatgaacttgtaatcccagctactcaggaggctgaggcaggagaattgcttgaactcgggaggtggagcttgcagtgagccragatcgggccattgcactccatcctgggcaacagagtgagactctgtctcaaaaaaaaaaaaagttatttattaagttatacacaccctgaggaatgatatgactaataagttataaaaagtcaaagagcagatagtagaagagcttcscagtgccaaggtggtccatcttgctttaccttcatcccttgtaactgagcatgacccatgaaatgataagcttggaarctgtgcctgggatattgcaaggccttttgctcaaagcagtgcttgcttggatgctgaactacctgtcctgcatcctttgaataaaataagtaaactggtattgaaactgtgtcgttttgatctgggcgcagtggctcatgcctgtaatcccagcactttgggaggttgaggctggtggatcacctgaggtcaggagatcgagaccagcctgggcaacatggcaaaaccctgtctctactaaaaatacaagccaggcatggtggcgggcrcctgtaatcctagctacttgggagactgaggcaggaaaattgcttgaacccgggaggtggaggttgcagtgagccgagtttgtaccattgcgctccagcctgggcaacaagagtgaaactccatctcagaaaagaaaaaagaaactgcgttgttttgttagtctttccatcaatccaggtttgtatcaaaagtggcgattgattccggtgctttgggagtgatgaaaaagaaaaattaaattaaaaataaagtggcaattgatacgaagacctctgaccccgtagaggcaaaaaacccttatgttgtaagaagatgaatagggaacaaataattttgatgcctgaaagattgcttaaccatcatgttgtttgatatgactccatccaagaattgctcttatcagtgaaatttaaaaaaacattgatctaattcactaagaactgattaaatgggttgaaaaaagagaagcaagcagtgcagggaaaagctagaaatactatcccatgttcgtttcttatggcttttttggaaatgaaagcattgacaaagagaagggaaaggaaagccaagagctctaagcctagcaaaatctgatcttcatagcttccctagtacctgtgagggaaagggagggacaacatagttaaatcacactgccatcccactgagatccctccttaatcaaactagcccagatcccaataggggcatgcaaggcgttacagaggacaagcattatagtataaagaagttgagtaattttgttgaaaaataacagcaactgcttaagaaatccttgtgatcttggatccttagataaaatgatcaggatgccaaaaatgtaattgtggattctkcataatgaagcagtttgcatggaataagcatctatattatggaaacaaattgtatctaatgagtccttctgtcattcctgaacttaacactaatagctgagttagtgggtgctccaatatggaagtaaaacattactggaaatacttattttagtgaaatggatgtcgtatggatgctcatgactttttaataaaatgcacagggttcagcatcaaatccatgtaaacctttggcaatgggaccaggcgtggtggctcacgcctgtaatcctagcactttgggaggccgaggcaggtgaatcacctgaggtcaggagttcgagaccagcctggccaacatagtgaaactccatctctactaaaaatacagaaaattagctgggcgtggtggcagacacctgtaatcctatctgctcgggagcctgaggcaggagaatcacttgaacctgggaggcggaggttgctgtgagctgagatygcaccattgcactccagcctgggcgacagagcgaaactccatctcaaaaacaaacaaacaaacaaacaaacaaaaaggttggcaatgttgaactttacctgagcatcatactcctggaaaatagcaatagtttaaaaatccctccactcttytgcggtcctgaaaatggcttactgcaaaaatccacccttccctatargatttagataagaccaatggatgacgacccccttgtttacctaagacaaagacaacacaggctctccaaattcccattattttatctcataaatgattagatgaactgtttgcactgaccagtctggacaaaatacctgctaatctgacctgaccaaactctagttaggcttctcttttcccctgaggcccctgaactttggcctactgttgagtttaaacaagcattggaatgtggaacaacctccttaatgacccttccagaattggctgaytgcaaagaaaaattgtccaatgtgccactctctgattccatttcccccatactctgttcsmtctaaccttgtttgctccagtggagtattctttcacaatagctttccccctgccacccccattacataagtctttttgaaaaaggcctttctttatctaagtatggatttgtttttattggactccttgtagcataaataggtagaatggaatagaaggggttttattatagtgatttcattcaattatttgaactctttctgaagtatatgccaaaacccacatagttactgattatcaaaagttgatttttaatgaaatttggtatgtcaactttctcagctctctttcaattttgttgaaagcaaagaattgggaaacatctaacttgcaaaagatgcattactccatcatcagagtcatccacttcctcactggccagcactgatatttagaaatgtatctttcctggagccctggaggttcctcctcccataagcaatgcaccatagtgggtgtatatcagtagcaggagcttggayataaatggggagctggaagagtaggactgggtaacatctgagagctagcatgatagaagatctcttttaagaaaaagcatagacagaagttgagaatctagaaactcattttctwaaaactaactgccaatggtccattctctgtcttcatcagagctgccattttgctgttgccacttgctagtgttgaaaaagcctcctgcttcaggttcactatcagcatgaatgaagaaaaggtggccagatttcaggctcagatccagaatggwgataagggtaccttcccttacagaaagaagataacatatagaatagcaacagctgatgtcaaaaarcctcttttcttttttaaartagyggtgagtaactattactggaatggaatagataaacctaaatagaggtaaaggggtaatcccaggactcaggcttgcctctcttatagcattataattactcatcatgcaaaagccaaaacagtgtcagcaatgctccctggaatattaaggtagctgggcactgacaatgttacaagttctaggaagttagccaaatagtctttctcgtagcaagtattgaatagcaaaacatgaaaagtaggagactagtggctctgtcctcaattactggcttcgcgtttcctttattattttttggattttaagcttgcatacacttactaaataattgcatgtcaatcttatcccgtgtcctaactcttcttactascactgcagaattctgtcttttcagcaaggttgaaattgtgaatgccctttttgtccctaacaactatgtcaagatataattcacatgcaatacaattcacccatttcaatatattttggctaattcgttattcatttacaaattgtggtaaagtatgtataacataaagtttgccatcttggcttttttaagtgtatagcttagtggtattaatgaatgatattcacaatgttgagcagccaccaccactatttacttctgaaacttcaacatgcccaaaataaactctaattattaagcaataactccccaacctctgataatctctaatctacttttgttactggaaaggggtcctgatcctgactccaagagaaggttcttggatctcgtgcaagaaagaactcagggcgagtctgtaaattaaagtgagaacaatgtattaagaaagtaaaggagtgaaagaatgggtactctatagacagcagccccaagggctgctggttgcccatttttatggctrtttcttaatatgctaaacaaggggtgggttattcatgcctctcatttttagaccatatataataactttctgaygttgtcatggcatttgtaagttgtcatggcactggtgggagtgtagcagtgaggatgaccagaggtcactcttggtaccatcttggttttggtgggttttagctggcttctttactataacttgttttatcagcaaggtcattatgaactgtattttgtgctgacctcctatctcatcctatgaatcagaatgccttaactgtctgggaatgccacccagtaggtctcagccttatttcacccagccccttttcaagatggagttgctctggttccaatgcctctgacatttcccaccttccttttataagagaacccttaatcctaagggctgcagagggacaaagatccattttctgtaacttctttatgctgaataggggcaatgatattcctgcctaactattagggtcttttgtgtttacggtagagaggagcttagttagaaagcattggcctgggygcagtgactcacgcctgtaatcccagcactttgggaggccgaggtgggcagatcacctgaggtcaggagtttgagaccaacctggccaacgtggtgaaaccccgactctactaaaaatacaaaaattagccaggcgtggtggcgggtgtctgtaatcctagctattcaggaggaagaggcacgagaatcacttgaaccaaggaggcagaggttgcagtgagttaatatcgctccactgcactccagcctgtgtgacagagtgagatttttgtctcaaaaaaagaaagaaagaaagaaagcattggtatgttgagggccatttataacttttgagttccaacaaaaggtgatatttggaagattaataagtgtttaagaaaacattgagtaagcttattttgcattgctatacaaagagtacaacagcaatatatttcaccacactaaaacaacataagcaaaattatcccaacttaactaagttagaaggctttctatcaactgggcaagtgttagaaccaagctgatagggggttgctagatgattccagtatgtgcccagaattagatattgattcagattttgacattacccatcctctcgtttcttttgagcagcagttagagattactggttgatttacaggaataagcagagtcagtttaatttgcagggaaaaaaatttaaagcaactgatgagactagaatttaataacaagtgtaccacagttcttgaaacattaagttttctgtctccagtttcccatttttattaaagacaaattatggtaacaccaacttgctttattatacttggcctgattgtttgyataaagtgtagcaagaataattatttttcacataagctttttgtaaattggaactctgttccatagaaggaatcttagataagatttttttagatccgagccctgccattggtttgtatgcttaaatacctatgagctaggtaaattcctctcctcttgaggttccaagataacctggggcttctgggcctgttagaaagtgacattctttacttatcacaggtcagaaaccctgtgcagggactgtgtaggcaaggtatgaggccagttctcccaagggacttgtattggccctataagttaaatttaattccttaaaggaaaacacaccattccagttaaagccttggtaaaataaccagtttttccaattgcatcctgttacaaaagaaaatggatttttattgcacttatgcaaataactatattgccataaattaagaatacttacaaatagtttccatattttagagaaatctggtagagagaaacaaatatgatccacgttttgtttacaggagtatacttaattgttaaaagctgtaaatagcttctattagtttagtccatgcagttaattcctgtttgatatttatgaacatttcagctttccrtgagtccgaaagttttttcctgtattttaatattacagtgttcaaaggtattagaaacctgaatttaagagcacctgttagagtcctatagctgattataaaccatttttttaaagaggaataaaacaacaagtgtccgtggatgacaaaatgtcttaggacagtcacagttaaaaacacaattgacaaagaaatttggttacctctgtggcatacaatgattttatgtaacaattataattattaataatatacactaagttatattagaattattttggaacacataccaataacatatttatacaaatatagcccaaagaagctaaacattattttatatttgacagtgcttcttgtatgatttttatataaaataagccaaatgtcacttttacattagtgtactattactgtcaaacccagtttttaataaaaccttatagacaaatgtatttaatcagtttgaccataaggtaagatttttataaacctcttttataactacctttacaatatttgttaaagagcagagtaaaagcaggtttttgctttaagaaaaacctgttgtgcttttattccaatgtttagtttaaaactgaataatacccctttaactttagccaatctgttcacacatagattttttttataattaatttttttataaaacgtttacaacttgtttaaacctttagaattttcctatttcacttaaagcaatcctttaaccctttaggcaaaaaaaatacatgcccatgcctttttataattttttactaaaaacaaagtttacttttcttacacaccttgcatgtaaaactgtttcttcagtagtcacaaatacatgttacactgttaactcttagtgactttaacttttggtgaaaaccttggtaagttcagggttttaattaggtatggagccgaggacagcagacagaagtgcagataaggtctgatttttttttagcatttacgtgtcccaggccttacctagctgtaaagcaggaaagttttacagttacaagttatagtggcattttatgacacatttaggaagcctaattacctttaaattgtacaacattttttgcataaattattttcatatttttatgacttacacagaccatttatgacatgcttggactttyggacttgtcctaaacatacctcttgtcaaacaaccattttactttagaacaagaatttaccatacaagatcctttgttatataaaatctttttctttataaccttctttgtatagctagggggcatggctaatcccatatatccccaggccttatctagaatttaatgctttaaaatgaattgaggctgggcatggtggctcaggtctgtaatcccagcactttgggaggccaagtggggcggatcacttgaggtcaggagttagaaaccagcctggacaatgtggtgaaaccctgtctgtactaaaaatgcaaaaactagccaggcatggtggtacgtgcctgtaatcccagctacttgggaggctgaggcaggagaatcacttgaatctaggaggtagaggttacattgagctgtgattgtgccactgcactccagcctgagcaacagcatggaactccatctcaaaaataaataaataaaatagaataaaataaattgaacaatttgtaaaagtcaaagaagcagtttatgacctgccactctgcttagcacccaatatcaaactggcaaggctcaaacttgccccctgttggrccccatcatcrttaatccaacctctgaccagagagttttgacttgtgatctctgggaargatggttaccctgagtaatagaaaaaataagaaagggaaaggagagagagaaaagccttgcctgtggcaggatggggaaggtgaagatctcagggagttgagagaaagacccacccattccagcaacactgaatcaaaagttcaggtggccgcttgtcagctgtgaagggatatttttcagcagtcccatcagctctcaagtttccccttttagggaagaaaaagctccccatgtcccacgatcctgttcatgcctaatcctgtcacccatagctgtcagcaaagagtgcaaggcagattatttgaaagagaatagcagttaatagtgtcaaacccattcttagccragaaggactttactgagagaggcctctaactccctaaatcttagaagggataactcttctaatttgggcctctaacccaaggttggttaagcgttcttgccttttattaagatgagtctctaacccactctgtttcaggagagactctaactcccctaagttgcacctctaacccaatcccatcctttacttgggtaccccaattacccaaagttggccaattagtgctgcagtctgtttcctttgggttgagaagtattttcagtattgtcccayttgtggttcatgagaaagatgttatcagaccccaacacttaaccaaagttagcctttgagttgggagtttccacactatagtcccctctgggtcgtcagaaagatgttactggaaaggggttccaatccagaccccaagagagtgttcttagatcttgcacaagaaagaattcagggcacattcatagaataaagttaaagcaagtttattaagaaagtaaaggaataaaagaatactccatagacagagcagccggctgctggttgcccatttttatggttatttcttgacgatatgctaaacaaggggtggattattcatgcctcccctttttagggccgggcacggtggctcatgcctgtaatcccgcactttgggaggccaaagcaggcggatcatgaggtcaggagatcgagaccatcctggctaacatggtgaaacccgtcactactaaaaatacaaaaattagccaggcatggtggtgggcgcctgtagtcccagctactctggaggctgaggcaggagaatggtgtgaacccaggagttagagcttgcagtgagccgagattgcgccactgcactccagcctgggtgacagagcaagactccgtctcaaaaaaaaaaacaaaacaaaacaataacaacaacaacaaaacacatacataccaaaaccaaatggcttacaacaagaattcctttttttttttttttttaggagtcttgctctgttgcccaggctggagtgcagtggcgtgatctcagctcacttcagcctctgcctcccgagtagctgggattatagcatgcaccaacatgcccaggtaatttaagaatttatttttcttttattttgagatggagtttcactcttgttgcccaggctggaatgcaatggtgccatctcagctcaccacaacttcttcctcctgggttcaagcgattcccctgcctcagcctcccgagtagctgggattacaggcatgcaccacccgcctggctaattttgtatttttagcagagatggagtttttccatgtttgtcaggctggtctcgaattcctgacctcaggtgatccacctgcctcaacctcccaaagtgctaggattacaggcatgagccaccatgcctggccaagaatttatttatcttactggcagatctgcaggtcagctgataattgtgcctcagactgacactcagatgcctaggctctggggttcaggttgtgctcatatctgtttcstgagtcttattctgggacccaggctgaagaagcagtgctggtgggacatgttgttcttatgaacaatggcaggactaggagagctatgtcaaaccaagagccaagtcaaacatattcaaggtctctctcctgtctttccattagtagtacatttgccagagcaagtcacagggccaggcccaagaagtataatcttccyacagtagaagggagaggggagtggatattcattgaacaataagccaaactactgatcaacctatcaatcatgctcatgttattaggttggtgtacagatcttacattggtattttggttgtacttacatcgatgttatccatacacaagaaattacatatatattctctcttcactcccttttcaacacataaggtaacattcaatacaaatacctaatgtaacaggtcatctttaaaataaattgtttcctgccagcagaggtgtgctaaatmatcatcatcatcatcatcatcatcataatttatgagagatttggggctttcccaccttcttctttaattcaagattgctgtcccatacatcatcgataattatgctttctgctgacatagtcagattcaacactttaagtttgtcacacacattgttttgatattgagtgcttgatwtggaaattcttacaactgaaagtgttggaaaggatgagatttttaaaaggaaaatgaaggggaatgtccaaaaggagaagtttaagggaaaaaaaacttcagagacattgagacgactgtctgtgaatcttcagcactcctacatgtttcgctcctgtgtgccaggattatctttctaggaatgcctagtgcaagcaggcagccctggagarataaagacaaggacttcccctgaagcaaatgtatttacattcctagataaataaagatcaaaacggtaactttcaccgagagatttacagacatctttccccagaaatatttgctcacattccagtgtagaatgtttctctctggaagggaggatgggcagattttcctgcagccctatgcaaaatgtgagcctcctaaactcagacttcgcctcctgtattgcacctgaaagcacctgtaagtaccatctggccctccctatgttgccttatgggaattggggctcagggaayccaagctctgaagtcaccttggctgctgcttttactgtgaatacacgtctttgtctctgactcagagatctcctgttttctaacacgatgtatataaaaatttgtgggccaggcgtggtggctcatgtctgtaattccagcactttggaaggccgaggtggctggatcacctgaggtcaagagttcgagaccagcctggccagcatggtgaaaccycatctctactaaaaatacagaaaattagtcrggcatggtggcagacgcctgtaatcccagcttctctggaggctgaggcaggagaattccttgaacccaggaggtggaggttgcagtgagccgagatcactgcattgcactccagcctgggcgacagagygagactctgtctaaaaaaaaaaaaaaaaaattgtggcacggtaacttgttagcttgcaagtagcagaaaatctcagacttttcagtttctgacttcacaagaaggaattaagaaaagtcaggaaaaatgtraataaactgaggtatctgtcccatccgaaagtgaccgggtgactctcttagtttaagaggatttatggaactgaaggcagaaatctgagaggccaggtagtttgctgtatttccactcggtgacataagacataaaatatacgtcctcaattaaaaaataaagcatggtccctgcccacataatgtttttattcaaagaatacaaggggcaaacacttacaagaaaaaaaaaaaaggcttttgaaacctccagggaggtatgactccagtgccagattggtgctgggggaagaaaacaacaagaggaagcagctggcaccaaaaataaaccagtacacactaaaakgaataatttscttttcattggaaaaatggcccattccaggtctggggcacagaaatgtccaataaaaataaatctggacttaaggagatcattttttaaaattattttattttwttattawtattattattattattattattattattattattatttgagatagagtcttgctctgtcacccaggctggagtgtagtggcatgatctcagctcactataacctccgcctcctaggttcaagcgattctgctgctgcctcagcctcccaagtaactgggactacaggtgcgtgccaccaagcctggctaatttttgtattttcagtagagaaggggtttcaccatgttggccaggctggtctcaaactcctgatctcagatgagccacctgctttacctcccaaagtgctgggattataggcgtgagtcattgcacccggcctatttttaaagttttatttatttttttgagactgggttatgagactggctaatttttatttttggtagagatggggtttcaccatattgcccaagctgatcttgaactccttggcctcagatgatccacccgccttggcctcccaaagtgttgggattagaggcgtgagccactgcaaccagcctagggaaataatttaactagagagaaagactattgtaatagtgtattagtcggttctcatactgctatgaagaactgccctagactgggtaatttataaagaaaagaggtttaattgactcacacttctgcatggctgggcaggcctcaggaaacttacactcatggcagaagacatctcttcacagggaggcaggaaggagaagtgctgagcaaagggagatctcgtgagaactcactcattatcatgagaacagcatgggggaaccacccccatgatccaattacctccacctggtctctccattgacacatggggattacggggatgacaattcaagatgatatttgggtggggacacaaagcctaaccatatcaaatagggagagcactctgaactcagaaatgtataagcatctcaaactcaaacagaaaaaagtttccttttagggtaggggagaggaagcagagataagagcctcttttaaggggaagctagataagtaagaagaaatgaccagtagatctgacaggaaagtgggctcgatgtgattagccgactcccaggagaagctgataaagggcaagttctacttctttttgctcagatctggaggcaagcagagttcaggggcccataggaaaaagagaaggctttggttaagacaaagcagagggtaagaaatgggcaattgtgaatgcttagttagaaaatacaggctgggcacagtggctcatgcctgtaataccaacactttgggaggtcgaggtgggtggatcacgaggtaaggagattgagaccatcctggctaaaatggtgaaaccttgtctctactaaaaatataaaaaattagctcggcatggtgacatgtgcctgtaatcccagccactctggaggctgaggcagaagaatcgcttcaacccaggaggcggaggttccagtgagccgagatggtgccactgcactccagcctgggcaacagagcaagacaccatctcaaaaaaaaaaaaaaaaaaaagaaaagaaaagaaaaagtaaagaaaatataaggtatgcctggaacatcttgttgtgtccctaaaattagattttctagttacaaatgatgactctaccacttgcagtttgttaaaatgagcctcccaaaattacgtacacaaagacagatgttaagacaaatatgatgaaattaacagtgatcgagtctaagtgaaggacatgtagctaattcattgtattattatttcatttatttatttttttaagacagggtctcgctccatcgcccaggctggagtgcagtggcacaatcatagctcattacaagcttcaactcctgggctcaagtcatcctctcacctcagccccccaaaattctgggattacaagagtgtaccactactcctggcttccattgtacttttaaaattttccttgcatttgaaagtttataataataaaatattgggggaaaatacacacagaacagacatattttacaagaaatttcaagtgcttaggaataaacctaacgaaaggcatataaatccttctttggataaaattataaaatcttattgagctgcattaaagaaaacctaaataagttgagagacataacctatttttggataagaaggatcaatatctccagctgattctgaaagtattgtggaattgctcacagtctttcttttcaacttgaacctggcagaatggcgctggcaaagaaaggagaggtgaagaagggccattttgccatccacaggtggtgacctaagaatactgccatcaatattcataattgcatccatgcagtgagctccaagaagcatgcccctcaagctgtctaagatattcagaaatttgccatagggtgatggggactccaaatgtgtggatggacagcaggctcaaggaagctgtctgggccaaaggaataaggagtgtcccataccgtctccatatgcattgtccagaaatgtaatgaggatgaagattcaccaaacaagctctctaccttggtaactcatgtacctgtcaccactttaaaaaatctacagtcaatgtgaatgagaacaaactactgattgtcaaagttataaaaccacctaaataaacaataaaaagtgttatacaggaataaagggccaagcacagtcaaacactcttgtttgtaagatttagtaggccgggtgctggtggctcacgcctgtaatcccagcactttgggaggccgaggtgggcggatcacgaggtcaagwgatggagaccatcctagccaacactgtgaaaccctgtctctactaaaaatacaaaaattagctgggcgtagtggcatgcacctgtagtcccagctactcgggaggctgaggcgggggaattgcttgaacctgggaggcggaggttgcagggaggcggaggttgcagggaggcggaggttgcagtgagccgagattgcgccactgcmctccagcctgggcgacactgcgagactctgtctcaaaaaaaaaaaaaaaaaaaaaaaaatttagtattagctatagggtttttttaaaaagtaggtctatgaaacagaaaggaaaaccaggaatgaagtcctatgcatacacagaaacatgactggggtggaacaccaccacagatcagaggagaaaaaaagatggctcctgggaaaatggttctgaaacaacagcaacaaaaacacagtttcagagaattaaagccctaaatgtaaaaggcaaaattataacaacttttagaagccaaaataggaaaatattttaagacactagagggggaaaatatttattaaacaatgtgtgaaaaacacaggacaaaggaaaggattgagaaattgaactgcaataaatgaagagcatctatcaaaagataaccataaagtaaatgaaagatgatgccaaaggaaatgaccaacaaaacgaagatatctgcatatcatatcactggaaggattattacccataatatattttatttaacttcaataaaaatggaaaaataaatacacagaaaaatgggcaaaaggcaattcatagataggactcaggaatgtatttttaaaagttcacatggggcgcagtggctcacgactgtaatcccagcaccagcactttgggaggccaaggcaggcagatcacaaggtcaggagctcgatgtattgttgaggaatacatatacactataaagattctagtgtacattccagattggtggtgcaatcatagttcacagcagcctcaaactcctgggctcaaacactcctcctgcctccgcctcccaagcagttaagactacagcatgcactatcatgcctggccaatttttcacctctgtggaaagaacgggtcttgctatattgcccaggctgatcttgaactcctagtgttatgtaatcttcctaccttggcctcccaaagtgctgggattacaggcatgagcctggccagtttattttctttctttctttctttctttcttctctttctttctttctttctttctttctttctttctttctttctttctttctttcttctcttctctttctctctctctctctctttctttctttctttcattcttttttctttttttttttttagacagggtcttactctgttgcccaggctggagtgcagtggcatgattatggtgcccgcctgtagtcccagctactcgggaggctgaggcaggagaatggcgtgaacccgggaggcggagcttgcagtgagccgagattgcgccactgcaatctcaaaaaaaaaaaaaaagattttggaagtttggccgggtgcgatggcccatgcctgtaatcctgacactttgggaggccgagacgggcagatcacaaggtcaggagttcgagaccagcctggacaacatggtgaaacccccacctctacaaaaaacacaaaaaaattagctgggtgtggtgggcacctgtaatcacagctacttgggaggctgaggcaggaaaatcgtttgaaccctggaggcagaggttgcagtgagccgagatcatgccattgcactccagcctggacaacagggtgagactccatctaaaaaaaaaaaaaaaaaatttggaggtgagatgtttaccattttagaacacttcaagggatgacaaagcccaaagctgcactgtccagcagaaatagaatgtgaactacatttgtaattttgaattttctaatagccacattttctttaaaaaaaaaaagtgaaaaggctaggcacagtggctcatgcttctaatcccagtactttgggaggctgtggtggaaagatcgcttgagtccagggcttcaagatgagcctaggcaatatactgggacctctacaaaacaaacaaacaaacaaacaaaggcaaagaaaatgaaagaaaaaaaattagccaggtgtgatggtgtgcacctgtagtcccagctacttgggaggctaaggtgggaggatcacctcagcccaggaggtcaaggctgcagtgagccatgatcgtgccactgcactccatcctgggtgacagattgggaccttgtctcaaaaataataataaaatacaataaataaggaaaaagaaacataaaattaattggaaataattttaataatatattttcatattatatatatgtgtatatatgtatatacacacacaaaatatgcttttaacatataatctattttatttattttttgagacagggtcttgctctgttacccaggctggagtgcagtggaacaatcacagctcactgcagcattgacctcctgggctcaagtgatcctcccacctcagcctcccaggtagctagctagaactacaggtgcatgccaccatgcctggctaacttttttttcttttctttttgtggagaccaagtcccactatgttatccaggctggtcttgaactcctgggctcaaacaatccttctgcatcagtctcccaacatgctgggattacagacatgagccactccacctggcctataatcagttttaacaatgggtatatccagtgattgacagcacagactctagagtcacataaaactgggtttaaatccctggtccatcatttgctatgctccaacaacttaaatcatttatcccttacaatgatatcataaagaactattattatcctaatttcacaaatgaaaaaaccgaagcaaaaagaagttaaacaacctgccaagggttctagagctagctaagtgtagagctgagaaatcacccagtcagcctggctcctgggcgcacaccaatgactgctatctctgctcttctgtacagagcctgacctggtatcccaatggagatgcccaggaggccactgagaatctgtagctagaaaacgttggtgtcctcaaccagtaaccattttatgagtctcaactcagtggggagtatatatgaaaaaattatttttcctcaaatcagtgctttcaaccatattmtactaaatccccttttcctatactttaacaacatgctggacagatatcatgattttccatttagattcctcactttcagtgtgaaaactgagttcagtccagctgaaaaccacaatcacatacctaattcaaaacttccctatctgctatgacctgaatgttgacgtccctccaaaattcgtatgttgaaatcctaactgccagggtgatggtgttaggaggtgagagctttggaaggtgattaggttatgatggtggggcactcatggatgggatttgtgcccttatgaaagaggcctcagagagaccctggccttttctgccacatgagggttcgtggaccagggagtgggccctcaccagacagaatctgctggtgccttgatcttcaacttttctggagaattgtgaggaacaaatttctgttgtttacaagctaccctgtttatgatgttttgttatagcagcctgaatggactaagacactatccttcattccttgcttagagctacagcttgaggaaccaaaagaggtggcggtcaggaggcggggatagagtcaacttcattatttcctctaccacactgaggtgaaatctggctttcattttcttgactcccattccaccccacccacaccctgcctagcctctgactcttactgctggagttcccttacctgaccaactatgtcttggggccagctaaggtccaagaaaacatgtgtatccctgccacccaaccagcaagcagcagcaactactccaaggttgccctctctcttgtgctgccatctcgaagccaaggttcagttgaggcaagaaatgcctgtctggccgggcgtggcagctcacgcctgtaatcccagcactttgggaggctgaggggtggggggtggatcacttgagctcaggagttcgagaccagcctggccaacatgatgaaaccccgtctgtactaaaaatacaaaaaattagctgggcgtggtggcgggcgcttgtaatcccagccactcaggaggctgaggcagaggcagaagaatcacttgaacgcgggaggcggaggctgcaggttgctgtgaaccgagatcgtgccactgcacctgcactccagcctgtgtgaaagagcaagactctgtctcaaaaaaaaaaaaaaaagaaaagaaatgcagccaggcgtggtggctcacgcctgtaatcccagcactttgggaggccaaggcgggtggaccacaaggtcaggagattgagaccatcctggctaacacagtgaaaccccgtctctactaaaaatacaaaaaaaaaaaaaaaaattagccaggcgtggtggcgggtgcctgtagtcccagctactcgggaggctgaggcaggagaatggcgtgaacccgggaggtggagcttgcagtgagccaaggtcgcgccactgcattccagcctggacaacagagtgagactctgtctccaaaaaaaaaaaagaaatgcctgtctacttgttgcaggcacccccagtctctctcagcgtttctactggaggcttctccctcacttagttttttgttttttggtttttttttttcctttgagacggagtcttgctgtgtagtccaggctggatggactgcagtggtgagatctcgactcactgcaagctccgtctcctgggttcaagcaattctgcctcagcctcccgagtagctgagattacaggtatgtgccactatgcccagctaatttttttgtatttttagtagagacggggtttcatcatcttggccaggctggtcttgaactcctggcctgaaatgatctgcccaccttggtctctcaaagagctgggattacaggtgtgagccaccgcgtctggccaccctcacttagttttgtgaaggaaagaaataccacatggccaagggcaactctcatttcctctgtctgctccacttctccccagcctcttttctatagacgggagttgaggatagggtgaaagctgccatgaataaggctcattctgctgttcgttagtaaacccaggggtagaatctagctccagtgatgggtggctctctttaaaacatatctttcttggttcttctttgcctcggcttttgacgttagtccttgattttgattcaacagaagcagccacttttggcatcttgttatagatgcacaggtggtaattgaagccatgagagttaaccaawatataaagaactgcagacagctgagaaggagtgctatcttcgtcctttattaagagtcagctattggccaggcgcagtggctcacgcctgtaatcccagcaatttgggaggccaaggcaggcggatcacgaggtcaagagatccagaccatcctggccaacatcgtgaaaccccgtctctactaaaagtacaaaaaattagctgggcgtgctggcgggcgcctgtagtcccagctactcgggaggctgaggcaggagaatcatttgaacctgggaggcagaggttgyagtgagccaagattgcaccactgcactggtgacagagtgagattccatctcaaaaaataaataaaaagtcagctattagcaccttcggaggctgaggtgggcagatcacctgaggtcaggagttggagacyagcctggccaacatggtgaaaccctctctctactaaaaatacaaaaattagctggatatggtggtgcatgcctgtaatcccagctactcaggaggctgaggcatgagaatcacttgaatctgggaggcagaggttgcagtgagcagagatggagtgactgtactccagcctgggcaacagagcgagactcagtctcaaaaaaaaaaaaaaaaaaaaaagaagattaaaaaaatgtgattatgcactggtgaaatagccattgtagaatcatgtcttgaaatgtcctatgttgactaaatgtatccagaattgccatgtgaaatgtgtgaaggacaagatgttctgtgtttggtaaatgtgtatgaggaagagagaaacaattagaagttctctgtcacacaayctacacactaccaggaagttattctagaaaaaataacgytctctaaaacgaaccatgcaatctgacacccgtcttcyacctctcagggaagagaaacttcaaaggcaggaggcagggccaatgcatgatgtgttctattgtcccaaggagacctgcctgagccttgaccctagtttctgatggctttccgtgttgagtgtagcctaagaagcagaaactgaatctactggaacctttctgaatagggtttatttaatcacatgcactgtttcctgtttaaagcatttcccaaaatggcatagcacctcctctccaatggtggtcaaattgcgatgtgtacccttgggggaacttgaagaatttctatgatgtacatgggcaggaacagcttgaaaggaccaatttctgagtctcagcttccatttgcactccgtaaaattgacctacctgggaatgtgtctatggtctgctagtattccagtcccccttctcctagcatacaaaataaggcagacttctcacccatcccaaaacttttatgttgtgtagggtgcaggggtgaggggctgtacaaactctctgaaacacaaaataaaggtactattcagccttatttcatccagatacccagattcataccttgattaattagctatctatctattgctgcatagaaaattagcccagaacagccaggcacagtggctcccacctgtaatcccagcactttgagaggccgaggtgggcagatcacgaggtcaggagatcaagaccatcctggtcaacatgataaaactctatctctgctaaaaatacaaaaattagctgggcatgcgcctgtaatcccaactacttgggaggctgaggcaggagaatcgtttgaacccgggaggtggatattgcagtgagctgagattgcaccactaaactctggcttggtgacagagagagactctgtctcaaataaataaataaataaataaaaataaaaaaaataaattagccaataacatagtagcttaaaacaacaataaacacaaattccccagggtcrttatggtgggatgcgacttcatcaccagattgacctatcaagtgcaaggaaacttggcttcaggagaggctaacttacttctgtgtagtgtagggggaaaagagaaaamacacacacacacacacacacacacacatgtgcgcgcacgcacagcggtaaagcagaagtttccagctgggttttctgtccctttggccacataatcaagtcaggtgatctaacttgttaaaaccatcagtaaagaaattgaccctggggtttcccagattcagtttttatttttatttattttatttatttattttttttgagatggtgtctcactctatcacccaggccggagtgcagtggtgccatctcagctcactgcaaccttcgcctcctggattcaagcgattctcctgcctcagcctcccgagtaactaggattacaagcgtgcaccacaacgcctggctaggttttgtatttttagtggagacagggtttcaccatgttggccaggctggtctcaaattcctgacctggacagaggcctggcaggtgatctacctgcctcggcctcccaaagtgctgcgattacaggtgtgagtgactgcgcttggcccagattcagattttaaacagcacatgacaaatcttgctgcccttctatccgctaaaggtaaaaaaccaaacgtccataattctccaaaggcaaagatagagtttttccartacagatgtaagtcagcctattatccacacattcccaacaaatggcctttaagagcctttggtgccaaattcaacaaatggaagggttttacacaggttaggaagatcaccagatgcatgtgagtcatgtttacttgaagatcactcttcatgacacatattaaatattcttagtgcttacatacttaatgaagccttataggtattctgtaagtatttattgagaaataggaaagaagaaggaagaagaaaaaatacaattcttgtgggttctattttcctttctgcctctgcgctttccctatactaagcatttttgcttcctcatctacattgtagttctactctcagctgtttacacttcactttcctaaaagcaccagtgtgaccttgatatctggccctaatttagccttttgatgtccatagtttctgttttctccatctgacacatgttcgtttctcttattcttggatgcctaggttctgggctcctattgggttatctttcaagtcatcccaagatagaagatagacttcctgctgagagagaaggcagttagaggctggttaggcagatagagagggagggtctctggagaagggcagtgttcacaagaacgctagcaggacmgtacctacaccgcctctgcagctaatgggaagaaatgtggttaagaacttccccttatgccaggatgttgctcagaagggactgtcctaacttaggcacaggcggaataaatcaacctaagtgtccttggcccagmtcatcatagtgtcattaacatgacatttttgtggttttagccccttggtgggtttcacttaggcactcgtgggtaacaaccaagatggagtcactctggccaatcccaggcatgtgcagatgcaacacccttaggagggaactttacccctcccattttgggcagaacccacagaagacttccttccttcctcttccacataaaagacccagaactcagccccatttctgaaaacttgctttcagggcacctctctttgctgagagctttccttttgcttaataaatcctactctacttactctgtggtgtctgtgttccttattcttcttggtcctgggataagaactcggatgtagctgaactaaggagtgatttagactgcaatgctgctccagaagatagacttcctgctccagaacatagaaatgggtgtgatatcttctcccaaattcaaaataaatgacaatggctgagcacggtaaattatgcctgtaatcccagcacttcgggaggctgaggccagcggatcacttgaggccaggaattcgagacaagcctgaccaacacggtgaaaccccctctctactaaaaatgtaaaaattagctgaacgtggtggctgatgcctataatcccagcactttgggaggcagagatgggcggatcacttgacgtcaggggtttcagaccagtttggtcgacatggtgaaaccctatctctattaaaaatacaaaaagaattagccgagcgtggtggcacacgcctgtaatcccagctacttgggaagctraggcataagaattgtttgatcctaggaggccagatcatgtcactgcactgcagccttggcaacagaatgagactctgtcaccaaagaataaattaatacacaaatgaataataaaaagtaaaataaaataaaacaactcaataagccctacttaccactcttttctaggcaaataggttaaaagagttgtgtaacctttcatatttatgtgatacctttcacgattgatgccattcacttcttttttttttgagacagaatctcactctgttgcccaggtaagagtgcagcagcamgttattggctcactgcaacctctgsctcccaggattaagcgattctcgtgcctcagcctcccaactagctgggattacaggcatgcgccaccataccctgctaatttttttttttttttttagtagagacgggtttccccatgttggctgggctggtctcagactcttggccttaagtgatctgcctgccttggcctcccaaagtgctaggattataggcatgagccaccatgcccagccacttcttctttttttcttttatttcaatagcttttgggggaacaggtggtttttggttacatggataagttctttaatggtgatttctgagatatcagtgcaactatcacctgagcagtgtacactgtgcccaatgtgtagtctttcatccctcagtcccctcccaccttttcccctgagtccctaaagtccaatgtccattttatcattctcgtacttttgcttcttcatagcttagctcccatttgtaagtgagaacacacaatatttggttttccattcctaagttacttcacttagggcctcccactccatccagttgctgcaaatgccrttatttcattcctttttatggttgagtagtattccaaggtgcatatataccacattttctttatccagtcgttggttgatgggcacttaggttggttccatatctttgcaattgtgaattgtgctgctgtaaccatgcacatgcaggtgtctttttcatataatgacttcttttcctttgggtagatacccagtagtgggattgctagatggaatggtagttctacttttaattcgttaaggaatcgccatactgttttccatagtggttgtactactttacactcccgtcagcagtgtagaagtgttcccttttcaccacatccatgccagcatctattagtttttgatttttaattatgggcattcttgcaggaataagctggtatcttattgtggttttaatttgcatttccctgataattagtgatgttgagcattttttcatatgtttgttggccatttgtatatttcttttgagaattgtctattcatgtctttttccctcttttggatggggttatttggttttttcttgctgatttatttgagttacttgtagattctcaatactagtcctttgtgggatgcatagtttgtgaatattttctcccactctgtgggttgtctatttactttgttaattctttcttttgctgtgcagagcttttttgtttaattaggcttcatctatttatttttgtttttgttgcatttgcttttgggttcttggtcatgaactctttgcctaaaccaatgtctagaagagttttcctgatggtatcttctagcactttttttttttttttgaaacagagtctaactctgttgcccaggcttgagtgcagtggcacgatctcggctcactacaacctctgccccctgagttcaagtgattctcctgcctcagcctcctgagtagctggcattacaaacacctgccactgggaccggctaatttttgtatttttagcagagacaggattgcaccatcttggccaggctagtcttgaaatcttgacctcgtgatccacccgcctcagcctcccaaagtgctgggattacaagcatgagccactgtgcctggcctcttctagcatttttgtgctttcaggtcttagatttaagtggtttttttttgtttgtttttgtttttgtttttgacagtctcactctgtccsmaggctggagtgcagtggcgtgatcttggctcactgcaacctctgcctcccgggttcaagcgattctcctgcctcagcttccccagtagctgggattacaggcacctgccaccacgcccaactaatttttgtatttttagtagagacggggtttcaccatattggccaggctggtctcaaactcctgacttcaggctatccccctgcctcggcctcccaaagtgctgggattacaggtgtgagccaccgcaccagccagatttaagtctttaatccatcttgagttgatttttgtgtaaggagagagatgaggatccagtttcattcttctacatgtggcttgccaattatatcagcaccattggttgaatagggtgtcctttccccactttatgtttttgtttgctttgtcaaagatcaactggctgttagtatttggctttatgtctgggttctctattctgttccattggtcctatgttcctatcttcataccagtaccatgctgttttggtaaccacaggcttggcacatagcttgaagttgggtaatgtgatgcctccaggtttattctttttatgttgtattgctttggctatgtgggctcttttttggttccatatgaattttaggatctttttttctagttctgtgaagaatgatggcagtattttgatgggaattgcattgaatctgtagattgcttttggcagtaagttcatttttgcaatattgattctactgatccatgagcatgggatgtgtttctatttgtttctgtcatctatgattcttttttgtttgtttgtttgtttgtttgtttttgagacagagtctcactctgtctccctggctggactgcagtggcacaatcttggctcactgcaacctccacctcccgggttcaagcaattctcctacctcagcctcccgagtagctgggattattggcatgtgccaccatgcccagctactttttgtatttttagtagagacggggtttcgtgatgttggccaggcttgacttgaactcctgacctcaggtgatccatctgccttggcctcccaaagtgctaggattacaggtgtgagccaccacacccagcctatgatttctttcagcagtgttgtgtagttttccttgcagaggtctttcacctccttggttaagtatattcctaagtattttattttatgtatatattttttgcagctgttgtaaaagggattgagttcttgatttgattctcagtttggtcgctgttggtgtatagctgtggtactgatttgtgtacatggattttgtagcctgaaactttactgaattcatttatcagatctaggagctttttggatgagtctttagggttttctaggtatacaatcatataatgagtgaatagtaacagtctgactccctcttttccaatttgggtaccctttatttctttctcttgtctgattgctctggctaggacttcctccattaacttctttacaattatctttgcaatctgagtttactccttattaaatttgttctcaattctttaggaagattgaattttagtgtataaatcctgttgacaaatgaggtwctagaatgatgagaattctctttaagaggccatttctgagataaatctacatagcaagtaggtctagttgctcagtccttacacctccaagggagcctggaatcatgattgacccttggcaaaccctcggaaatgttcttaggatgttctttatgtcactaattgatgattttgttgtgtacacttggagcaatgtaccatgccatrctggcttgctaatttgctttgcacaaacattgagattgatgatgtacccctggtctcattgttgtgatcctgagttttggttgctatggctaatcgcataacaggatatgtctttgtgattggtccctgataaaagccttagactctgaaacctgaatgggcttccctgagcagagacatttcacatatgttcatttctagagagaaaatacatcctgtgtgacttcagatgaaaaaagacttgaaatatatgttggatctctctaaatactgctacagtctcatcaatataccataatgtagtagtctcttgttgtgtagtatcaccaggagttctttgtcttatgaccatgcaaattaaggaatgtggatgcaaagcgtgaggttggagtgaaagtttaataaatgaaagaagaaagctatctatagtggagaggggagcccaagtgggctgccgtttttacagtttaatttaaaaggtttttggkttgtttgtttgtttgtttgtttgtttgttttttgagatgaagtcttgctctcgtcccccaggctagagtgcaatggtgcgatcttggctcactgcaacctccacctcccggattcaagcaattctcctgcctcagcctcccaagtagcgggattacaggcacctgccaccacacctggctaatttttgtattttttagtagagatagggtttcactttgttggccaggctggcctcaaactcctgacctcaggtgatccacccaccttggcctcccaaagtgctgggattacaggcatgaaccaccgcacccggccagaagtttttttgtgtgttttttgtttgtttgtttgttttggagatggagtcttgttctgtcacccaggctggaatgcagtggcatgatcttggctcactgcaacctccacctcccaggttcaagcaattcttctgtcccagcctcccgagtagctgggactacaggtgcctgccaccatgcccggctaacttttgtatttttagtagagatggggtttcaccttgttggtcaagctggtctcaaactcctgacctcaggtgatccacccacctcggcctcccaaagtgctgggattacaggcgtgaggcaccatgcccggcctgattttttaaaagtttttataggaaactcctctcatctctttagttgttgagtaacttatctgtaaagtcgtctgcataactccacactatctacaggtgtgagccactgtgcctggcccaggctgactcttgttagggactaatgcaaccaatgactttaagttggagccagtgctcactgaccattctgaaaatcctagggctcgtaagaattatgctaagttgggccagtcgcggtggctcacgcctataatctcagcacttcggaaggctgtggcaggcagatcacttgaggtcaggagtttgagaccagcctggccaacatggtgagaccctgtctctgctaaaaatataaaaattagccgggtgtggtggtgcacacccataatcctagctactagggaggctgaagcaggggaactgcttgaacccaggaggcagaggatgcagtgagctgagattgtggcactgcactccagccttggcagtagagtgacactacatctcagaaaaaaaaaaaaaaaagaattatgctaaatctactctattgctctataattgtaacaaaaaagtctgaatgacagcacatctgtttacagcatgatttactgaattactattattattattattttttgagacagggtttccctctgtcattcaggctgtagtgcagtggtctgatcttggcttactgcaacctctacctactgggctcaagtgagcctcccacctcagccacctgagtagctgggactacaggtgcataccaccatgcctggctaatttttttatatttttggtagagtcagggttttgccatgttgcccaggctggtcttgaactcctgagctcaacmaatccacctgcctcagcctcctaagtgctgggattacaggcatgaaccaccacacctggccaattgaccgaatattttaatcccactgttgagacctactgctccaaaaaaaaascttcctttcaaaatattactactcatggacaatgttcctggtcacccaagagctctgatggagatgtacaagaaggttaatgttgttttcatgcatcctaacatatccacttagcagcccatgaattaaggggcaattctgactttcaagccttcttatctaagagatacattttgtaagacgatggctgctacagatagtgattcctctgatgaatctgggcaaagtggattgaaaaccttttggaaaggattcaccattttaggtgccatttgattcatgtaagtaggtcaaaatatgaacatgaactggagtttggaagaaattgattttaatcttcatggatgactttgaagagttcaagagttcagtagaagaagtaactgaagatgtagtggaaatagcaagagaactggaattataagtggggcctaaagatgtgactgaattgcttcaatcacatgctaaaaaaagctttaatggatgaagagttgctttttatggatgagcaaagaaagtggtttcttragagggaatatattcctggtgaagatgctgtggatattgttgaaatgataatgaaggatttagaatattccataaatttagttgataaagcacctttaaaaggatttattacaattttgaaagaagttctactatgagtaaaatgctatcaaacagcataacatcctagagaaatcttttgtgaaaggaagagtccaccacagccagcattatactgattggggaaaagttgaaagcattctctctgagaactggaacaagacaaggatgcccacttttattacttctattcaacatagtactggaagtcctagccagagcaatcagacaagaaaaagaaacaaagggcatccaaatcaataaagtggaagtcaaactgtccctgttcagtaaagtttcagaatacaaaatcactgtacgcaaatccgtagcactgctatacaccaacagcaaccaagctgagaatcaaatcaagaactcaatctcttttgcaacattgctggaaaaaacaaaacaaaacaacaaaagcaaaacaaaacaaaacaaaaccaaaaaagccacaaaatacttaagaatatacttaccaaagcaggtgaaaggcctctgcaaggaatatgctgaaagaaataacatgctgaaagaaataacataaacaaaacatgctgaaagaaataatagatgacacaaacaaatggaaacatatcccatgctcatggatcagtagaatcaatattgcgaaaatgaacatactgccaaaagcaatctgcagattcaatgcaatttccatcaaaataccatcatcattcttcacakaactagaaaaaaagctgggcgcggtggctcacgcctgtaatcccagcactttgggaggcagaggtgggcagatcatgaggtcaggagatcgagaccatcctggctaacacagtgaaaccccgcctctactaaaaatacaaaaaattagccgggcgtggtggcgggcgcctgtagtcccagctacttgggaggctgaggcaggagaatggcgtgaacccgggaggcggagcttgcagtgagccgagattgcgccactgcactccagcctgggtaacagagcgagactccgtctcaaaaaaagaaagaactagaaaaaaaattctaaaattcatatggaaccgaaaaagagcccgcatagccaaagcaatactacataaaaggaataaatctggaggcatcacattacccaacttcaagctatactccaagcctgtggttaccaaaacagcatggtactggtatgaagaagataggaacataggaccagtggaacagaatagagaacccagacataaagccaaatacttacagctatttgatcttcgacaaagcaaacaaaaacataaagtggggaatggacatcctattcaacaaatggtgctgggataattggcaagccacatgtagaagaatgaaactggatcctcatctctcatcttacacaaaaatcaacttaagatggatcacagacttaaatctaactcccgaaaccataaaaatgccctagaagataatatcagaaaaactcttgtagacattggtttaggcaaagagttcatgaccaagaacccaaaagcaaatgcaacaaaaacaaaaataattagatgggacctaattaaacaaaaaagctctgcacagcaaaagaaagaattaacagagtaaacagacaacccacagagtgggagaaattattcacaaactatgcatccaacaaaggactagtattgagaatctacaagtaactcaaataaatcagcaagaaaaaaccaaataacaccatccaaaagagggaaaaagacatgaacagacaattctcaaaagaaatatacaaatggccaacaaacatatgaaaaaatgctcaacatcactaattatcagggaaatgcaaattaaaaccacaatgagataccagcttactcctgcaagaatgcccataattaaaaaatcaaaaactaatagatgttggcatggatgtggtgaaaagggaacacttctacactgctgatgggagtgtaaagtaaatgcaaacgcatttaccactacagaaaacagtgtagagattmcttaaagaactaaaaatagaactaccattccatctagcaatcccactactgggtatctacccaaaggaaaagaagtcattatatgaaaaagacacctgcatgtgcatggttacagcagcacaattcacaatcgcaaagatatggaaccaacctaagtgcccatcaatcaatgactggataaagaaaatgtggtatatatgcaccatggaatactactcaaccataaaagggaacraaataatggcatttgcagcaacttggatggagygggaggccattattctaagtgaagtaatttaggaatggaaaacgaaatattgtatgttctcacttataaatgggagctaagctatgaggatgcaaaagcataagaatgatacaatagactttggactttggagactcaggaaaaggtgggaggggagtgarggataaaagactatagatcgggcaccgtgtacaatgctcaagtgacagttgcaccaaaatctcagaaatcaccactaaagaaagtatccatgtaagcaaaaccacctgttccccaagaactattgaaataaaataaaatattttaaaaatgagtccatcaatgcrgcaaacttttttgttgtctgatttgaagaagttgccacatccactccagccttcagcaaccaccactcagatcagtcagaagtcatccatgttgaggcaagactctccaccagctttttgctgatgacacaagatgacaactcaattaaggctcagatgattgttagcattttttcagcaataaagtattttataattagtgtatttatgttgcacatttatgacataatgttattgcatayctagtaggttacagtatagtgtaagcataacttttacatgcactgggaaaccaaaaaatttgtgtgacttgctttatcacaatattcactttatdgcagtggtctagaacaaaacctgatatcacaaaacctgatattcctgatatatgggcttatctctgaagtatacctgtatctcagtgaagatgttattatttatttatttatttgagacagagtctcactgtgtcacccaggttggratgcagtggcacgatctccacttactgcaacctccacctcccgggttcaagagattctcctgcctcagcatccgaagtagctgggactacargcatgtgccaccacaccaggctaattttttttgtatttttagtagagacagggtttcaccatgttggtcaggctggtctcraacttctgacctcaaatgatctgcccacctcggcctcccaaagtgctggggttacaggcgtgagccaccgcgcctggacaaagatgttacttgctttttttttgagacrgagttttgctcttgttgcccaggctagagtgcaatggtgtgatctyggctcactgcaacctccgcttcccgggttcaagcgattctcctgcctcagcttccccagtagctgggattacaggcacctgccaccacgcccaactaatttttgtatttttagtagagacagggtttcaccatgttggccaggctggtctcaaactcctgactttaggctatccgcctgcctcggcctcccaaagtgctgggattacaggcgtgagccaccgcgccyggccaaagatgttattttctataaaggcaaccgttagaaccttcaactcattatttttaggctgacaaaaacatctgttattattatacyacactatgtattgtgaatagtttattttacaagcataatagagtattttgaaattacactctgctagaaccccttgctagttgttaattttacctagaaaagactcacagattctttgttaaaataagaaatctagcaaagtcagacttttctccctaccaccccacccaaccccattatacacaaaagaaaagaggaacagtccagatgtggtggctgacacctgtaatcccagtactttgtgaggtggagagttgggcagatcacctgaggcctggagtctgagatcaccctggccaatatggtgaattctcatctttactaaaaacacaaaaattagccgggcatggtggcccgtgcctgtaatcccagctacttgggaaggtgaggcacaagaatcgcttgaactcaggaagtggaggttgcagcgaacaaccactgcactccatcctgggtgacagagcaagatctgtctcaaaaaaaaaataaataaataaaataaaataaaatataaaaaaaagagatgagaaacaaatgatcagatttgcagagyaatctttcaagaatttatcctatttacacatgcagaaatgtcaattacaacattactatcagggcaacaaattatcaagtaaagctaccaatcagaattataatctatgagaaaggagttcactcagcttatttccaggagtacctggagtcacggtaccaacccttagccaaccacttggggctaagtccttggagttaacatagtcaccaatgaagttgttttgtgctcctgaggcactgaggcatgacatgctcaattgccagcactgcctaacacaaatatcaagatgtgccatgagcacctgcctcctgggtaaagatctgcaccatagattgtcacgtgggaggaatgtgccttgtgcaaccagactcctgtaagaactccgggwcctcagacctaagtggacttacgtgggcagagacatctcatatatgttcgtataatttgtagtcgtgccaaaagcaccttactgtgaccagcatggagggagaacctagaagtctgcacctaatctttcgggtcttcttgtaggcataacttttttctgctgatcctgtataatatcctttgctgtaataggcttttagccatgagaataacctgttactcagccaaatgcgtcctgacaaatctcaaaagtagtatattctcaggacccataaagcacaagcatttttccaaaggtaattttcaaggccagggcaagtaagtttctaagtcttagttttataaaactcttttttcaaagaaaawgacttayaataagaaaccgaagattcacaccactctccatattgcacaaaagagaaaaaagattgatatttttgtcaatatcraccatttgacactttacaaaatcagatattttgaatatgtgttatatctcagaaagacatcctcctctctgtgctataggggagaggagcatatcctttatttatttccaagacttctgttaattacaaaggctcacattgataagccaagctctggattttcattagttagcattataagcaaaaagcaggcctgtgagatcaattttactggcataaatgcagtaaagaatgaataagatataataataactgaaatacagagcctatagcattatttttccacaatatgtaatcacatatttataaatctgaaaataaaagaaatatcattagaatgtcastctgtacaaatttatggcaatatgcacaaaatacactaaaagctgccttatttttaygcagttgcatgctcacatatatatttctgtaacagacaattttactttgatgtgacaggagataatcgatcttgaagttaaagataataaatttgggtgtgactaaggtgtataaatttcagttgatctatatakatttatagcaagatggttaaaatgtgaggttgctcatcagaggyatagggttatcttaattatctctgatatgtaaatcatttacttttcacaaaaggccctctttcttgtgtaaacacaaacaaccataaattaaaataagtagcagatgactagtatgctattttattttgctttatgaacaaaagtaaacctgctttgaagacacaaataatctttcttgtaagtaggtacgtatccggcaccttattacatagaagagagcaccagcaccagaccctgccaaaatgaaacaaaacaagaactggcaaaatgattgtttctaatataagccaggaaattgtttcacaggtcaagaatgaggaaaactttttttttttttcctaagatcttacctcttattgtctttaggagttcctgtttattattgaggtcatgtgttttgttaccaggtcaactagcttactcctgcactgatgatcctggaatgaaagttttttttattgaaagtytatttgcagccaggtgtggtggctcacacctgtaatcccagcactttgggaggttgaggcaaaaggatcccttgagcccaggagtttaagacaagcctgggttacatagtgagaccccatctctacaaaaaataaaaaattagctgggcatagtctcagctactcaggagrctgaggtgggaggattgcttgagccctgaaggtggaggcagcagtgagctgtgattgtaccactgcrctcgaggcttgaggacagagcaaaacactgactcaaaaaaaaaaaaaaaaaaaaaagaaagaaagtctacatccaatagccagargtatgtctctaaggtccttgaccttccaagtataatgcaaaacacagaagagattgttttagaatgataaatttgactactaagcaaaaaattatgcatggcataagtcacaattaacaaagccaaaagaaaaatgacaaatatttaataagaatatctggaagcactcaagatccattaaggcaattggagtgtaatatcaggcagaaagaactagaatgtaactgaactcaatatattgattgggttctaatcctaaaatactgatttttatactgtccaaagaaagtttgcaatcaaaacaaaggtcagaagagataagtaaaggmcagccagagagcaagattttgcactgattagctctcactattcagagtccagagaaatttactatagtggacacaaatactctagttgttccatagttatatactattgtgggataagaatggtttatttcagtttggataaagtatctcttaaaactatataactcctgttattccagtttcactctcctttaagtaaactgattctgtcaatacttaccagttactggacaggcacagcagctcacacttgtaatcccaacactttgggaggttgaggtgggtggatcacttgaggtcaggagttcgagaccagcctggccaacatggtgaaaacccgcctctactaaaaataccaaaattagctgggtgtggtggcgggcacctgtaatcccagctattcgggaggctgaggcaggagaatggcttgagcccaagaggtgaaggttgcagtgaaccaccaagatcacgccactgcactccagcctgggtgatggagtgagactctgtctcaaaaaaaaaaaaaaaaaaaaaaaagatacttaccagttaccaaaaagagaacatgaaaaatatatgtaattttcactataaatttttctggtagatatcctggcttacatagtttcttatgagtttggttatcatgaattctttggttatcctggtattcatggaatctcatcaattctggattcattcacaattttgaattttcacgcctgagaactggggaccagactataagttgataaytcttaacattttcacctctgagcccttgcccaagtagccaaatgatctcaagatatgtctgtttcagttagcctttgttgtataacaaatcacctctagccgggtgcagtggctcatgcctgtaatcccaacactttgggaggccgtggcaggtggatcacagggtcaggagttcaagaccagcctggccaacatggtgaaaccctgtctctactaaaaatataaaaaaaaattagctgggcctggtggcggatgcctgtaatctcagctacccaggaggctgaggcagagaattgcttgaacccaggagatggaggttgcagtgagacgagatcgcgccactgcactccagcctgggcgacagagtgacaccatctcaaaaacaaaacaaaacaaaaaaaaacaaaaaaacaaaaaaaacaaatcacctctaaaattagtagcctataatggcatctgtttattgttcatatttctgtgggttgaaatttggactggaatcagctgagtggtgcttctgctgatctyccctggaaccacttgacttgtcatctctctaagatggtcttttgtttacatacgtagcacttggtgctatcaacttgtatacttcaggcygtggcctcatctttaatacgctatactgagcttctttatacaatagtctcagggcagaattctaagagcaagagcagaagccagragaccttttcaaaatgaaattcagaagtcatcacttctccattttattggtcaaagtcacaagaccagcccaagattcaagaggtgggtaaatagacttcacctcttttcaggaggggatacaaataatctgtagctttatttatttacttatgcgacagagtcttactctgttgcccaggctggagtgcagtggcrtgatctcagctcactgcaacctccacctcctgggttcaagcgattctcccacctcagcctcccaagctgggattagcccgccaccatgcctagctaacttttgtatttttagtagagacggggtttcaccatgttgaccaggctggtctcaaactcctgtccttaggtgacctgcccacctcggccacccaaagtgttgggattacagacgtgagccaccttgcccagctccctgtagctatatttaattacccacaacttgtaacaccgattcacaatagtcccaataatgttctttatagaaaaagaagattctctggtctgggatccaatctaggttcacacagtacatttagttgtcatgtctctttggtctcaatctgyaacaattccttagtttttctttgtctttcatgatgttgacagtttaaaattttgtcttttggattatgtgatgttttgaattttgtaacatgtccctcaatttggctttgttrgatatttccttgtgattagattcagattttgcatttttggcaaaaaactatataagagctattatgaccatctcattgcagtacagcaggagaaaatgatgtcagcttgccccattattggtggtattaactttgattaactgttttcactgtcacattactatttttcttttktaattaattagtrgtaattaattgtgttatgataagatgctccttatcaaactttcactgactagttgtagtatcaattaattacatttaaaaatttaaagaagggccgggtgtggtggctcacgcctgcactccaycctgggcgacaagagcaagactctgtctcaaaaaaaaaaaaaaaatttaaagaagaaacattgttttaaacttarattcaaacatcagtttgctacttatcagctgtgtgaccttagggcaactcaccagatggctctgagcctcagtttcctcaygtgtagattgtagataataatatttttmtcataaaattgatgtgggtaatacatrtaaagtacttagcagagcgattaccatttattttatttcactagtttttacggaaattctttaaattttagtagtgtgtaggaagagatcatctttgtcctaatagagattatactctagtctagagtagaggtgagcaaactttttctgtaaagagcagatggtggctgggcaccgtggctcacgcctgtaatcccagcactttgggaggctgaggcmggcagatcacctgaggtcagcagttcaagaccaacctggccaacatagcaaagccccatgtctactaaaaatacaaacattagctgggcgtggtggtgcatatctgtaatctcagctattcaggaggctgaggcatgagaatcacttgaacccaggaggcggaggttgcagtgagctgagactgcaccactgcactccagcctgggcaaaaagagcgaaattccatctcaaaaaaaaaaaaaaagcagacggtaaatattttaggagccaaatgggcaatacataaatgaatgcattttactgtattccaaaaactttatttataaaacaagtggtaggctggacttggcccatgggctggagtttgctgatctctggtctagagcaaacagaccaacaagaaaatataattacaaacaaacaaaaaacccagccaaacaaaaataaataaaaataattacaaatcataagtgttctgaagggaaaagataggttttaggggattatataacagtgacctcaccttgtctagaatgtcaggagtagcaacgctaaagcagtagcatttacactgagacctagaaagcaggtagtcattaactaaatatgtggtggcagggagcttatcaggcagagcaaatagcatattctaaggaaatgagggagaaagttacataactttttytttcttttttttttttgagacagggtctcattctgttgtccaggctggagggcagtggtgcaatcatggtcagctggagccttaaactcctgggctcaagcaatcctcctacctcaacctcctgagtagctgggaccacaggcgttctccatcatgtccagctatttttgtatttttttgtagagatggagctctcactatgttgcccaggcttgtcttgaactcctggactcaagtgagcctcctgcttcaccctcccaaaatgctgggattacagacataagccacagcaccagctgaacttttttttctgagacggagtcttgctctgttgccaggttggagtgcagtggcaagatctcggctcactgcaacctctgtctcctgggttcaagcgatctcctgcctccgcctcccaggtagctgggactacaggcgcatgccaccacgcccagctaatttttatatttttagtagagacggggtttcaccgtgttggccaggattgtctcaatctcttgaccttgtgatccacccgcctcagccttccaaagtgctgggattacaggtgtgagccaccgcacctggccagctttgaattcttaaaaaatgttcagctgaggccagacacggtggctcacacctgtgatcccagcactttgggaggccgaggctggtggatcacaaggtcaggagatcaagacatccctggctaacacggtgaaannnnnnnnnnnnnnnnnnnnttagccaggcatggtggcgggcgcctgtaatcccagctactcaggaggctgaggcaagagaatcgcttgaacccgggatgcggagattgcagtgagccgagatggcgctactgcactccagcctgggcgacagagccagactaagtctcaaaaaaaaagaaaaaagaattcaaagccaatgtaactagagggcaaaaaagaaagaaaaatgatgtggggaatctmtgaatgaataatcatttgttaaaagattccccacatcatttttcttacttttcttgctgtgtgctaggcattattctagctaaaaggaatacactggtraacaagactaataaggtccctgcctctatggagttgacatttgggatagaggtgggtgttggagatggacaataaacacgtgaatacataattacatatttaatatgtaattatatagacgtatgtgcatgtgtaaatgaatgtgtttacaaattacaagtaccaagaataagatgcattttgttctttgaaacagggtcttgctctgtcacccaggctgaagtgcagtggtrcaatcctagctcactgcagcctcaacctctcaggcaatcctcccacctcagcctcctgagtagctgagactacaggtgcacgctactacatccagctaattttaaacaattgtttgtaaaggtggagtttcaccatgttgcgcaggctggtcttgaactcctgggctcaagtgatcctcccaccatggtcttctaaattgttgggattacaggtgtgagccactgtgcccggcctggagagggctttctgaggaagtgacatttgatccaagacttgaacactgagaaaaggccaaatacatgaaagcagaaagaagaatgttaacaactgtgaaacaacaaaagcagatgccctgagacaataaagaaccactgctgaggaaggaacctagagggagccaaagggagagggctgtgaaacaaaatgggagaggcaggcaaaggccagatcacacagcactggagttcatggtgagaactttggacttcatttgaaatgcactgaaaatcaaaggcaagattttactgaagggagtgtgacattacattttaaaaagattattctgggtgcagtgtgaggaatgcaatagagaaaaaacaagattgaaagcagaaaggaagttaaaaggcttttggactaatcaggtgagaaactataaggtagttaaaatgagggtggtgacagtatagatggaaggaaatgaacagattagaaagatacttaaatgataaaattgatggaacttggtgatttgttagatatgaatactaaaagagaaagatggtccccaagctcctgaaaggagaaattggatgaatgttggtgccattcaatgggatattcaagtggaaatgttaaatgtgcagttgaatataggcgctcaggccgggcrcggtggctcacgcctgtaatcccagcactttgggaggccgaggtgggtggatcatatgaggtcaggagtttgagactagtctggctaacatggtgaaccccatcgctactaaaaatagaaaaactagccgggcatggtggtgcatgcctgtagccccagctacttgggaggctgaggctagagaatgacttgaacccaggaggcttgaacccaggagccgagatcgtgccactgcactatagcctgggtgacagagtgagactccgtctcaaaataataataataataataataataataataataataataataataataaaaggaaaataggagctcagaggctgggcacggtggcttgtgcctgtaatcccagctgtctgggaggccgaggccagtagatygcttgagctcgggagtttgagaccagtctgggcaacatggcaaaaccccttctctacaaaaaaatacaaaaattagctggtgcttggtggctcatgcctgtagtcccagacacttsggaggctgaggtgggaggatggcttgagcactggaagtcaaggctgcaatgagccatgatcgcaccattgcactccagcttgggtgacagagtgagaccctctaaaaaaaaaggaaaataggagctcagaggagaactggggacrtatttatccacaggtggtaatcagagccatggatgtggttaataacctggccaacgtggtgaaaccccgttgctaattaaaaaatacaaaaattggccgggcatggtggctcacgcctgtaatcccagcactttgggaggctgaggtgggcagatcacctaaagtcagaagtttgagactggcctgaccaatatggtgaaaccctgtctctactaaaaatacaaaaattagcctggcgcagtggcgcacacctgtagtcccagctactcgagaggctgaggcaggagaatcactggaacccaggaggcagaggttgcagtaggccgagatcgcaccactgcactccagcccgggcaacagaggaagactccatttcaaaaataaaaaataaaaaattagccaggcatggtggcacacgcctgtaatcccagctactcaggaggctgaggcaggagaataacttgaacctgggtggcggaggttgcagtgagccaagattgcgacactgtactccagcctaggggatagagtacgcactccagcctgggggatagagcgagactctgtctcaaaaaaaaaaaaaaaagaagaaaagaattagctgggcctggtggcaggcgcagctactggagaggctgaggcaggagaatcgcttgaccccgggaggctgaggttgcagtgagctgagatcgcgccactgcactccagcctggactaagagcgaaactccgtctcaaaaaaagactggcagaagagcataaactgacaaaggagtctaaaaagaaatgagcagagatgcaggcagaacaccaggagagcatcatgtcacagaatgctgctgagagttaaggaatacgaggattgaaaaacagccactggatggaaagacaaaggggtcattgatagcgttgggaagagtcattttrggggagtggatgaagctagattgcagtgtcaagggaataagtacaagtgacagggagtgkagatgactgtgagaaacgtagacataaaagggaagagagataggccacagactcatccctccataaataacagttttgttattactatttactagtcatttttcaaaagcaaaactttgagacatttatttacttccccacattaccaattattacatcataattctgagtggctgtcttatatcttctcagaaaaagtgcactattgagtggctggcatctcatagagagcttcagtctttggtcatagcattaggagcccttggtttcacaggtcatttaatagattgtttaggtacttacacttaagattttctttctttttttttttttttgagactgagtctcgctctgtcgcccaggctggagtgcagtggcacgatctcggctcactgcaagctctgcctcccaggttcacactattctcctgcctcagcctccggagtagctgggactacaggcgcccgccacygcgcccggttaattttttatatttttagtagagacgggttttcaccatgttagccaggatggtctcgatctcttgaccttgtgatccacccgcctcggcctcccaaagtgctgggattacaggcgtgagccactgcacccggcctacacttaagattttcacctaagtatccaatttacttgtttagtggattttttgattaattaattttttttggaaacagaatctcactgtcacccaggctggagtgcagtggtacaatcatagctcactgcagcctcgacctcccaggctcaagtgatcctcccacctcagcctcccaagtagctgggaacacaggcatgcacgaccatgcccggttaatttttttactttttgtagagatgaggtttcaccatgttgcccagtctggttctcgaactcctgggcataagtgatccacctgcttcggcctcctaaagtgctaggattacaggtgtgagccactgtgcccagcsttaattaattattttaacattaattttatttttttaaaaaataagcaggccaggcatggtggcccatgcctgtaatcccagcactttgggaggccraggcaggcagatcatctgaagtcaggagttcgagaccagcctggccaacatggtgaaaccccatctctactaaaaatataaaaatcagccgggcgtggtggtgcacgcctgtagtcccagctactcgggaggctgaggcaggagaatcgtttgaacccgggaagtggaagttgcagtgagccgagatctcgccactgtactccagcttggtgacagagcgagactccgtctcaaaaaaaaaaaaagcaatacatccaaatgcttcaaaattcagaaagaggccaggcacggtggctcacacctgtaatctcagcactktgggaggccaaggcaggcggatcacctgaagtcaggagttcragaccagcctggccaacatggtgaaactccatctatactaaaaatacaaaaatkagccgggtgtggcgatgcacacctgtaatcccagctactcgggaagctgaggcaggagaatcacttgaacctaggaggcggaggttgcrgtgagccgagatcgtgccactgyactccatcctgggcaagggggagactctgtctcaaaaaaaaaaaaattcagaaagaactaaaagttcagtgaaagtttacttttcaccgtattcctgaacccctagtttccttcctggggcagctgtactttatttaaccaggagcctagtgatgaacatttgcttgttaacagtcttctattatgaatgaarcaatggataatcttgtatatgtcattttgtgcatacgtgagtgtcttcagtctatttccctagaagctgagactggtggagcttcgtaggcaagtgatttattaggaaagtagtctaggtagaaatctaggagggtgagggagggaagcaggccaggggaggggaagaaggaaagcaagaatggtttcaggggaagtctagactcagcctattcctaccgggagccctgaagcataaagtgcaagcagaatctgtctgcccttaggcaagggaccagaacatttgtaccctaccatagacagtcactggttaaagcagcacataactcccatgaacttcatgtccaggtggctctaatcatccaagtccagtcccctggggttgtaggtacaaaccattaccagcagcacccacagctcctgggggaatgggcaccacaaaatggtagcagggatccccagggattgaggtggggacaccaacaggtttctgccacagtggatatgttgatgaaaagagtcaaactctgttaaatatttgaagagatttattctgagccaaatatgagtgaccatggcccatgacacagscctcaggagattctgagaatatgcgcccaaggtggtcggggcacagcttgggtttttttttttttttttttttgagacggagtctcgctctgtcacccaggctggagtgcagtggcgtgatctctgctcactgcaagctccacctcccaggttcacgccattctyctgcctcaagcctcccgagtagctgggactacaggtgcctgccactgcgcctggctaattttttgttttagtagagacggggtttcaccgtgttagccaggatggtctcgatctcctgacctcgtgatccgcccactttggcctcccaaagtgctgggattacaggcatcagccactgcgcccggccagcttggttttattcattttagggagacatgagtcatcaatcaaatacatttaagaaatacattggtttggttcagaaaggcaggacaaygcaaagccggggcttccacgctataggtaaatttaaatactttctggttgacagttggttgagtttatctgaaggccggggatcaatggaaagaaaatgttcaggttaagataaaggattgtggagaccaagttttattgtgcagaggaagctctcagatagctgacttcagagagagcaggttgtaaaatgtttcttattgaacttagaagggtgcctggctcttagctgattatctcctggatctggaaaggaaggaaggaaaacaaagggggaaaggggattctctacagaatgtggatttttcccacaagagactttgcagggctgtttcaagatatggcagagaaacatgttttgcagtaaaatattttgattttcttccttgttatgccagagtcagattggaaagtaagtcacaatatacaggattaaataaaacccatctgatgagaattgatgatttgtagggcatgactccccagaccccttagataggaatttgggcaaaaaaaaaaatcagagcttagtcctcatatatcactataggatacattcctggaggtaaaattgctggatgaagtcaacactattagttgcctatttaaaaaatatccccctctacacatacacacacacacacacacacacayacaccccattttttgtaatagaaccctgcttttatttgaaatagccatgtgttcaatttaaaaactcactttcccatcctcatttgcacttgtgctggtcatgtgacgctgctyttagcaataagatgaaggtggtggtttctgagggtagtgtccttttcagaataaaaagacaaagcytatttgccttcttcttcctttactttatattcctctttctgccaggaatataaatgtgactctgtggtgtcacgcgcatccgtgtgaagagaccaccaaacaggctttgtgtgagcaacaaggctgtttatttcaactgggtgcaggcgggctgagtccagaaagagtcagcgaagggagataggggtggggccgttttataggatttgtgtgggtagtggaaaattacagtcaaaaggggtttttctcttgcaggcataggtgggggtcacaaggtgctcagtgggggagtttctaagccaggagaaggaatttcacaaggttaatcgctcagttaaggtggggcagcaacaaatcacaatggtgggatgtcataagttaaggcaggaatgggccattttcacttcttctgtgattcttcagttacttcaggccatctggatgtatacgtgcaggtcacaggggatatgatggcttagcttgggctcagaggcctgacatgtgggtacagcagctatcttgtgaccatgaaacggaggcaggaaaatgaagacctgtgcaccaaaatgcaggaagtcaacgtcatatgtattaaaatacactgcggtaagtgtcttctctttcccaagtctcggtgcataattatgtcaacaaaaagagtcaaactctgtaaaatatttgaagaaatttattctgccaaacatgagtgatcatggcccatgacacagccctcaggagatcctgagaatgtgtacccaaggcgaatggggtgcagcttagttttatacattttagggagacatgagacttcaatcaaatacatttaggaaatacactggttcagttcagaaaggcaagacaactggaagggggctgccaggttgcaggtagatttaaaaattttctggttgacaattggttgagtttatctaaagacctgggatgaatagaaaggaaatgtctgggttaagatgaaggattatggagaccaaagttctgatgtgcagaggaggccttcaggtagtgggcttgagagagaataggctgtaaaatgtttcttatcagactgaattctgtgttgatattaatgccggagaggtataacaaggcatgtctgaccacccccttccatcayggcccgaaccagtctttcaggttaaattttaaaagtgccctggccaggagaaagtccattcagatggttggggggccttagaattttatttttggtttagaattattacacaactttactttcatttatatggtattttatgaattacaagtatgctttcacagaccttttccttccacctcactttatttttacagtgtctcccatccacatgacaagtattggtgagaggtgacagcgtgctggcagtcctcagagccctcgcttgctctcggcacctcccctgcctgggctcccagtttggtggcatttgaggatcccttcagcccccccactgcactgtgggagcccctttctgggctggccaaggccggagcccactccctyagcttgcagggaggtgtggagggagaggcacgagcgggaaccggggctgcctgcggcrcttgcgggccagctggagttccgggtgggcgtgggcttggtgggccccgcactcgggcagccagtcagccctgctggccccaggtaatgggggacttagcacgcgggccagtggctgcggagggtgtactgggtcccccagcagtgctggcccaccggygctgcgctcratttctcgccgggccttagctgccttcccayggggcagggctcgggacctgcagcccgccatgcctgagcctcccaccccctctgtgggctcctgtgcggcccgagcctccccgaygagcaccaccccctgctccaaggcgcccagtcccatcgaccacccaagggctgaggaatgcgagcaaacggcgcaggactggcaggcagctccacctgcagccacggtgcgggatccactaggtgaagccagctgggctcctgagtctggtgaggacgtggagagtctttatatctagctcagggattgtaaatacaccaatcagcaccctgtgtttagctcaaggtttgtgagtgcaccagtcgacactctgtatctagctgctctggtgaggacgtggagagtctttatatctagctcagggattgtaaatgcaccaatcagcaccctgtgtttagctcaaggtttgtgagtgcaccagtskacastctgtatctagctgctctggtgaggacgtggagagtctttatatctagctcagggattgtaaatacaccaatcagcaccctgtgtttagctcaaggtttgtgagtgcaccaattgacactctgtatctagctgctctggttgggccttggagaacctttatgtctagctcagggattgtaaatacaccaatyggcactctgtatctagctcaaggtttgtaaacacaccaatcagcaccctgtgtttagctgaaggtttgtgagtgcaccaatcgacactctgtatctagctgctctggtggggccttggagaacctgtgtgtggaaactctgtatctaactaatctgatggggacgtggagaacctttgtatctagctcagggattgtaaacgcaccaatcagcgccctgacgaaacaggccactcggctctaccaatcagcaggatgtgggtggggccagataagagaataaaagcaggctgcctgagccagcattggcaaccagctcgggtccccttccacaccgtggaagctttgttctttcactctttgcaataaatcttgctactgctcactcttcgggtccaggctgcttttatgagctgtaacactcaccgcgaagatctgcagcttcactcctgagccagcgagaccacgaacccaccagaaggaagaaactccaaacacatctgaacatcagaagggacagactccagacgygccaccttaagagctgtaacaccgcgagggtccgcagcttcattgttgaagtgagaccaagaacccaccaattccggacacattggtactcttgaaaaaaaaaatctccygcagtactaaaagctaataattcattgatgactaattttgacttagtttactttccttataacaactagctgagatgagctactctaaaagtataggatgtaaaatatgggaaaagtaatcttgtaacaaagagtcttttgggaagggatccataccccaaaatagaagtacagggtagagtccggtgagagcaccaaagatcaaaaaaaagatgcagtaaatgggagggaaggagggcagaagggatacccatgtgttactgaagtcaacttttatytattctgaagttttgcactatagtctgtgggaaatacattttctctgtattactgagtgttcctgcaaactcaggctcttgaaccacagatattaatctactatgaaaatgaaaatgcttgctttcatttcccccataaatatttgttctctacaaccttcattatagagacactggcttccacttaaaggataataaaacttctcttacctggaggcagagccttacattccaggatagggaacttcccctcctccctagaaagatctctgaaagaatgtagagaactatctctccatgagtttgcaagtcaaaagtggagaaaagcctcaaagaggctgattttatcttcccagtagagatagatacttagattccaaaaggtgagaatccacaaactcctttcctttttgttcctaaggaaaatgtgtttaccttagggaacaaagcttttccctctcctttgaggagagtctctttcctatatgaattctcaggcttgaggacaactcagcaatgtcgctgtggctactcttattgctgtgagtaaataaagctctgatctttgactagacgaaacctgatgtttcgtctagtatctatttatcatctctatctatgtgcttatttatgactatgcaagtggggtaagatctcacatccatcacagttgcctttttttttttaagagacagggtcttgctatactgcccaggctggtctgaaactcctggcctctagcaatcctcccacattggcctcccaaagtgttggtattacagacatgagctaccttgcctggtcccatcacagtttttgatttgacataatcctcctttaaaaaattggtaaattatgcttgcttcagcatatatatgtgtatatgtgtgtacatatgtatatatacacatgcgtgcatgtatgtatatatgcacatgtgcgtgcacgtatgtatatatgtacatgtgcgtgcacgtatgtgtgtatgcacataktgtgtgtgtgtgtgtgtgtgtgtgtgtgtatttttttgagacagagtctcgttctgttgcccaggctgcagtgcagtggcgtgatctcggcccactgcaagctccgcctcccgggttcacgtcattctcctgcctcagcctcctgagtagctgggactacaggtgcccgccacggcgcccggcttattttttgtatttttaatagagacggggtttcaccgtgttagccaagatggtctcgatctcctgaccttgtgatctgcctgccttggccttccaaagtgctgggattacaggtgtgagccaccgygcccggcctagcatatatattaaaattggatgttacgaagaagattagcatgcctcctgtgaaaggatgacatgctgacgtggaaattcgtgctccatattttttcttaactggtaaattactatttaatagtgaatcacccaacattgtggggtttttttgtttttttgttttttttttttgagacagagcctcactgtgtctcagcctggagtgcagtggcatgatcttggctcactacaacctccacctcctgggttcaagcgattcttctgcctcagccacctgagtagctgggattacaggccggcccatgccaccacacgcaactaatttttgtatttttagtagagatgtggctttgtcatgttgcccaggctagtctggaactcctggcctcaagtgaggcccacctcagtctcccaaagtgctgggactacaggcataagccaccgctctgggcctgtatttctaatatatatatatacaagatcatttatgtagtttactgccaaaaatggaagaaacctcatcatgaagagacatttagaaaacctaaattgatgaacattctaaaaatctatttgtctgtgaagactaagctctgatttttttttttcatcttgcctaaattcctatcttaagggtctggagagtcatggcctacaaactataaattctcatcagatgggtttgatttaaccctatatatcgtgacttactttccaatctgactctggcrtaacattatgtgacaaagaagaaagtcaaaatattttaccccaaaacatgtttctttgccatattttgaaatggccctgcacagctgtcctttggaggggaagattcacatctgtaaagaatctctattaacatagctatatctttttcttccaggccctccgaaccctgaagagatcatcatatatatgtgctgccgaagcgagcactcctgaagagattaactaagagtctagcaccttttaaggtctgaataggaaacatctgtcatctattctctctaagggcagccactataagagttcaaaagaaacttgctcgccacaatctttttttttttttttttttttttttgagatggagtctcactctgttgcccaggctggagtagagtggcaccatcttgtctcactgcaacctccacctcccaggttcaagtgatcctcctgcctcaggccccctagtagctaggattacaggcacgcatcaccatgcctggctaattttttttttttttttgagatggagtttcatgctgttgcccaggctggagtgcaatggcgccatcttgactcactgcaacctccatctcctgggttcaagccattctcctgcctcaacttcccgagtagctgggattacaggcgcctgccaccacgcccagctaatttttgtatttttagtagagaagcggtttcaccatgctggccaggctggtctcgaactcccgacctcaggctatccgcctgcctcggcctcccaaagtgctgggattatagatgtgagccaatgcractggcctaagtgctgggattacgggagtgagccgctgcgcctggcctaagtgctggggtacaggcgtgagccaccaggccagcgaagtctccacaatcttttttttcttttttttttgaggcagagtctccctctgtcaccaggctggattgcagtggcgatctcggctcactgcaacctctgcctcccaggttcaagcaattctcctgcctcagcctcctgagtagctgggactacaggaacgcaccaccaaccccagctaatttttgcatttttggtagagacagggtttctccatgttggccaggatggtctccatctcttgacctcgtgatctgcccacctctgcctcccaaagtgctgggattataggtgtgaacgaccgtgcccagcccccacaatcttttatcttaacctgagcatttcctttctatggatcccaggtctttagacaaactcatccaattgtcaaccagaaaatgtttaaatttacctatagcctggaaggccccccgaccgacgccctcccgcccccgcccccgccgcccctccactgccttatctgctttgagttgtcccgcctttctggaccaaaccaatgtacttcttaaatgtatttgattaatgtctcatgccctccctaaaatgtataaaaccaagctgcacccaaccaccttgggcacatgttctcaggatctcctgagggctgtgtcacagaccatggtcactcatatttggctcagaataaatttctttaaatattttacagagtttgactctttttgacaacactgtgcacttaaaaaaggtcatgtcataaaaaccaagnnnnnnnnnnnnnnnnnnnngagttcaaaagaaacttgctcgccacaatctttttttttttttttttttttttttttttgagatggagtctcactctgttgcccaggctggagtagagtggcaccatcttgtctcactgcaacctccacctcccaggttcaagtgatcctcctgcctcaggccccctagtagctaggattacaggcacgcatcaccatgcctggctaattttttttttttttttgagatggagtttcatgctgttgcccaggctggagtgcaatggcgccatcttgactcactgcaacctccatctcctgggttcaagccattctcctgcctcaacttcccgagtagctgggattacaggcgcctgccaccacgcccagctaatttttgtatttttagtagagaagcggtttcaccatgctggccaggctggtctcgaactcccgacctcaggctatccgcctgcctcagcctcccaaagtgctgggattacaggtgtgagccaccacacccagccaaggaagcctattattttggagtatgattatggacattttcttcacttggcctctgcaatatcattgtatttatttatttatttatttatttatttatttattgagatggagttttgctcttgttgcccaggctggagtgcaatggtgtgatcttggctcacagcaacctctgcctcccgagttcaagccattctcctgcctcagcctccagagtagctgggattacaggcacgcgccaccacgcccggctaattttgtatttttagtagagacagggtttctccatgttggtcaggctggtctcaaactctcgacctcagctgaaccacccgcctcagccacccaaagtgctgggattacatgtgtaagccaccgctcctggccgtctctttttatttattttcatttttttatttttgggacggagtcttgctcttgttgcccaggctggagtgcaatgtcgcgatctcggctcaccgcaacctccacctcccggatttaagcaattcttctgccacagcctcctgagtagctgggactacaggcgcacaacaccacacctggctaattttgcgtttttttgtttgtttgtttttgtttttgtttttttgagacggagtatcgctgtcgcccaggctggagtgcagtggcgtgatctcggctcactgcaagctccgccattctcgtgcctcagcctcccgagtagctgggactacaggcgcccgccaacacgcccggctaattttttgtatttttagtagagacggggtttcaccgtgttagccaggatggtctcgtgatccgcccgcctckgcctcttaaaatgctgggattacaggcgtgagccaccgcgcccggccagggacactttcatcacatatccatatggcttrctctctcatttctattcagataccaccttgacagcggagctgtcccagactacccttgtgtaaagcagtatttccacacccctcccctggactacctgtcctccttacactataataattttctcccataacacctattatcatttctataatagacacattatctatctattgtagtttttgtgtcacccaattaaatgtaaactccttgacagtaaagacttagtttcattcactgatacagccctagacctagaccaacacctgttgtatatactagacactcaaaaaatatgtgttgaatgyatgaatggttatagtatgtaaaaaaatcccacaaaggatttacacagaattgtaaataataactgtattaggttaagaaccttggaaaataaagaacaaggtcatatagagcgggtatgtggaggatttttagttccatggaaaagtcgccccagtcagcagtgagggaggaagttgaatagttggttctcggacatgagataagagaatgaaaaccgaattatgtttcggccgtaagactaccagatctccagtaagtcaagaacactggaagctggccaaaaaggtgggtaaagggccccacacaatgggacttcccgggcatgtcctggttactgtagaagtgtctcctcctcaaggcaatgttataacgacaagtgagggaaatagtcaacaagggctgcaaagcacgttggtctaattagtgcccccttgcctagagatctggggagaagtctgaggagggagtatccaaagatgacataacctgagtgcagattttcaattgtaagtgaaaagtgagctgagcctgtgctcaaggacttcctgcgtgctgagcacccatgctgagcactctctctcactagcttgctgattggggtttgggtttataaatttcatgttttactcaccaacactaactcattttatacttcaatcgaaacagaatgtgtgagtccaggcgcggtggctcatgcctataatcccagcactttgggaggcagaggcaggcagatggcttgagctcaggcgttgtagaccagcctgggcaatgcagcgaaacaccatcttcaccaaaaatacaaaaatattagccaggtatggtggcatgtgcctgtagtaccagctactctggaggctaaggtaggaggattgcttgagcccaggaagatgagggtgcagtgagccaagatcgcgccactgcactccacccagactctgtctcaaaaaaaaaaaaaaagtgggttttttttttctggaaggaaatagaacatattctctaatattctctaagtggtttgtgtgctttggcacacaaaagaatgaaatgacgatggcctttctcactggttggtttgctgttcccgcagttagaagagactgcccacatagggagagtggcacagaggagagtaacatcaatcaacagcgaatatgcacttgatcgcggtctaatcagcaccaggcacctcagggcagcagtattgtcagacgcattggaaccagagggactccatcttgaataaggtctgggtaaaatraggctaacacctactgggctgcattcccaggaggttaagcattcttagtcacaggacaagataggtcagcaggacaagatagaggtcataaagaccctgctgataaaayaatgccataaagaaggcagccaaaacctgccaaaaccaaggtggtgatgaaagtgacctctagttgtcctcactgctcactatacgctaattataatgcattagcatactcaaagacactcccagcagcaccacgacagtttacaaacgccatggcaacattaggaagttaccctatatggtctaaaaggggaggaaccctcagttagggtaaatccctgcccttttcctggaaaactcatgaatgatccaccccttgtttaacatataatcaagaaataactatacgtgtactcagttgaacatcccgtgccactgctctgcctatggagtagccattcttttattcttttacttctctaataaacttgctttcactttactttatgaactcgccccaaattctttcttgtgcaggatccagaaccttctcttggggtctggattgggacmcctttcctgtaacagtattagtcataactattatctgaaaaagtatatttatatggtactttacaaattcaattttgcacaatagactctgacttatgtcattctcacaatcaccccataatgtcaatcctcccatttcacaataaagaaattgaggctcaggctggagacggtggcccacacttataatcccagcactttgggaggctgargcartgggatcatttgaggatcggagtttgaaaccagcatgggcaacatggtgagattccagttctacaaaaaaaaaaaatgtttttggccgggcgcggtggctcacacctgtaatcccagcactttgggaggccgaggygggtggatcacgaggtcaggagatcgagaccatcctggctaacatggtgaaaccccgtctctactaaaaatacagaaaactagccgggcatggtggygggcacctgtagtcccagctacgcaggaggctgaggtaggagaatggcawgaacccgggacgcggagcttgcagtgagccaagattgcaccaccacactccagcctgggcaacagagygagactccatctcaaaaaaaaaaaattgtttttaattagttgggcttggtggggcgattctagtcccaggtacaagggacactgaggcaggaggattgcttgagcccaggagtttggggctgctgcagtgagccgagatcacaccattgcactttagcctgagtgacagaatgagaccctgtctcaaaaaaaraaaaaagaaaagaagaagaagaagaagaaattgaggctcaaggaggttagggtgaattgctcaaagccattctgatgtgacckacacctagagtgaacatatgtcctgatgtgtccaggacagcctcagtttatgcctgcctattgtcctggtgtaattattaatagcaccttttcactccccggagtatcctggttggatagtaaattatatggtcactctaccaaaacctgtttctttcattcacttaaatccaatcttttatttcattactgccttatttcctccacttaggcagcttcaggatgattataacagctgaaaaggctggcttcagaccatggtatcacttctatgagagaggacatttcaagttgcaaacaaacaattcaaccagtgacttttaaatttgaaaactaccagtatagtacggcagtgaagagatcagggtctgaatctccattagcatagacattattcaaaatgtcaggcctgagaaggagctaaaaaacggcctgtcttgggggaagaaacggcaagaattttatcgaacttcagctggagtgggagaggggactgtcagccagaatgcggctagtttggggaagagttggtcaaagagattcttgaaagagggaggaattgttgttgcagatgagcagccactgtttgggcactttggattgatcagcctggacaggaggaacagttaggggctaagatcctgcacaggaagaggtggaaggaacaactacaggcaaaggggacctgcaggggaaaatgttccatgtggaaaatgctaggacttcagggtctcttaggttagttaactcttctgagcctcattttcctcatctgtaaaatgaggatgttaacwgtttaaggttgattctgaggatggaatgtactcagtacataagtgttcagcaaacagtagtagctcttattgtttgagtctcttccccgccttgtgcccctagtgtagtagtaagggtacggattttcttttttttgtttgtttttgtttttgtttttggaggagtctcgctcagtcgcccaggctgaagtgcagtggcgcgatctccgctcactgcaagctccgcctcccgggttcacgtcattctcctgcctcagcctcccgagtagctgggacyacaggcgcctgctaccatgcccacctatttttttttgtatttttagtagagacggcgtttcaccgtgttagccaggatggtctccatctcctgacctcgtgatccgcccgcctcggcctcccaaagtgctgggattacaggcgtgagccaccgcccggctgggtacggattttctttacgctgtatataaaagtctgagaaactatcaattgyttataataaagaatgaaaactccaaaggcatctggggtgaggttgagggtctgcacagagattatgggggaaggggacgtccaaagctgtcattggattcaggcactcaacagattggaacacagtgtagagatttatggtagtgtgaaggtgctttatttgttatgaattactcagagattttactatattttaacctggggcggggaacccttcctttttttgcccttttgaaaataaggtagatttcttcagatgtggaaagtatcaatggtcaatccaatagcttttcgttattttatttttttatttttggaggcaaagtctcactctgttaccctggctggagtgcagtagtgcaatctgggctcattgcaacatttgcctcctaggttcaagcaagtctcctgcctcagcctcccgagtagctgggactacaggcgtatgccaccacgcttggctaatttttgtatttttagtagagacaggttttgccatgttggccaggctcgtctcaaactcctgacctcgtgatccacctgcctcggcctcccagtgctaccattacaggcggagccaccacacctggctcactttgtggcatatttctagaagttaaaaaactcacctgacaaaagagatactttgtggccaggcacggtggctcactcctgtaatcccagcactttgggaggctgaagtgggtggatcacttcacgtcaggagttcgagaccagcctggcgaaaatggtaaaacccccrtctctactaaaaatacaaaaattagccaggtgtggtggcaggcacctgtaatcccagctacttgggaggctgagacaggagaattgcttgaacctgggaggtggaggtttcagcgagacgagatcgtgccattgcactccagcctgggtgaggacagtgaaactccatctccmaaaaaacaaaaaaaaaaaaaaaaaaagagagagagagagaaactttatgatttactccatggaacaaatatcatatagaactgtaacatttaaaagtcagatttctgtttctaaactttaggtttatacctcttggcagatgactagatgattctttccccattccaagagtaacagatattcagccaacttgtgtgtgtgtttatcacatgtgattccacatttcagtttgtttctctatattttttgtattttaaattggacaagtattacttttataataagaaaaaagataattactaaaaataaatgagaaatacatatacatgtagaatttgcatagtgtcaagtaaatgataagggtagaaagagtgcagagaaaaaaaggatgaaaacgaaggtggctgaagaatgctttgtgamggaggtgggattgaaatgagctttgaaaggmcgggtgcagtggctcacacctgtaatcccagtaatttgggaggctgcggcgggcggatcacctgaggtcaggagtttgagaccagcctggccaacatggtgaaactccgtctctactaaaaatacaaaaattaaccaggtgtggtggcaggcgcctgtaatyccagctactctggaggctgaggcaggagaatmgctsgaacctgggaggtggaggttgtagtgaaccgaaatcacgccactgcactccagcctgggcaacaaagcgagactccgtctcaaaaaacaaaacaacaacaaaaaacgaaacaccgaaatgggctttgaagaatggaagggatgcagataaaagagaggagggcgcagagcggtttggtcgttcgttggaccagtgtcggttcttcgctcgcgactgcggctcttcctcgggcagcggaagcagcgcggaggtcggagaagtggcctaaaacttcggcgttgggtgaaagaaaatggcccgaaccaagcagactgctcgtaaatccaccrgtgggaaagccccccgcaaacagctggccacgaaagctgccaggaaaagcaccccctctacctrcggggtgaagcctcmtcgctacaggcctgggaccgtggcgcttcgagagattcgtcgttatcagaagtcgaccgagctgctcatccggaagctgcccttccagaggttggtgagggagatcgcgcaggatttcaacactgacctgaggtttcagagcgcagccgtcggtgcgctgcaggaggctagcgaagcgtacctggtgggtctgttggaagatactaacctgtgtgccatccacgctaagagagtcaccatcatgcccaaagacatccagttggctcgccggatacggggagagagagcttaagkgaaggcagtttttatggcattttgtagtaaattctgtaaaatactttggtttaattggtgactttttttgtaagaaattgtttatatgttgcatttgtacttaagtcattccatctttcactcaggatgaatgcgaaaagtgactgtttacagacctcagtgatgtcagcactgttgctcaggagtgacaagttgttaatatgcaaaacggatgcrtgatatttcttgcttctcatgatgcatgtttctgtatgttaatgacttgttgggtagctattaaggtactagaattgataaatgtgtacaacagggtccttttgcaataaaactggttatgacttgatccaagtgtttaacarttggggctgttaagtctgaccatacatcactgtgatagaatgtaggctttttcaagggtgaagatacaaaccttaaccacagtgtaacttatagtttcctttaaaaaaaaaaaattaaacctggcagctatagaatacaatatgtgcatttataatagctattttatatattgtagtgtcaacattttcaaattaaatgttttacattcacaagtggtggggagtcttgtcattaaggtgtgtgtaatttagagtccagttggttttcttctgactgcacttgttctcatagtagtaaaatgctatgtgcatttataccttgcataaatcctcattctaccacatgttaactaaccctctagctgataatggaaacactaactgggggattttatttataagggctctagaaaaaaatatgagttattcacaccagcatcatctgttaactaatattctgaactagtgcagcttttcattgtgttgtgtggttggtctcataactaggttgagttttctcctctgctaagaggaaacagtactgaagttctttttcttgtggcatttgtattataaaaacttggtgtaggggaggagcacaaagctctagcccactgaacctctgcyggttaagatggtgttaggttaggttacatctggttactgtcctgggaaaatcatttttatagagatggccttccaagtggttttaaaatttatcttattgaagtttttaggtcaattatgtatgttgactaaatttacaaataaacttgtttatccaaaaaaaaaaaaagagaggaaaagaatcagaaatattggagagtagaaatgcaacagaagagaactataaagtttatgttgggggaaaacaattagtttgtctcaagtgtagtatttacgcaaaggagaaaactttagggatgtagggcccacattgtaaagagcttggaattaggatttaaggaattttatactctatcctgcaaaattcacagacaaatttgagaactgactagcattttaacttgcaaaaaaagacaagttagtacagaactagcacatctaatttttaaaaaagtatttgaactataacatggtgaaatccygtctctattaaaaatacaaaaattagctggatgtggtggtgggcgcctgtaatcccagctactgtcaaggctgaggcaggagaattgcctgaacccaggaagtggaggttgcagtgagccgaaatcgcaccattgcactccagcctgggtgtcaagagcaagactgtctaaaaaaaaaaaaaatcacaaagtcaggagatagctcagattgttatatattagtcaacaattctgattggataactttggggtcagtcttgataaaaagaaaaacagtatgtttctgtcttttgcataaaaaataacttcacggcttatcttggaattcaaagcttttgaaatatttctggttttcgtggcttatcttagagtgcaaagcttttaggaatgtcagccttttccagactatggtacaggatgggcttgattagtcgayatagtgggcatgatattcgttttacagactagagttcacactaaatggccataggctcccatagggccaccaggtagagttgtgcagattgtataggctgtgcactgcacaactttttatgttatgtgcacagtgccctctggagttataaaatgcaaagtcggctggacgtggtggctctcgcctgcaatcccagcactttgggaggccgaggcaggcagatcacaaggtcaggagttcgagaccagcctggccaacatggtgaaaccccatctctactaaaatacaaaaattagctgggcgtggtggcatgcgcctgtcatcccagctactcaggaggctgaggcaggagaatcgtttgaacccaggaggtggaggttgcagtgagccgagatcgtgccattgcactccagcctgggagacagagcaagactctgtctcagaaaaaaaaaaaaaaaaaaaagcaaagtctactcagccatacctggaagcctagacgccaggcaggtaacacaaatcagtgaaacctggggccctttgaaaggattccagcaaatttaaaaataatggtcagagcactgtggagttgtagaaaaacaaatttgcagactatgttcagccttggagctcaagtttgggacctctgccatataaggtagaggcagtcaatatttttgtcaaggtaatgatgcaaagagatatgtaaaatagattaccatagagaaaagaggctacaaagaaataaaaaagtcagaaaagtacttcaataatctgggctgaggaaacaggggcctggccgggccagaactatgtggatagacatagaaagaaaagaattagtagaatttagtgatcagattcaggtttgattctgaaccaaatcaattcagacttgatttctcataagacaaaaaaaaaaaaaaaagaaagggagaccagagtaatgcaaggttttgaacttgggtccttaggaaaayacctggaagaaaaatatttaccttggaaataatttcagattaaaaaataatcttttgaccgggtgtggtggctcacgcctgtaatcccggcactttgggaggccgaggcaggcagatcatgaggtcaggagatggagaccatcctggctaacatggtgaaaccccgtctctaccaaaaacacaaaaaatcagctgggcgtggtggyggatgcctgtagtcccagctactcgggaggccaaggcagtagaatggtgtgaactcaygaggcggagcttgtagtgagccaagatcgcaccactgcactccagcctggtcaacagagtgagactcagtctcaaaaaaaaaaaaaaaaaaaaaaacttttaggataggatagtaaaaatcatgttttgaaagcttatgtaatgctggccgggcayggtggctcacgcatgttgggaggctgaggcaggcggatcacttgaggtcaggagttcgagaccaacctggccaacatggygaaaccttatctctactaaaaatacaaaaattagccaggcttggtagtgggcgcctgtaatcctagctactggggaggctgaggcaggagaatcacttgaaccygggaggcagaggctgcagtgagcagagatcgagccactacactccagcctgggcaataaagtgagacaccatcttaaaaaaaaagaaaaaagcgctgggagcagtggctcacctctgtaatcccagcactttgggaggccraggtgggcggatcatgaggtcaggagatcgggaccatcctggctaacacagtgaaatcccatctctactaaaaatacaaaaaattagccggatgtggtggcgggcacctgtagtcccagctactcgggaggctgaggcgggagaatggygtgaacccaggcggcggagcttgyagtgagcygagattgtgccactgcactccagactgggtgacagagtgagactctgtctcaaaaaaaaaaaaagaaaagaaaaaagcttatgtaatgctatggcactgctcataataaaaaaaatgtgagaaaaaagcagacaagaggaagacaaaaattggaaaaaaaactatgcaaaaacattaacaaaatgttatcctcagcaatgtgattgtaagttataaaaattttcttccttrtacttgtactatgtttccaaactttctacaatgaatgttatatttaaaaatagaaaaaaatacttttaaagatcctagaggcttcccttttacagaaaccataaattcaaccttcattattttgtttttgtggtaaccatttgtgacagtaagtgctaacaggcttggctttttggttttggaaaaattggtccttgtgtactaaatagaaagtccttgtaatctcgaggagataaagatttaatgttgcctagtgatacagatttgttttaggcattattttcttattcaaaaactaacttcaattgttttaatgatttttagaaaagatggttttcctttttttttttttttgagatggagtctcgctctgtcgcccaggctggagtgcagtggcgtgatcttggctcactgcaacctccaccccccgggttcaagcaattctgtgcctcagcctcccaagtagctgggattacaggcacctgccaccatgcccagctaatttttgtatttttagtagagatggggtttcaccatctctgccaggctggtcttgaacttctgatctcgtgatctaccctcctcggcttcccaagacgctgggattacaggtgtgagccactgcgcccggcctctttttttggaattagctgttagcccttcccaagttgtattcatagcttaaagcctatctaagcttttgccaagaacataaagatttaagcaaaacggaatgataacagtattattctgtttaaggccgggcatggtggctcacatctgtaatcccagcactttaggaggctgaggtgattggatcatctgaggtcaggagttccagatcagcctagccaacatggtgaaatcccatctctactaaaatataaaaattagctgggtgtggtggtgcatgcctgtaatcccagctactcgggaggctgaggcgggagaatggcgtgaacccaggcggcggaggctgagacatgagaatcacttgaaaaggaggcagaggttgcagtgagccaagatcgcgccactgcactccagcttgggtgagagtgagactctgtctcaaaaaagaaaaaaaaaaagaaaagaaaaaagaaaaaattctgcttatagcagtgtaaagttttaaaagatggcttcacataggcctggcacagtggctcatgcctataatcccagcactttgggaggctgaggcgagtggatcwcctgaggtcaggagttcgagaccaggctgaccaacatggtgaaaccctgcatctactaaaaatacaaaattagctggacatgatggcgcatgcctgtaatcccagatattcgggaggctgaggcagaagaattgcttgaaccagggaggtggagrttgcagtaagccaagatcgtgccattgcactccagcctggacaagagtgaaactccatctaaaaaaaaaaaatggcttcacatatatttgatgccaggctcatttgacctttaagaagaaaaacaggatgtaattacagcagatttttttcagctctattttgtggagaagacattaaggctcacagaggtaaagtctcttgctcagtatcacagagttatcaaatggtaaagcaagaatttaaatcaaggtctttcaagtagtacaatttttcttacacacgattaattgaaaaccatgaggactgtccttggcccacaggattggatctccttgctgtgctgacagctggatctgttcatcaactcaccacctttgtccagccccatgacctggtcaaacctcaggctatcaatgtggtacagcggctccagtacccagtaaaacccaaaatacaacaaaggagaacagaaggtagctaacaactctaatttctttaacgcgcatttggtattttaaactttgcaccatggtttccacacaagtccttcttcaaaagaatacaagagtcaaagtctgagataaataatgaaaattatagaaaattttacaagtttgatgtaatagttcacattccaccagcagaataattttttctgtgtgaaaatcttgtacttatcataaatggttaaattacgggagcacagttcctgataacctgaagcagaacttgaagaattagcttcagttccacatggttacaggctcaaaattagttttcccttcatacttcttttatattatcctatttggcagttatgctcacttgctgcaggaatttctcattgttctgtgatcaggggtattcatttgttttaactcatgctatacagttcgtcatgcacacatgatttttactttgaatataattttggctggatacattctcacactgttcttcacacatgcttgggttttttgtatgtatcattttcttctgacaagatgattaacttctcatgtatactgtttgggtatttgtttatacttttatgctattacccatacttctttgctcagtaaacccttcttactagataacttggatatactagcaaatagctcatttatcaccctactaatcactttaaaagcarcattgctttctataaagttaatactaatgtcacatacaataaatatttatcaaatgaatgattaaatggatatcagctaagaaaataggtattatagccaactttgaggatgttacaaaaagtaggaaattctaattttatatatgtatttatatataaatatatacattcatgtaaacatatatttatttaaagacatatatttaaataaatatatgtattttggagagagggaattttgctatgttgcccaggctagtcttgaactcctggcctcaagcaatccttccacctcagcctccctaagtgctgggatgttaggcgtgagccactacatccagcctaaaatattttttgatgagcaataaaaatggcttaagtctagttgtaacttagaatttgaaatattttaagataccaagcctaagcaataaagggtaaacttgaagaacaagattttacaaaaatgaccctacatggtaacttctcagaggaagcagtctaccttcctgttcaaagccaatccctcctgtattatctatttctatataacaaattacccagacttcacagcttaaaacaacaaatgtctattacctcacaccatttcggatttgaggaatctgggagcaacatggcagagtggttctggctcagaatgtctcatgagagttacagccagatgtcaaccagggctgccattgtctgaaggcttaactgaactggaggattcccttccaagctccctcacacggttgttggcaagaagccttagttcctcaccatatgtgcttccccacagatggcagctggcttcccccagagcaaatgatcagggaagagagagaaagcaagcgaaagtcaccaagacagaagccacagtatattttataacctaatctcagaaatgacatagtgccatttctgccacattcaattagtcactcagaccattgtgggaggggctgacaaaagggcatgactaccaggaggaaggatcattggtggccatcttggaggctgactaccaaacttcccttgtattctttatgatcttctcccatctcttcaggaactttgctgcatccattaccctcttgctcttacagtttaactaattcctctttactagttctcctatcttggttctggatactctgaaactatattctgaggtttcactctatacttcttgttttccttgactctcttttgccttgactagtgtgacaccattcttccctggcttttatccactgctgaccttcttcctttagctctctataaatgttggtatttttgacaatttagtcctcatctcttttttcttattctaaacactctccctttctttttctatgtcattgcccttagctgccatctgtatgctgatgacttcaaaatgcaaattcctagatttgttctctttttttagttccattattatatccaattccttgctcaagagtctgaaagtcccacaggtttcccaactgatagctgtgttggttctgtttgaggggattgattacttctgggagcttttgattaggaatagaaacattttttaataacagtattccaggccggatgtggtggctcatccctataatcctaacacttttggaggctgaggtgggaggatcacttcgggccaggagttccagaccagtctgggcaacagagggtgactccatctctacaaataaataaacgaacaaatattttaaaaagtatgtaactccaaaatgagttgcatctatttggtacaatccctagggcaaaggcaagatggaatgtggaaacagcaaaagtttcccttttttttcagaggacgccactgatatgtgcaccaaaccattatttatagttttagctcatcataaaagcagaaggctcaccctaattaccagtttatgcagaaaatataaaagagctgcgcccagcctcataatccacttctgtctgccagcaccttcttcagatacttcatggtgcctatcccaagactcagaaccttaccaaatccactcctacgcaaattgttcaagaccaactcctccctggaatgctctagatttcagacctaaatttctcctaaaccaatgttatgaaaccaagttctaagagctgtgtcccccagggtgtctctagcatagacactctacatcctgcagctattgtccccacatttctatgatgtaactgtgctgtgagcaagagttcataatgcagtacaacatttgcatataatgcaataattatgcactaaatattataattatggaataacatcattaggcccaatcacaagctacatgcagcagtagcctgctcatacacatacaatatcagaaactgttttcacttgcaagtcgatattgaagcggtaaagtttccctgtccccctcgcagagcatgcaatgggggtgtggctcacttcttcagtgcctggctgctcagacctctaggggagcatacagacrggcaggctgtggggctccgaccccacggcagtgtctaggggtgaatgtttacggctcctgaagccccagtgggcatgttacaggatgcttttagtttaccgtcttgtgttaaccagctcaattagaccctctaccttgttgcaaggacagagagctttctgtatcccgggttcttgccttggtgtagtggaagactcggatcacacgtggacttggaaaatgagtgcaaagttttactgagcgggagcagctctcagccgatggaggagccagaagggagatagtcttcccctggagttgggccactgggcagccctggctctcctccgactgtcccggccaaactgcacctcctcccgcctgccggtggcgtcccaccagtcgatggcctgccgacgtgctggtgcctgctggtatgctggtgcctgctgatatgcttttctcctggtgtgctcctttcaacgaccagccacttgcatcttcttccaccaacgccttcctcacaatgtccagccactgtgtctgcctgccagggtctctggtttttacaggcccaggatgggggcgtggcaggccaggatggtcttgggaaatgcaacatttgggccggaaatgcctgtcctcacctaggtccgtgggggtggagccctaggcagggaccacacctttctctatccagcacttcccttcctcccttttgtattgtttaaagggaccacaatcttccctttccagcactccagtatcaaaatgtatccttaatcaggaacaaaacctgatgtcaggtggatagatgtttcctcttattcaagctatgaaccttattttcaccagtraaatgattggcattgagattgagcactcagaacttctccacatgcttgaatctctagagcctcaatggtcaggctgatgaaatcatttctgtacttcaaacccatctaagtggaagaggctgcctagaagccagttagtagtgccacagttctaragtttaaaactggtcggggaccacaagaagaaacacatttcatccaaggaaacatccctcccctcccctgccttcccctcccctcccctccgctgccctaccctgcccttctttttttctttctttcaactatagaggtgaggtctcactgtattgcccaggttggtatcaagctcytgggctcaagcgatccaccagcctcacccagtcaaagtgctgggactacagatgtgtgccaccacgctctgctagaaacgtgggtttctaaacgttaaaaattttcggcctgacgcggtggctcaggcgtgtaatcccagcactttgggagtccgaggcaggcggatcacctgaggtcaggagtttgagaccaacctggccaacatggtgaaaccccgtctctactaaaaatacaaaaattagccaggcgtggtgtcaggtgcctgtaatcccagctacttggggaggctgagacaggagaatcgcttgaacccaggaggtggagattgcagtgagccgagatcgcgccattatgctccagcctaggggacaagagcgagacttcgtctcaaaaaaaaaaaaaaaaaaaaattcaggggacagccatggtggctcacacctgtaatcccagcactttgggaagccaaggcaggcggatcacttgaggtcaggagctcaagaccagcttggccaacatggtgagacccccccatttctactaaaaatacaaaatattagccagacatggtggtttacacctgtaatcccaattactcgggaggctgaggcaggagaatagcttgaacccaggaggtggaggttgtagtgagccgagattgcaccactgcactccagcctgggcaacagagcgagaatccatctcaaatagataaataaataaatttaaaaataaatataataaaattaatttttaaacaggaagaaaaattgaaatatttgtactgagaaaaatgccatgtccaacaaacttaatgctagtcctagattgtttaggtagctttataaaggcagggaggaaggaagggaaagaaagagggtaaaaagaaaaaatacataaaggaggcctccttatccagaaatcaatgagaaaggttggaggctttggttctggataccccaaaactatcttttcaagttgatcaacattctttcatctcatagtgctactttatatatattgagattgcagaaatttatggctgatatgtttgtagtttggtatgttgagaatgctttcataattaagacatacatacattttttgtagatgcatgtaatctcgatgtttgaacgtttgaatgattgactgaaaagaagacacaaacaatttcaaacagtgtctctggtaccaggacaaaccaggaacattctgatcctagagttgtttaaacaaagactggagagtactgccttctttggcrtaccagaacccacagtaaagtggtaaattactgtgtaaccagatgggaccttcaagtccaacactatcaaattataaagaagaatttcagtagcagctcggattacaacctcactcactccactgagccactstgagtattgcaaaacacttataggatgcaggtattggtaaggcgattctaatcaatgtcctaatgtgttttttcaaaagtgtattcttgcaaacctagttttaagacatcatgaccctggcatgaatcacaagatcaaaaaagccttctgagattctgcaaacatggtatctctatctccttgatgttcacctgtaacattccagacaggctgttgagattgaggtagagatagagtgggcagcctgaagaaaattgtaaatgtttgtaaaaccctccgaggggatttggtgaagcagatggcccagaccaaataaaaagactgccaagctgtgttggaggttcacctgattttagagggcatggatttattgtggctattgcatactagaccccttgagtttcttttcacatttgctcctcatgacatcttaatatgtaaatataattttcctgattatgcaggatttaaatcactaatacaagctgccaccgctagttagggttttgtagttgcaaacaacagcaaatcacttttatcacaagataaaagggatttcattggaaaaatatgtggaaacaagaggggcaaaacaaagggggaggttaatgaaccaatatgtaaaaaacaaaaccaaagcatttcacaggcctcagtagtagaaatgaatagattgattatttaggacatagctgcctgtatattgcttaatatctttggatcactccaccccagagtccaattccagagagaggggatggtggggagacactgtctggcttagctagagkcatattcttagttggggagctgcctccaagactggaatacagcatggtgcagattaagatggttttgccaaagaaaggaggctggataatggtgagcaaaaatgagcatatgtccactgcagatcacatatttgtcagatgtgaaacctaatgttatatgttctttagctaggtctgttgtcgtctggatgattatagcacaagtgaaacagaagactaagagatttgaaggcgttaatgctggaaatagtgatggatagtcactatatttctgagctagggaagaaaatgaggccagaagataatttggaaaccaggagaactgagacaaggtgggtttaaatcaagtttagcttaaagctgccttctcacatgtttaagtttggcctacaggtttttctgtacatcatgaactgtaaaaagtggaggtatacagcccacatccgtgccaatcactgagttttggccaatcaaatgtagccaaatgttcaaactgtgttcaagtaaggcaaatgccaagctgtaaccaatccagttgtttctgtacttcacttctgttttctgttcgtcactttcattttgctgtccataaatcttcttccaccaggtagctacgctggattcactacgaatctgctgtgattctgggggttgccctattcgcaaattgttcattgtttagctaaacttctttacatttaactcagctgaagtttttttcttttaacagtggtaagaaatttctaagaatcttctgagatttttttttttttttgagacagagtctccctctttttgagacattgtttcaccatgttggccaggctggactcgaactcctgacctcaagtgattcgcctgcctcggcctcccaaaatgctgggattacaggagtgagccattatgcctggccgaatcttctgagattatgccagaaattattattatattttttgagatggagtttcgcccttttgcccaggctggagtgaagtggcrtgatcttggcttactgcaacctctgtgcccaggttcaagcaattctcctgcctcagcttcccaagtagctgggactacaggtgcccaccaccactcctggctaatttttgtatttttagtagagttggggtttcaccatgttggccaggctggtctcgaactcctgacctcaggtgacccacccgcctyggcctcccaacgtgctaggattacaggcgtaagccaccatgcccggcctattatgccagaaattctatgatgtaaaccaagcaagaggcatgccatgagaaattgaggtgctatgaagggtcatcaaagagcaaataaagttccaattgtgttttagtttcatgtatttatttatttaaaatagaaccagggccgggcgcggtggctcatgtctgtaatcccagcactttgggaggccgaggcaggaggatcacgaggtcaggagatcaagaccagccagaccaacatggtgaaaccccgtctgtactaaaaatacaaaaaattagctgggcrtggtagcaggcgcctgtagtctcagctactcggaaggctgaggcagcagaatggcgtgaacctgggtggcrgagcttgtagtgagctgagatcgcaccactgcactccagcctggatgacagagccagactccatctcaaaaaaaaataataataaataaaataaaataaataaataaataaataaaatagagccaggtacagtggctcactcytataatcccagcactttgggaggctgaggctttagcccagaagtttgagaccagcctgggaaatatagcgagaccctgtctgtgtaaaaaaagtttttaaattaaattagcccggcacggtgggacatgcctatagttccagctactctagaggctgagataggaggatcacttatacccaggagattgaggctgcagtgaggtatgttcacgccactgcattccagtctgggcgacagagcaagaccctgtctcaaatgaatagaatagaatagaatagaatagaatagaatagaatagaataggccatactgtcatttatttatttattttttttgaaaatacagatgggagccgggcatggtggctcatgcctgtaatcccaacactttgggaggccaaggtgggaaggtcccctgaggtcagtagttcaagaccagcctggccaacatggtgacacaccatctttactaaaaatacaaaaattagctgggagtggtggtatacacctgtagtcccagcccctcaggaggctgaggcaggagaatcacttgaactcaggaggcaaaggttgcagtgagccaagatcccaccgctgcactccagcctgggtgacaaggcaagactctgtctccaaaaaaaaaaaaaacaaaacagacagggtctcactaagttagccacacaggtctctaactactggcctcaagcaatcctcctgccttagtctctcaaagtgctaggattataggcatgacccactatgcccagccatttttatgagacggggtctggctttgttgccctgactggagtgcagtgacacaatctaagctcgctgcaatgtctgcctcttgggctcaaaccatccttccatctcagcctcctgaatagctgggactacagctgtgcgccaccacgcccagctaattttttttgtatttttggtagagatggggttttcccatgttgcccaggctggtctcaaactcctggccttaagtgatcctctcgccttggcctcccaaagaccaaggattacaggcacacctgggattacactgttcaaccactggctcaagaaaagcagaaagtcttctcaatggctcaaaattcattttatgttcaatgacaggccttctgcaaattgagactctgagctcgttagggtagtgactgtaattcttcctagacacagaaggccaacagggtgattgtcacaacagcactgagcaaaagccattacatattagtagccaatgagaatcaagattcaggaccctgcagaggagagcactctcatatgccagcaagcagagtggtggaaggggagcttgggtgcatgctcatccattacagccagtgggaggctctgaagtctaagtaagatgaagacgcactgctgtactggttggcacctaggcagtaagtaacaattcactagataaaattttaggtggaactacagatttgaaaagttctgggatgcaatataatatctatgggagcattgctattaacatgaaaagtcagtatcttgaaaacaagtagggtcccctcccctggaatattgaagagatatgaagactgtatcttcaagtacctgaggggagacctaatacaacgagttctgtgactttctgccagacccggtgcagggaatccatgaactggtcaggcctcctgctctgcttggggacccatagccagaaaatgtgctttaggttctaatacagtcagaattacattaattatttggtttactgaaaactcaggccaggtgcagtggtttacatctgtaatcccaacgctttgggaagckgaggctggaggattgcttgagcccaggagttgaagactagcctgggcaacatagggagacccccgtctctataaaaaataaaaaattagctgggcatggtggtgtgcacctgtagttccagctcctcgggaagctgaggtgggagcatcccttgatcccgatcccaggaggttgaggctgcagtgagctataatcacaccactgcactccaacctgggttggagactctggaaaataaaaatataaagagagagagagagaragaaagaaagaaagatagattaaaaaagaaagaaagaaagaaagaaagaaagaaagaaagaaagaaagaaagaaagaaagaaagaaagaaaraacttaagcaagagggagacaggtcattaccatagcctttttttttttttttttttaaatctgggacagagtctccctccgactcccaggctggagtgcagtggtgtgatctcagcttactgcaatctttgcctcccgagtcaagcaattctcctgccacagactcccaagtagctgggatgtcttgctctgtcgcccaggctggagtgcaatggcacaatctcagctcatttcaacctccgcctaccgggttcaagcagttctcctgccttagcctcccaagtagctgggatgacaggcatgcaacaccaaatctggctaaattttgtatttttagtagagacagggtttctccatgttggccaggctggtctcgaactcccgacctcaggcgatctgcccacctcagcctcccaaagtgctgggattacaggcttgagccaccgtgctggtccctgtcataactattaaaacaaaaaacaaaaaacagctactcaagatacttgatagctttttgttgagcaaaggaaaaatgaaaactctattgatgatggcatttataaataagaatgtctgaagattattttatgaactgacattattttttcttcccatcccttcttcccaaagaactgccctttatgactccagggaatgccctcaaacaagagtgctagcagaaacctagaggcaaactgtcttaggttccaaaagatagcctgactggtaaaagaaattgaaaacaggtgttttcatttgctttgtattaaaagaattgaaaggccgggcrcgatggctcatgcctgtaatcccagcactttgggaggctgaggcgggcagatcacaaggtcaggagatggagaccatcctggctaacacgatgataccctctctctactaaaaatacaaaaaattagccaggcgtggtggcaggcacctgtaatcccagctactcgggaggctgaggcaggagaactgcttgaacccaggaggcggaggttgcaatgagctgagatcgtgccattgcactccagcctgggcgacagagcaagactccatctcaaaaataaaaataaaaaaaggaaactatctcagaggaaatttgccatttatgagaaaagtagagcgtagttaaaatgaatcttctgagttatggggaagaacagtatctccatctcttatgtttccagatgcagcaacttcaggtaggtgagtggctttctacctcactgcacattggttccctgggtggctttgaactgtgagattggctgagaatcactgagtatctccctgttcctcattcgcccctccccagggaaataggagtgagcagtcagacatgtgagttagtaagaacagactgagctcagcccttcctccacctttctagacctgtgtgttacagggagtggatctgcttcctatgaccctgcctttgctgagaagcctgtgttgttcagctgtgccagcaaccaggcggggatgtctggggaaagtgtgagcctgcccacttggccacatcttccagttgactttattaaggtgatattttgatgctcacttatcctgactcctgtatttctctcaattgattctgaattcaagaggaagaaagatactctgaattcaagaggaagaaagatactctgaattcaagaggaagaaagaaagataaatatattagcccaccaaggaaggaatttttggctggtctaaacttttgccccagacccagggaccctggggatatgaccttagatttaccttcttgccactctgctccccagaatgtattgatacaagataaacttggaatgttagcaggtcagattgcccctggcttacagaagcattcattgtgaaacccctgattgatgagttgcagctgccctgttaggcatgtgatttagcactttctcccagaggctatgcagcaagcatggactacacataggtagagaatggaaagggtggctgcccagaggtcaagtcttctgcacrcgcttcagcctcacctcttgcagctgagcatgctgtgtggtggaggggcatggaagctgcacccagcattgccagacatcagaaggtctctgctgtttagctgtgtgcattgtttaccgtgtaccttttaaggctaagtaaactgtgacttgtgagtcttttttttaaaaatcaattttgatcttaggactaacagatattgagtaacatgtatagcaaatagtccactaaattcctacacctgagtcctgcccttcaataattggattattaaagttgtttgttcaatcacttacttgtagtcaattctgtaggttagctcacctgtcactcattccaactcttatttcaattttccttccttctttagagaaggaggaaagctaaaaacttcccttctcagatttccttgtagctaggggtggtcccatgactcaattctggctaacaaaatgtaagctgaattttgctggtactgcctcttccatttcttttttcctgcctggaaccggtgaggatgcctgaggctcagcagtcattgctaagcatggtagtgatcaggacactaggggtcagtttccttgctggcattgttgaggccatcacaatcagccttgagcttcccgttcccagatttcctgctataggagacagagagatcccttacttgtttaagcggtcaagtgcaattctaacggatatatttataaattcaatttccacgtgtggtaggaagaataaaggtcccctaaacatgttcgtgtcctaatccttgtgacctgcaaatatgttaacttacatggcaagagggattttgcaggtgtgactaaattaaggccctcaaggtaggaagagtatccttgatcctccaggcaggctcaagrtaattgtaaaggtccttacaactgaaagagggaggacgaaggggttgtcagagaaagagatatgacaacagaagtagggtcagagaaacgtttgttgctcgctttgaagaaggagaaaaggggctgtgagccaaggaatgtgggtaacctctagaagctggaaaaagaaaggaaacagattcttccctagagcctcaagaaggaattcagctcttccagtatcttggtttttagtctagtgagacctgtgtcagatttctaatatactgaatcataagatgataaatttgtattgtgttaagtgactaaatttgtggtaatttgttacagcggaagagaaaattaatacactatattatgaccttttaatataaaattatgataggtcaaaagaaattaaaattttcagtgcaagattcctctagtttttaaaatcaagaccaagcaaaaaaagatggaactttttttttttttttttttttttgagatggagtctcactctgttgcccaggctggagtgcagtggtgctatctcagctcactgcaagctccacctcccgggttcacgccattctcctgcctcagcctcccaagtagctgggactacaggcgcctaccaccacacctggctaatttttttgtgtttttagtagagatggggtttcacygtgttagccaggatggtctcgatctcctgacctcatgatccgcccaccttggcctcccaaagtgctgggattataggcgtgagccaccgcgaccggccttcgtttttagaatttaaaaaaaatccccacaaacctagaaaaagactgattttttttttttttaaacagagtctcactctgtcacctaggctggagtacagtggcgtgatctgggctcactgcaacctccgcctcctgggttcaagcgattctcctgcttcagcctcccgagttgctgggactacaggcatgtaccaccatgcccaggtaattttagtattttttggtagagacggggtttcaccatgttggccaggctggttttgaactcctgacctcaggtgatccacccgccacagcctcccaaagtactgggattacaggtgtgagccactgtgcccagccgagactgaaatttttatagcatggtaccaactaaacaccaatgcttgttttaaacctgttgtaattgatcagtgatagctccttcagcaaacacatctaggtaacagaaaatgaacttctgtaacccatgcttttatgactgattttccaaactactcctgcctcagtaaccaatacaccccataacaaacccttcccataaagcctatatgttttttgagacggagtctcgctctgttgcccaggctggagtgcagtggtgcaatctcggctcactgcaagctctacctcctgggttcacgccattctcctgcctcagcctcctgagtagctgggactacaggtgcccgccaccagactcagttaatttttttgtatttttagtagagatggggtttcaccgtgttagccaggatggtatcgatctcctgacctcrtgatccacctgcctcagcctcccaaagtgctgggattacaggcatgagccaccatacccagccaaagcctgtattttctttgttcaacaagactaatcagcatagctttgggttggtgatctcatcctttgatatactgtatatttttcctaaacaaagggagacttcatttaacaagggtcaaggcaaatacagaatatctagtagataaaagcagagtaccaagttttgtactattcaatgaagggaggtaggaaagtggtatatgataatttgttttaattatgtgaagaaataactttatgtattggtttgaaactcttgattttttcctatgtttttatttgaaaaacaaaaatgctaaaaatgaataaaatccttcatgatcccaccatcttcatatttgaaatatttaaaaaagtaaaagtcttccccttgtctcctttctagcaatcccatccaacagatgtaattgctattaataattctagccaggcgtggtggcacacacctgtagtcccagctactgaggaggctgaggcaggagaattgcttaaacccagaaggtggaggctgcagggagctgacattgcaccactgcaccccagcctggtcgacagagtgagaccctgtctcaaaaaaataaaataaaaataaaaagttgtgtgtatcctttcagatgtatacttaggcacggggtgttataataaatctattttaaccaactgccatagttgctggggcctttagaacctattttatgtaattggatatagtttagtaacttcagcatgcttgtgagcttcttgagaacagcagccaggatacactaatctctgtataacagataatattaaataataggtttccagcaaatactgactaattgaattaagaattaggaatttctctaataagatcccacttaatctctggtataagaatacaatttgtggtcctaaagagatgtgggttcagatactggatccaactgtagtagcctctctggcatctgaatgtttaaagttctgggacagccttgctcaaagaatagtcagctggtggtctatcaagtagtcaagagagtttggccatttcagaggaaaaaaataaagaagtataataattttgttcaaatacattttatcaatgtgaaattaagattaagaattatttttggctgggtgcggtggctcatgcctgtaatcccagcactttgggaggccgaggtgggtggatcacgaggtcaggagaccaagaccatcctggctaacacagtgaaaccccatctctactaaaaatacaaaaaattagctgagcgtggtggtgggtacctgtagtcccagctactcgggaggctgaggcaggagaatggtgtgaacctgggaggtggagcttgcagtgagctaagatcacaccactgcactccaacagagtgagactccatctcaaaaaaaattttttttacagaaattctgctatattttcagtgtatcatttatttttatttttttgagacagggtctcactcttgcccaggctggagtacagtggtgagatcatggttcactgcagccttgacctcccaagttcactctatcctctcacctcagcctcctgaatacctggaacctcaggagtgtgccaccatgccctgctaattttaaaattttttgtagagataggatcttaccatgttgtccagggttgtcttgaactcctgggctagagcaatcctcccctcttggcctcccaaagtgtgggattacaagtgtgagccactgtacccggtccattatttacttttaaattagatgtgactttcataagactcaaaattgaaaaaggttaaagataaacagtataaggtctccccctaaccacatcccctaagccagtattgatcagcatgtgtatccccttacagagatattttacagtatacaagaaaacacacacacatacacaaatacacacacattttgccccccgcctttttttttttttttttgagacggagtcttgctttgtcacccaggctggagtgcagtggcacgatctcagctcactgcaacctccacctcctgggttcacgccattctcctgcctcagcctcccgagtagctgggaccacaggtgcatgccaccatgcctggctaattttttgtatttttagtagagatggggtttcaccgtgtcagccaggatggtctygatctcctgacctcrtgatctgcccgtcttggcctgccaaagtgctaggattacaggcatgagccaccacacccggcccattttgctcttttttacacaagcaacataagctatacacttttctgcaccttacttgttccatgaaacagtatatctaggacaatggtctcctacttttttgacactagggactggttttgtggaagacaattttccatgaatcagggtggggagggatggtttcaggatgattcaagcgcattacatttattgtgcactttatttctatcattattatattgtaatatataatgaaacaattatacaacttgccataatgtggaatcagtgggagccctgagcttgttttcctgcaataagatggtcccatatgggggtgatgggagacagtaacagatcatcgggcattagattctcataaggacactcaacctagattcctgaatgctctggtcaygatagggttcatgctcctatgataatctagtgccaccgctgatctgacagaaggtggagctcaggtggtaatgtgagtgatggggagcagctgtaaatacagatgaagctctgcttgcttgctcactgctcaccacctgctgtggggtccacttcctgacaagccacagaccagtaggattggggaccmctggtctaggactctcctccctccctccctcccttcccttctctctttctctctctctctctcatctaggactctttctttctctcttcctttctttctttcttgctttcactgtctctcatctaggactctctctctctctcatctaggactctttcttttttttccttccttccttctctccttccttccttctctctccctccctccctccctcccttccttccttccttccttccctctccctctctccctccctccctccctccttccttccttccttcctttcttccttccttccttccttccttctctctctctttctttcattttctctctttctctctcttgtctaggactctctctctctctctcttttttttttttgttgagatggagtcttgctgttgctcagcctggagtgcaatggtgtgatctcggctcactgcaatctctgcctcctgggttcaagtgattctccagcctccgcctcccaagtagctgggattacaggcacacaccaccatgcctggctaatttttttttttttttggatttttagtagagatggggtttcactatgttggccaggctggtctcaaattcctgacctcaagtgatctgcccgccttggcctcctgaagtgctgggattacaggtgtaagccacccaccgcacccagcctctttctctccctcccctcctctttcttttaatttttagtagaggtggggttttaccatgttggccaggctggtcttgaatttctgacctccagtattctgcctgccttagcctcccaaagtgctgggattacaggcatgaaccaccatacctggcctaggacactttccatatcagtagacaaagaacagcttcattctttttcatagctgcagagaattcttgaatggatacaaagactgttttcttaattacaaagaagattttaataaatagctttgtacaaatgtcaatttaggctttcctcttcgttttgactagttttctatcatttcccttcttcatcaaacgtacgttgaatttttatttttttctgtttgaactttcaaatcagcctgtctttttttwaaaaaaatccttagaatttgggagaggagttattataaattaatttagaaagaattgaagttttatcatgttgaagcatcctatattatcaagttatgccttttyatttgttcaaaccttctctttttttgagacagtctggctctgttgcccagactggagtgcagtggcacaggcttggcttactgcaacatctgctttctggtctgaagccatccttccacctcagcctcatgagtagctgggactaaaggctcaagccagtaacgcccggctaatttttgtattttttgtagagacagggtttcaccatgttggccaggctggtcccaaacttctgagctcaagtgatccacccacgttggcctcccaaagtgttgagattacaggtgtgagccaccacgcctggctgcaaaccatcttttatttcctttagtagcgagtttaaagttttcttcgtttagattttgcacatttattgttagattattcccagaaattatttttctgttgctattgtaaatagatgtttttgaactgcttattgtttgtatatatgaaaatgattgattttgactgttaatgtcatgctagtccacctgaattctcttatgatctataaaattttgtgtttttctctcaggtttttccatgtatataatcctatcatctagaaataatttataaaattaccacatcctttccctgtaaaaccattttttcccttttctaaaagtttaattctgttataataaacttaaaacttaaccatatttttgagayataattcaagcacaaataaatttcaccattttaaagtgtgtaggtcagtgatttttagtgtagtcacaaggttgtacaaccatcaccactagtttcaaaacatttttatcatcccaaagtgaaactccgtagccattattagtcactcctcatccttsmttccccctaagctctggcagccactagtctatagtttgtctctgtggatttacctattttggacatttcctataaaaagggaagctttttgtatatagcttctttcagtgagtacaatgtttttgaggttcatctatgttttagcatctttcatacttcattcctttttatgactaaataatactcgattttatggatataccacattttgtttatccaytcatcagttgattaacatttcagttgtttcctttttttgctatcttatatgaacatatgttttcaattccctaaggtacgtaccaaggagtgaaattgctcatcatattagtaattctaggtttaagttttttttttgtttgtttttgagacggagtctccctctgttgctcaggctggaatgcagtggcgcgatctcggctcactgcaagctccacctcctggtttctcgccattctcccgcctcagccttccaagtagctgggactacaggtgcctgccaccacgcccagctaatttggtttctgtatttttagtagagatggggtttcaccgtgtggcctcatgatccacctgcctcagcctcccgaagtgctgggattacaggcgtgagccaccacacccggcctctaggtttaccttttaaaggaactcccaaactgtttttttactaccatttcatatttctaccagcaatttccatgggttcctatttctccacaacctcatcaacacctgtaattgttttaaaaaattattatacggctgggcccagtggctcacacttgtaatctcagcactttgggaggctaaggcgggtagatcgcttgaggttgggagtttgagaccagatcggccaacatggtgaaatcctgtctctactaaaaatttaaaaaatagctgggcatcgtggcacatgcctgtagttccagctattcaggaggctgaggcatgagaattgcttgaacccgggaggcggaggttgcagtgagctgagatgggatcacaccactgcactccagcctgggctannnnnnnnnnnnnnnnnnnnnnnnnnnnnnnnnnnnnnnnnnnnnnnnnnnnnnnnnnnnnnnnnnnnnnnnnnnnnnnnnnnnnnnnnnnnnnnnnnnnnnnnnnnnnnnnnnnnnnnnnnnnnnnnnnnnnnnnnnnnnnnnnnnnnnnnnnnnnnnnnnnnnnnnnnnnnnnnnnnnnnnnnnnnnnnnnnnnnnnnnnnnnnnnnnnnnnnnnnnnnnnnnnnnnnnnnnnnnnnnnnnnnnnnnnnnnnnnnnnnnnnnnnnnnnnnnnnnnnnnnnnnnnnnnnnnnnnnnnnnnnnnnnnnnnnnnnnnnnnnnnnnnnnnnnnnnnnnnnnnnnnnnnnnnnnnnnnnnnnnnnnnnnnnnnnnnnnnnnnnnnnnnnnnnnnnnnnnnnnnnnnnnnnnnnnnnnnnnnnnnnnnnnnnnnnnnnnnnnnnnnnnnnnnnnnnnnnnnnnnnnnnnnnnnnnnnnnnnnnnnnnnnnnnnnnnnnnnnnnnnnnnnnnnnnnnnnnnnnnnnnnnnnnnnnnnnnnnnnnnnnctgtttctgaacaaaggcacagtttgttcagcacttttattgctcgattgttagagttttttatatattctagatacaagttctttttttttgagacggagtcttactctgtcccccaggctggagtgcagtggcacgatcttggctcactgcaagctccgcctcccgggttcacgccattctcctgcctcagcctcccgagtagctgggactacaggcatgcgccaccacgcccggctaattttttgtattcataatagagacggggtttcacggtgttagccaggcttgtctctatctcctgaccttgtgatccacctgcctcggcctcccaaagtgctgggattacaggcgtgagccaccatgcccggccaattcaagttctttactagaatgacttgcaaatattttatccttttctataggttgtcttttcagtttctggataatgtcctttgtagcactaaagtgtttaattttggagtagatcaatttttctatttttttcttttatagtttgtgtttttggtgccataactaaaaaaacattacctaatccaaggtcacagggatttacatctatgttttcttctaagagtttataattttagctcttatgtttaggtcctgatccattttgagttaatttttgtatatagtgtatggtactcaggtgccaaattcattattttgtatgtagatatctagttgttcagaaccatttgttgaaagattattctttcctccattgaactgtcttggcagccttgttgaaaatcaattgatgcaagagtctgggtttatttctggactctcaattcattgtcctcaactacatgtctattcttatgcccatactacagtcttgatattatagctttaagcaaagttttgaaatggggaggtgtgagtctttcaatttttaactttttcaagattgttttggttattcagggccccttgcagttctatatgtatttgaggatcagcttttacatttctgaaaaaattaaaaatgctgttggaattttgacagggattgtgttgagtctgcagattaatttaagaagtactgatatcttaacaatattagatattccaatccatgaaaacagatgttgtttcaactagtcttctttctttttctctttttcttgcttctctttttggttttcagtaggatcttgctctgtcacccaggctggagtacagtggcgcgatcatagctaactacaaactcaaactcctgatcctcctgcctcagcctcctgagtcatctctttcaatgatctctttttcagtatgagtcatccatttcttttgtttgtttgtttctttttttttttttttttgagacggagtctcacactgttgcctgggctggagggcaatggcacgatctcagctcactgcaacctccacctcccgggttcaagcaattctcctgcctcagcctcccgagtagctgggattacaggtgcccgccaccacacccagctaatttttttgtatttttagtagagatgaggtttcactatgttggccaggctggtctcgaactcctgacctcatgatctgcctgcctcggcctcccaaagtgctgggattacaggtgtgagccaccttgcctggctgagtcatccacttcttttgttaaatttgttgcaaagtattttattatatttgatggtattataaatggaattattttcttaattttatttttggattgttcattgttactttatagaaatacaactgatttttgtatattgatcttgcattgttgcaccattctgagcttgtttattagccctaatggattttttgtgaattgtttagggatttttatctcatctgcaaaaaaagatagttgtccctcctcttttccaacctagatgccttttattttattttcttgcctaattgccttggctagaacttccagttcaattttgaatgcaagtgatgacagcaggcattgttgtcttgtttccaataacttttaacttctaattttcccccaaatataaagataaacacattagatagaaaaatattactgataatagtagtcatcattatttaaaatcttttgttaatgggagtacttctaatattttcctttgaacataagctgtcttgaggttaaaatagattcatattaaggaaatgtcttctattctttttttttatttttcaaatttaattaaaaaaattttttatttcctcattcttgctgtcaacttatattcttattcttttatgatcatttttgattgaaaagtagatgggccaggcactgtggttcacatctataatcccagcattttgggaggccgaggcagatggatcacttgaggtcaggagttcgagaccagcctggccaacatggtgaaaccccatctccattaaaaatacaaaaattagcaaggcatggtgatgcatgcctataatcccagctacttgggacactgaggcaggagaatcacttgaacccaagaggctgaggttgcagtgagctgagctgagatcgcaccactgcactctagcctgggtgaaaaagcgagactctgtctaaataaataaataaataaataaataaatgttaaaaggttttttttttgttttttttttttgagatggaatctcactctgtcgctcaggctggagtgcagtggtgtgatctcagctcactgcaacctccaccttccaggttcacgtcattctcctgcctcagcctccagagtagctgggactacaggtgcctgccaccacgcctggctaattttttgtattttcagtagagacagggtttcactgtgttagccaggatggtctcaatctcctgatctcatgatctgcccaccttggcctcccaaaagcttttaatcaaattatttttcaaagtctgttgagttgattgtccttgggtctctttataaaatagatttcctaataatttattatccttgtatttctgaaataatccccatttttgtcctttcattcttgtaaggtattacaggattctttttcctagtacctagtattatttcatcaatacatataaatgagattagtgctcaggtttttttctacacaccttgttagagttagtgtcaaactattcttgcttcatagaagtattttagatggtttctttcttttttttatgtgttagaaaagctcacatagctttggaattgtttccttaaaggtggaatataaccacctatgaaaatatctagacctggtactccttttgtggaatagctctttatacttcttttatggtaattatttgcttatttagattttctgtttttttttttaagatcagttttggcaagtcatactttctttaaaaataatccattttatctagaatttccaaattattgcatcaagtatattttagctgtttttcctagttaacttagctaaaagcctatcttttttatttttcaagtaaccagctcttggattatatatttaattctactttttttctaattaagtagtttctatttttattttttcaatttctttgctttcttagctttgtttggctgatctttaacttcattcattttgatgctttccttctttctttctttcccttccttccttctttctttccttccttacttccttccttccttccttccttcatcttctttctttcttgatggagtctcgctctggagtgcagtggcacgatcttggctcactgcaatctccgtctcctgggttcaagtgattttcctgcctcagacttgtgagtaacggggattacaggtgcctgccaccatgtccagctgttttttgtttgtttgtttgtttgtttttttgagacagagtctcctctgtcgcccaggctggagtgcagtggcacgatctcggctcactgcaagctctgcctcccgcgttcaagcgattctcctgcctcagcctcctgagtagctgggattagaggcatgtgccaccatgcctggctaatttttgtatttttagtagaggcggggtttcagcatgttagccaggatggtctccatctccttactgcgtgatccacccacctcagcctcccaaagtgctgggattacaggcataagccaccgtgcccggtcctcacctacttttttagtagagacaagatttcaccatgttggccaggctgatcttgagctcctgacctcaagtgatttacccaccttggcctcccaaagtgctgggattataggagtgagccactgcacctggcctattctcttattaactaatacagtgaagttttccagctgccttacgatttgttcacctgtggatgtgacctactttgaatatttgtagagccagattctaagatacgtttgtgtcaacatgacttggaatatatgcaatttatatctgcttaaaagccaaaatcatttaagtgtgcacagatagccagtaacagggatggttaaacttagtgcttcatgtaacttcagtctgctttgacaaggacagctaggccctcagctttatgcaaactttctgcattgtaacttgtttgctctctctcagacccaaaccccactccatatacctatccaccaactaaactgtgctgccttgtccttccttttcttttttgacacagttcattaagttcaagacttcccctagcaaactgaatacacccttttctcttttctctttccacagctgcctttgccacagtttctgctcacacaccccttccctgagaggtttctagcttaggctttgagtgtcttcctattgtcatagcctcctttgataaagtcttgccttgctgaggtctagacttgcatttttgctttggcaccacaagagatactttattcctagaactccactgatttttggataattttgctgctagtgacttttgcttattaaatagtataactattttacacatgcagcaggtttttggactcccacagtacaatccctagatacaaatccggatcagtatacatgtcattatggcatattattaaagtatttatttttacattttttgttttgtttcttcctttttttttttttttttttgagacagagtcttgctctgtcacctaagctggagtgtagtggtgcaatcatggctcactgcagcctcaacttcccaggctcacgtgattcttccaccttagccttcccagtagctggttctacctgcgcttgccaccacgccaggctaatttttttgtagagacagggtttcgccatgttgcccaggttgctctcaaactcctgggctcaagcaatttacccgcctcggcttccccaaatgctggaattacaggcgtgtgccaccatgcccagtcaaattttttgctttgtttcttttttttttttttttttttgagatagagtctcgctctgtcgcccaggctggagtgcagtggcgtgatctcggctcactgcaagctccgcctcccgggttcacgccattcttctgcctcagctcccgagtagctgggactacaggcgcccgtcaccacgcccggctaatttttttgtatttttttagtagagacggcgtttcaccatgttagccaggatggtctcgatctcctgacctcgtgatccacccacctcggcctcccaaagtgctgggattacaggcgtgagtcactgcgcccggccttgctttgtttattaatattgttatatataaagtttcagtgccgcaaaagaaatagcactcgaatataaaattttctttttaattctcagcaaggcaaggtacttctatagaagggtgcgcccttacagatggagcaatggtgagcacacacttggacaaggaaggggagggggttcttatccctgattcaggtggcccctgctgctgtgtcattcccctattggctagggttagaccgcccaggctaaactaattccgattggccaatttaaagagagtgatggggtgagtggtttggcgggaaaaatggttatgacagagcaggtaatgggaatgagtcagggtggagcaggtcatgggaatgagtcaaggtggagcaggtaatgggaatgaatcagggtggagcaggtaatcagaacgcgtcagggtggagcaggtgattgaaatgagtcaggttggagcaggtgattgaaatgagtcaggttggagcaggtgatcaaaatgagtcagggtggagcaggtaattgaaaaaggttgctttatgaggaagtttaaaagtagaaggtaaataattgaacatactgacatattctttgaaaacaagtttagaattcatatctaacaatatgacttttttttttttttgagacggagtctcgctctgtcgcccaggccggagtgcagtggtgcaatctcggctcactgcaagctccgtctcccgggttcacaccattctcctgcctcagcctcccaagtagctgggactacaggcacccgccatcacgcccggctaattttttgtacatttagtagagacggggtttcaccatgttagccaggatggtctcgaactcctgacctcgtgatccagccgcctcggcctcccaaagtgctgggattacaggcataagccactgcgcccagccaacaatatgacttttattactaagttctgcatttgtaatgaagctgcccctgcaaaattatgacagtaaaagaaatctgatgtaattgactccatcctgcttcttacctccaagctgttcttggtcatacctgggcacagaccaagctaactctgggaggaatgtagttgtcaatagtttaacttcgggccaggtgcggtggttcatgcctgtaatcccagcactttgggaggccaaggcggggaaatcacctgaggtcaggagttcaagaccagcctggccaacatggtgaaaccccatctctacaaaaaatacaaaaaatgagccgggtacagtggtgggtgcctgtaatcccagctacttgggaggctgaggcaggagaatcgctttaactcaggaggcagaggttgcagtgagccaagattgccccactacactccagctcaggggcaacagagtgagactctgtctcaaaaataaaaatatatagtttggctttgaagcaaagattataataatccttccctaaaatgaattccctccctgttcaggggctgaaactgcctttttaaaactaatgaaaggccataagattagggttatgggaggggcctgagttctgctaaaatgtaggcatagtttctacaatctcttattgctcaggagtcctgtggccagaggtcacaggatttgtgacttctccaattgctcctatagataacaccactactgtaaaacctgagatttttttttttttttttttttgagattttctcagactgactccacctggactcgtgactcatgactcagctggtcctgtggctccaccagaagtggactaagtgcacaaggactattttccacacccctgtgatttcctccctgatcactcagcagtacccattccctagctccctgcccaccaaattgtccattaaaaaccctaatctctgagccttcaaggaaactgacttgaggagtaacaccatcttctgtgtgcctggccttgtgtcaaatttttctctactgcaatgctgaggtctcagtaaatcgatttttgtctgtgcagtgggctggaaggagtcaacaggtgattatagtaattctatataatattctttaagataagtgtagaaaagaatttcagaaatttatttcattgttcataacttgtaataaagatatttaaaatacaatgtttgaacactgcttcagcagtatcatatagagtctgatgtgcaatatttttgttatcattactttttagatggtctgcaatttcatttggattttcctcttgggcccgagagctatttaaaaccaagatattttatttccaaatacgtaggggctttggtttcctccttatattattgtcttctagttttattgccttggtactagataaagttgtctgtactgttttatcctttttttttttttttctctctttttgagacagagtctctctctgtcacccagactggagtgcagtggtgctatctcggctccctgcaacctccacctcccaggttcaaacaattctcctgccttcgcctccggagtagctgggattacaggtgccttctactttgcctggctaatttttgtattcttagtagagacggggtttcaccatgttggccaggctagtctcaaactcctgacctcaggcaatccacctgccttggcctcccaaagtgctgggattacaggcttgagctagtgtgcccagctgtactgttttatctttttgaaatttattgaaggtttttttattggaaatataaaaatatgtattttctgttttcagaagcacagaatttgacatatatctaccttactaattataaattcactatacccttgtttggctttctgcatacttttgagaagagttaaagtatcccaccattaatgtatttctctctacttttctgttgtagaccttgaaggaaattaaaatattttagccccaaatatatttctttgacatattttgaaatggctgccccttggtcagaaaacggaagtggcctagcaaagctgtcctttgtggggaaaatttgcatctgtacagaatctccactaatgcagccctgcctctcttttctattcctttcccgatccaggagagactggcagtctggcacctttaaaggtgtggaaataaacttttaccatgtattccctctgagggaggcttctctgtacaacaaggccaccattgctagcaaagcctcttccttcctttcttcctcccataacctgccttgccactaaatcctgtttttggacatactctgagtccgcattgtttctgcaatttcaaggtggtatataagcttctgttacttattgggaaattgggtccgcattctgaaggctcctgtgtatacatgttaaataaatttgtacgctttttcttctattcgtcaatctgcttcatgtcggtgattttttagcaaacctttagggggtcaacagcccatggcctccaacaccttaacttttgctttaagggctatgcttatatcaatgccatgttatttgtaaatagatattcataactgttatttttgtgaatttcaacctttagcatataaagtgtctgtgtcttatttagcacttattcccccaaactcagtcatatttgaatttatttatttatttattttaccagaaacacgtacactttattgaatgccgtcgtaaaaaagtgtgtgaggataaagggctgatacaggacttggctccgggagcagggcgaggaatggaaggtggagtacaaaggatacaggtcatgggtagatctcctggcctcagtgatgtctcctgatctatckatgggcttggaagattaatactgggatgatgatgagcagaatggtcatgaggatgcccaaaatcagggcccagatgttcaggcacttggtggtggaggcataggcctgggccccagtcacgttgccaaccatcttcctgtccctagacttcacggagtaggcaaatgytatgaagcccaggcagcaggggttcatgaagagggtgttgaacagggaccagacgacatggtggggcacggaggtcttgctgcggatgtggatcacggtggacgttgggggagcagggttgtggggcacccccagcacagccaccttgtgctcctccttgagcatctcatagttggggggctggccgctgttgacaggagagaagaaggtttggacagtgtggttcatggtgtccagcgaagaccagccgtggttgagttactgggatggttctcagtggaccctccctttccccagtagtttcgttttctccatatttgaaattaagataacaattactttcgtttgcattagcctagtacaggtttgcccatttatctttttttctcttcattttctgtccttctgaatctattagttttaggtttgtctttgtttttatggtattgaattattttttatttgtggttctatctgactttttccccttttactagatgaattaaactcatttacaattattacaattgtttaaaatttttgatatgaaagacatgtttggtcatgactatatcatgttatttcatgttataattcatggtttcaaggttaaaaatattttcgtatgtgagatgttttcgtatgtgagatgtttttgttgtatgtccatttcttctgataattatgcatgtttgtattttgtcaaatgtctgatcttctttcttttttttttttctttgagatggagtctcgctctgtcacccaggctggagggcagtgtcgcgatcttggctcactgcaacctcctcctcccaggttcaagcgattctcctgcctcacgctcctgagtagctgggattacaggtgtgtgccacaccaccaggcccagctaatttttgtatttggtagagacggggtttaccatgttggccgtgatggtctccatctcctgaccttgtgatctacctgcctcggcctcccaaagttctgggattacagtcatgagccactgtgcccggccctgatcttctttctttaaccactattatcaatgccctattctgataattgctaataattaaattagtagctttcttcttccttccacctcctttttctctctacaacttctcaatttttgttaattatattatgtttcttaatgtktatatttgttctgtttaataacaacaatcccacatttattttagttttaagccaatttaccagcagcgcttatgctatctacccagtgctttctagtcatctctggtttgacaacatttgtccattggtggattcttcatgtgagttaatacaaacaatacccttaagatgttgtgttttcaaaactctttggctttatatacatacatacatatgtatgtatataaacaaatatatatatgtgtgtgtgtttgttttgtcttgttttgagacagggtctcactgtgtcacctaggctggagtgtggtggtgcaaccatggctcaccacagcctcaatctcctgcactcaagcgatcctcccacctcagcctcccaggtagctggaactgtaggcatgcatcatcatgcctggctaaatttttttttaattttatttttattagggacaaggtgtcaccatgttgcccaggctggtcttgaactcctgggatcaaggaatcctcctgcctcagcctcccaaagtgctagaattagagacgtgaggcaccacaccacctacctttatatttaagcaacagtttgactgcatacaaaattcctgggtcacatctctttgctggaggattttattggtatgtatacataatgtcttctaagaacaaatgctgtggagaaatctgaaatcagcctgtttttctcattataagtgatttattctctggcttttaaataattctttttgaaatctaataattttatcaggacatagattgctcttgactacttggaatcttttttagtaatatgccattttacatttttagactcgtttcctttttctctgcaattttttaaaaattatattttaaatttgtttccctgtttccttatttttttttttctttgctttcaagatctgtgggtatatgcttctcaccagttctgggaaattcacagccattatctctttacacattgcctctactcttttctcactatctttctaattgaaactaagtgtatgttaaatcttcttgatgcagaactgctgggctccaggctaaacttcaccctcaagcctggaacctcagtcctaagtgaaacagctgaccccattttttccacccaaatgattgcttttttggcccgctccaccccctgtcatatgcctataaataccagaccagctagcagaacaaaaggaagaaaaagagcaacctcagcagctgatgcaagtggtcggggatacaagctgctgagcatcaggaatacatgcagctgagcatcggaaactacagatagacacggcttcagagaaagagcagtttcttcccataccatcccctttccaattccccatcctgctgagagccacttttatcacacagtaaaatcttccatatacactacccttcaaaaagtttatgtgacctgattcttcctggactctgaataagaattcgggtgtcaagaagggcaggtgcagaaggctgtcagcctgggctgttaacacttagccatccacggactgcaggctgagtgaaacaagccactccagttcctgcccacaaagggggtcaaggtcaagacttgaccttgaactatgaactatcctgtctcattctcatcctatcttacatatcttttaacctttttttcatattttccatttccttgtttctccctgtgcattctggatcagttatttagatatattttctggttcacaaattctcacttgagttatctaatctgctagttcatccctccactgagttcctaccaccacttccccatccccgacctcattttttttttttttgttttgagacgaagtctcgctctgtggccaggctggagtgcagtggtgcgatctcggctcactgcaacctcctgcctcagcctcccaagcagctgggattataaggcgcacactgccacacctgactaatttttgtctttttagtagggatggggtttcatcatgttggccaggcttgtcttgaattccagaccgcaaatgatccacccttcggcctcccaaagtggtgggattacaggcatgtgccatcatgcctggctaatttttgtatttttgtagtgacggggttttgccatgttgactgggctggtctcaaactcctgatctcaaaggatccacacgccttagcctcccaaagtgctgggattacagatgtgagtcaccccattatatttttaattcctggttctttttggattgtttccaaaatgtttctgttcattcctgtttctagttgaaggctcactttttaaattatatacttctttaaacacttcatacacagctgttttatgtcgtatatatgtaattataattctaatactagaaatatttgagaaatctaaatcagttgtttctgctgactctcacagtgattgccttcttgtgtgtttggtaatccagtttgtgagttgatggcttcatcataatctgtgggagtcctctgtaccaaacttggaaagttctcctccagacaaggtcggttttcattcctgtctgtaatgttgaggcttagaaaccaattccccaaaatatggcatgtttacatcctgaactaagaagactcaaggtctctctgatctacccacccctcaccagctcttccaaagaggctcaagttcctttacctgcctaagctccagacccaccaaggagaacaatagttttcttcccttccctgggaaacctgcccaattgtcctgtagaggtgatgtttatggttctttttaataaacatagaaatttatcctcctggtcttaaaacttgagaaaattacatctgtcttatctgagttgctttctcagaaaagaaaccatcagtcctcccagacagtatcaaggagctgaaacttaccagatcatcacatctggacaaagggagccagacgcctcaccaatcatgactgcctgcttcctgttgacccctttctcttccttacccctccctaaaattcccgtttttccacacatagttacatttcttccctgctatacaaatcccaaattttagacagtcagggagttggatttgggactgatctcccatctcctctgctgcagcactggattacagccttcttccctggcaatactcattgtcttaatgattggctttctgtgaggggagcaacaggacctagactgaatcttgggtgttttggtaacatctgtaagaccgaaaatgtaaccacacctaaacagaccctttttcaagataatgactgactctctccaaggatcatttaaattccaaagagaactacctacaagttaatttctgttccctgatccagtcattctccctagcaatcatttattacccctcatctaatctaatcccaaaccctaaatctaataaaatacttctaaaatctgcacccctaatgccctcccacactcaaccattccacttactttgtaatttagagaggcctaaattttgttaaaatagaggcacagctaatagatgtttgttacacttactttctttcccctttgacattttcatctaccaggcatgattacgtaacatagtccttttttttttttgtgatnnnnnnnnnnnnnnnnnnnnnnnnnnnnnnnnnnnnnnnnnnnnnnnnnnnnnnnnnnnnnnnnnnnnnnnnnnnnnnnnnnnnnnnnnnnnnnnnnnnnnnnnnnnnnnnnnnnnnnnnnnnnnnnnnnnnnnnnnnnnnnnnnnnnnnnnnnnnnnnnnnnnnnnnnnnnnnnnnnnnnnnnnnnnnnnnnnnnnnnnnnnnnnnnnnnnnnnnnnnnnnnnnnnnnnnnnnnnnnnnnnnnnnnnnnnnnnnnnnnnnnnnnnnnnnnnnnnnnnnnnnnnnnnnnnnnnnnnnnnnnnnnnnnnnnnnnnnnnnnnnnnnnnnnnnnnnnnnnnnnnnnnnnnnnnnnnnnnnnnnnnnnnnnnnnnnnnnnnnnnnnnnnnnnnnnnnnnnnnnnnnnnnnnnnnnnnnnnnnnnnnnnnnnnnnnnnnnnactctgtctcaaaaaaaaaaaaaaaaagaaaaagaaccaatgatctttaagtcatgcagactgcctttgtattttccagaagttggatcaactgaggagtgcaagcagtttcaatcaccagggagctcacctcttaagctgtaggcgtagttgaatgatagcccatcattgttctcttgtttgcttttctataattgcttattgctcaggagttatgtaacaggcagtcacaagcgctattgtgaaacctgagactgatctctgagatatttttcagactttgccttcaggtgaatcaactgacaccagcttgaacagtgaccgtgactgcaacaaaggaactgactcaaccggtcctctgaccactcccctgcaggaaatgactcagcacatgaagacagtttcaacactcctatgatttcatcccccaaccaatccacaacatctgtttcctaatgccctacctgccaaatcatccttaaaaaccttagcctctgaattcttggtgaggtggatctgggaaatgtatcccgtcctcctcactctattgccttgcaataatcaaactctttctctgctgcaactcctgctggctcagtgttttggttttatctgtgcagtgggcaagaaccagtcaggtggtaacagttctgattgttacttttgggtgatttcccctacaaagaggaaaaatactaattttgaaccaccatattcaattcttaaggcttcctatattcttagtgataatgtcatttttgaagataacatatttcaaagtacagtagctttgaagtatatttgtattttgaagatacatgtacttgaaaaattgagtttggcaatgtgtttccactaacattaatttaacaggtaaggccgggcgcagtggttcacacctgtaatcccagcactttgggaggccaaggtgggcagatcacgaggtctaggagttcgagaccagcctggccaatatggtgacaccctgtctctactaaaaatacaaaaattagctgggcgtggtggctcgcacctgtagtcccagctactcgggaggctgaggcagaagaatcgcttgagcctgggaggcggaggttgcagtgagccgagatggtgccactgcacgccagcctgggtgacagagcgagacttccgttctcaaaaaaaaaaaaaatttaccaggtaaaagnnnnnnnnnnnnnnnnnnnnnnnnnnnnnnnnnnnnnnnnnnnnnnnnnnnnnnnnnnnnnnnnnnnnnnnnnnnnnnnnnnnnnnnnnnnnnnnnnnnnnnnnnnnnnnnnnnnnnnnnnnnnnnnnnnnnnnnnnnnnnnnnnnnnnnnnnnnnnnnnnnnnnnnnnnnnnnnnnnnnnnnnnnnnnnnnnnnnnnnnnnnnnnnnnnnnnnnnnnnnnnnnnnnnnnnnnnnnnnnnnnnnnnnnnnnnnnnnnnnnnnnnnnnnnnnnnnnnnnnnnnnnnnnnnnnnnnnnnnnnnnnnnnnnnnnnnnnnnnnnnnnnntttttcatgtggttaccagtgtggccttatatcgccaatgtttaaaaaaatgttatggactcctgcctcagcctcccaagtggctgggactacaggcgccggccaccatgcctggttaattttttgtattttaagtagagacggggtttcagtgtgttagccaggatggtctctatctcctgacctcgtgatctgcccacctcagcctcccaaagtgctgggattacaggggtgagccaccgtgcctggccagaggatagtagaaaatgagaagattaatgcagaaaagtcatcaaagcagaaggtagatctccagtctttgccaactcgtgcctacctggatcagacagttgtgcctatcttattacagggacttgctgtgcttgcaaaggaaagatgaggaaacagacttggagaggttaagtgacatgctcaagacaacactgctgggtcttgctacgtacgttgaccaggttggaatgcagtggcgtgatcatggctcactgtagcctcgacctcatgggctcaagtgatcctcccgcctctgcctaccaagtagctaggaccacaggtgaagccaccatgcccggataattaaaaaataaaaaatttatagaaaaaaatgttatcgaggactttgaaagtatttcactaaaccaaaacatagtgatgaaaatagtaatgtgaatattaaagtagagaatgtcacaaatataaaaaattaacaagagccccattttcactgaggaaataggtgaatatgataattttatagaaacaagtaaagaaaaatgtgaatagaagtatgaaagtggatatctgaaaatgagcaatccagctactcttttttttacaccatgtttatcttttaagtaagtctgtcaagttttgacatgaagttaatgatgctttcattttgattttttttttcttttcttttttttgagatggagtctcgctctattgcccaggctggagtgcagtggcgcgatcttggctcactgcaacctccacctcccaggttcacgccattctcctgcctcagagtagctgggattacaggcgcccgctgccaggcccggctaattttttgtatttttagtagagacagggtttcaccatgttagccaggatggtctcgatctcctgaccttgtgatccacccacctcgttctctcaaagtgctgggattacaggcgtgagccaccgcgcccgaccttcattttgatttctaacaaaacactgagcactggtaaaccaattaaatttttcatttctaaaacaaaacagcatagtaaaaaattaaataattcttttgctaaagtcagaaagaggccaaaactagatatccattcagatttgcacttcttatatcctaaaacagacagttcttactgctgtcaaaaggtttgtaaaaacctaatgtgaaattattcaaaatatgctcagagagaaagcaaaacacactgctactggaaaattacattgtcaagtgactcatctgacattgtgtaacattagtagcattcattatgaaagaggaattacggtcttgtgtgcatgctagcaaatatcctgttcagaattggataaagccaccgacacttgccatctgccacaaaacatcccctatcaagcttgccaaccatctttatcttgccaaatctaatgatttgttctctatccaaatcacagttaatttctcagtagtagctgaccattattttctttttgaaacactttcttcttgaagttttcctgaagccacactgtttcccctctttatcactggctgcttcttctcaatctccttgctagtacctgcctcttttttctcctcatcttctaaatattaggactctctagagctgggtccttgatgctcttctgttttttgtgtacattctttccctatttaatctcagtcagtcccatagctttatgacaagcatgttacggattcccaaatgaatacctagagccctgttttcttccctgaactctgaattcatatatcatttgctgctttattattattattattatagatgaggtctcactacgttgtccaggttggagtgcagtggctattcacaggtgtgattgtagcacactgcagccttgaactcctggacttgagtgatcctcctgcctcagcctcctaagaatagctgtgactacaggtgcatgccacccatagctggctaatttttaaatttttgtggagatgggggtctcactattttgcccaggctggtctcaaactcctgagctcaagcaatcctcctacctcagcctyagtaactgggactacatccatgttccaccacaccaggctccaattacattttgacttctccacttggatgtttaaaatgcttctcaaatttaacatatcctaaagataattttgtgtctccccacaaaacttgctctttttgcattcattgctgtcttagttaatggcaccaccatccatactgttactttagccagaaacctttgaaacatcccaattggtctttctgattttctctgtttcacaacttattctccacagacaggatactccaaacagtacccaaagccattgtctcttatacttttcaatctataaaatatacatacataagagtatataaaatatattataaagtaaatatccatgtatccaaacacacaggtttagaactggaacacaatatgcaaaagaataatattggaccccctacctcatgtcatatacaaaaattaactcaaaatataccaaagatctaaatgtaagagctgaaattataaaactcttcaaagaaatcataggtgtaaatctttgtgtccatgaatttagcaagaatttcttaaatatgacctccaaagcacaagcaatcaaagaaaaaaaatagataggttggacttcaacaaaattaaaaattttcatgcttcatagaaacggaacactttcaggacatcataagacctcttcttgctcacatttcctccctttctgcaaagataaatgcagttctttgtgtgcatgtatttgtgtgtgtgtgtgtgtgtgtatgtgtgtgtgtgcgtgatgatcattctcttgctttagttttatctcacacttatatccataagcaatatcaccaatattacaacctaaacaatatagtttaggttttacccatcttcaagttatataaatggaatctcactattttttttttctgtgacttgctgctttttggctcaatataatgtttgtgagcttcatctgtccttatgcatatagctgtagctctgtatagaatttcatatattgtaattaatatcataatttattatactctttaatggacttttgggtgttttcagttattattagtgctacaataaacactttgatacatgctttctggcacttacatgcaagagtttctctaagatatataactaggagaatgtagatatcagactgtctaataaacttgaagatgcacagcctttcttttccaaaatggttacaacctgtttaatgctctaccaaagggtgagtttccattggtattgtcaaagttccttgagagtgtcagattgtttttcctacttttaccatcctagtggcttgtacagttttttggggggagttttttggagacggagtcttgctatgttccccaagctgcagtgcagtggctattcacaggcataatcatactgcaccatagccttgttagatatgagttctaaatttcttttcaaagaattaatgtcagtatgttcaattatttgccttctacttttaaacttaacttcctcgtaaagctacctttttcgattacctactccactctgactcattctggtcacctactccaccctaactcattctgattacctgctacctgccctgccctgactcctgccaaagcacacaccctgtcattctctttaaattagccaattggaattagtttagcctgtgaggtctaaccctagccaataggggaaccacacagcagcaggggccacgtgtgtcagggataagaaccccttcccctcccttatccaagtgtgcgctcaccattgctccatctgtaagggcacacccttctattgaagtaccttgccttgctgagaattaaaaagaaaattttatattcgagtgctatttcttttgcggcaccgaacctttatatataacaacctcaaactcctgggcttaagtgatcctcctgcctcagcctctaaagtagttgggactacaggctcctgttactgcctctggcttttgtacaagtttttttgttgttgttgcttgttttgttgttgtttttttttttagacagagccttgctctgttgccaggctggagtacagtggcgcaatcttggcccactgcaacctccgcctcctgggttcaggcgattctcctgcctcagcctcctgagtagctgggactacaggcatgtgccaccacacccagctaatattttgtattttagtagagatggagtttcaccatgttggccaggatggtctcaatctcctgacctcgtaatctgccagcctcggccttccaaagtgctgggattactggcatgagccaccatgcccggccttgtacaagttttaacatgtggaagttcgttttttgttttgtttttttgaggcagagtcttgctaggtcaccaggctggagtgcagtggcgcgatctcggcacactgcaacctccacctcccaagttaaagcaattttcttgcctcagcctcccaagtagctgggactacaggtgcgtgccaccacgcccggctaatttttgtatttgtagtagaagcggggtttcaccatgttggccaagattgtctcaatctcttgacctcatgatccgcccacctccgcctctcaaagtgctgggattacaggcgtgagccactgcgcccggccaacatgtggaagttcgaacatgtatttccctggttgattaacaagacagaacatttttcatatgcttttgaccatttagatttcctctgtggggaagtgcctgcttaagtattttgctgattttccaattgtgtgtgtgtgtgtgttttcatcatattgatttgcagtaccttttaaaatctagatacacatcctcttcagttacttgtgttacatatattttccccaaaattaatctattaaaaatgcatatcagatcctgtcatgtccttgttcagagcaaccctccaacattctcccaattgcacttagctgtaaccaaatctctatgattctcaaggcactatgtgatctagtccctgcctacctctctgtctttatctccttccctaagcttcagcaacactggccttcttttccttcctcaattacgtgtgtgagacagacttgcactccctcttttgcacagtttggacaagtgccagttcttagtgaatgctcagttgcacctctgcacttctgcaggaagttgaaaggcccacctgcaatgttcataacctagctctgataaaatgttttctggcagttgtgcaaacccaggaaaaaaaaattataatgaaaataaccccacccataaaaaggtaagagaaaattaggtaatatctattgctaaggcttatatccaatggaaaagcaccaatttaagtagtagaccagatgtcacacattaggagaattagtaagtatagaagaagccctgtaagtcgggtgcggtggctcacacctgtaatcccaacactttgggaggctgaggcgggagaatcacttgagtccaggatttcaagaccagcctgggcaatatattaagatcctatctctacaaaaaattacgataaataaaataagaagaagcccttcagatgaggcaaagtcccacctaatcctggctgcaggtctattgaaggccacatattctgagcagcttgaagcctaggaaaactgcattcctgggaaaaaaacaccgataggaaatatcccacctgaaaatatagggtatttctctatcttccattagaagctcggtacttaagttccatactgttttttagcagattaacaataattaaaggtctattatgaaaatttttcactgaatctgacccagtcaaaccattcttataattcatatcaagcttgtcttgtctcaaggtattacattactattctttttttaaatagcagctttattaaggtatgattcatataccatacaattcacccatttaaagtatatatttttagtatattcacagaattgtacaattatcaccacaatcaattttagaacattttcatcaccccaaaaagaaactctgtacctctaagcagtatatttgctcttccttacccaccccacggattgctagtccgcagatttcacaagtctgacaatttcttggcaaatctcaagtaaaacattgcctctctagagagaccaccttactaccccttttaattcttccttgaatctgtggaggatggtgcttgttgtttatagtcattccttctcccttcctcttcttttttaacagaatcctgattttgttcaggtatcagatggccatgtgctataggggtattcagactcatgcccatcctgagggatgaattatgattgatctaagtcatatctcatttcccttggtaatgattggtttaatcatagcaagtgccatagtactgaggatgctgctgtgagttcttctaggcaaagattttgtgttcttaacaagagagatgtgagaaaaatacaagtacatgttacctgcctccaggaactttagtgttctcctaccctaccctacagtgttatatttcattcaacaaacaactgagtgcttagtatgtgacaatgcattgcttatttcttaaacagtggcaaaaacaaatgcttgagaatcagaaatatactcaattttactttctgtctaacatgtctaatgccaattccagctgtcacatgcgtatttcacaagtaaaatggaataagtcaaataagaggctcaaagtaaagcaatgaactagaattttcctaacttgcatcctcagtgcaaggatgtattgcttggacctgcagagccatcttgaaagcatgagaggaaaactcaagggaatcacagaggttctgagcaggaattataatgtcattaagccactgaacaaccaaccctggaactatcctattctgacctccctcctcttattctgacctccctccctcccccgcttcctctcttcctctcttccttctccttccttccttttctctctctcttttttttttttttttttttttgagacagtgtctcactctgttgtccactggagtgcagtggcacagtcttggctcattgcagctttgaccccccccaggctcaagcgatccactcacctcagcgtcctaagtagctgggactacaggcatgtgccaccacagctggatatatatatatatatatatatttggaagagatgaggttttcccatattgcccagtctggcattctgacttttcatgtgagattaaaaccttatttttttctaggacataaccaaacacaataatatttgcagtggaaggctttgtggtttgtggtggaaagactcttagttggccccacgatccttgcctccccttatgtgatcctttccccttagtgtgggcaggatctgtggcttgcttctaactgaaagaaacagtaaagatgatgggatgtatgtgattgtgtgtacatgattggggtcatgttacataagatggtagcacccatctttctccccctcccccagtttagctttgagggcgcagatggccatgttagaggactctgcatggcaagaaatacaggcagcctctcagagctgagggcagcctccagccaacagccaacaaaaaacttgaagctctcagtcctacgacctcaaggaactgaattctgccattaacatgagtgaacttggaagtgagtccttccccatctgaacccaggtgagactgcagtccctgatgacagctcgattgtagccttttgagaccataagcagaggacccagtcaagccatgctcagactcctgctacttggtaaatgtgtattgttacaaaacaatgaaacgctaataagggtatggctattcacaccttttccccctaatttttaaaatttatcaataaaaattattattaaaaaatataaataggctgggcgtggtggctcacgcctgtaatcccagcactttgggaggccggggtgggcggatcacctgagatcaggaattcgagaccagcctggccaacatggtgaaaccccgtctctactaaaaatacaaaaattagctgggcatgatggtgggcgcctataatcccagctactcgggaggctgaggcaggagaatcacttgaacccgggaggcgaaggttgcagtgagccgagatcgtgccactgcactccagcctgggtgacagagcaagactccatctcaacaaagaaacaaacaattaaacaaacaaacaaaccaaaaaaatatataatttaaatagcttcactctcctgttcacctgttcaactcctcactcctcttcccattcattaattgattccacatttatccactcttcacacagaagagtctgggcagcaaatacaggaaaatccttttggcttcagagttttttgggcttccaaattgcagataaaggactgtgggcttttagtatatagccatagaatcactgggggatggaacaagacactatctgtaaaggcttggaacaagattcagcacacaggaagggctcaataaataatagctgttatggtgattagaattagaactcctggggcaggtctctctgactgctctgttactccttgcaagtcacttcctttctccgggcctcagtttccccatttttaataggagggcccctcagagaagctctcaaaaagagggttgagctcctgttctggaggtggctctggactgggtgctcatgagctgcaatacgaattgctcctgagcgaatggtacacagtctgtttgcggccttagtttgtggcaagcctggggaaatggcttctccttgcctaatctcaggttctctactgtcaaatggggccagaaggtcactcccacctaaacacatgagaaaagaggcaggacaaggtgtactcactctggactgggcttgtttgttttttaaaatatcatttgaggggaagaacagatgcaagggtttgcctggcttctcctcatatacacaaaagaaccccccaccaccctaatcccaacccccatctccaccccagcacagagcagagaggagtgactccttgtctctggcctagtcttctgtgcaattggagtgagggctgcaggtcttcacctgcccagaccaccacacccacctctgcattccccatttcttttttttccttatttatttatttatttttgagacagagtctcgttctatcgtccaggctagagtgcaatggcacgatctcggctcactgcaacctccacctccagggttccagcaattctcctgcctcagcctcccaagtagctgggattacaggcgcataccaccacacccagctaatttttgtatttttagtagagatggggtttctccatgttggccaggctggtctggaacttctgagctcaaatgattcaccccccttggtctcccaaagtgctgggattacaggcgtgagccactgcttccccatttcttatgcagtaatgatctctatcagtgttcctctcctacctcccccaccagactgtgagttcacgcctagcaccctgcgtgtacctcgataaatgtggaatcaatgaacaaatgggaagaggagtgaggagtttaccaggtgaacaggagagtcagacaacactttcagcctgggcgtgcactcagttgacagccccacagatgttcagcagtggtcaaatttgagtacattttgaagactgagcccagaaactcattgaaggattagaggcaaggaggtagagattggaaagagacaaatcaaagctttgttcattcattcattttcaattagtaattattggttattcactaggtatcatgtactgtttaaagtgtttcaggcacagtggcaaacaaaagaaaagtccctgatttcaaggaacttacattctaattgatggagacaagcaacaaacaaacaaattaagatattacagagtgttaactgctaagagaaaggtaaaagagggtgatgtaacagatttttaggaagaatacatgtggctgaaaacccaactcaaaatggggtgtctcataatatccagtcatatgtaccataatagctttctaaaatcttgaaaattttgaattctgagaattgcctgtcctcatgcactttgaataggctttatattactatccccatattacaggtgaaaaaatagaattactaaggagtcaagtgattcattttaggccaaaataaggattcagaagctgtagtcagagaccaagctcttagtgacacagcctccgtggttctgagattcaagagcctgtgatactaagatatcaagtgttatcactgtcatcacagcaatgcaagattgaaggcaacagatccaggcccaaaggtcctgcagatgcaatgctgcttgccaccaccatcacctccttctcggtccctgaagggcttcccaccttgtgaggaagctaaagattctagaggggattaaggagaggcatagccttcggggaagccaccaccaggctctaacctattcaaaacatgctgcaattcactccccaaagccccctccattcttcacactgctgcccaaatggtattgaggtaggaggtgggactcaactccagaccagattgaagactggctgaaacagagaagcatggaaagcacttcttcataagacactcctaccagtgacgcgacagtttaccattgctgtggcaacacctagaagttagcaccactctctctggcaatgacctggaaattaccaccccttttctagaaatttctgaattacctgccccttgatttgcatgtaattagaagtgggtataaacatgattagagaactgcctctgagctgctcctctcaatacactgcctatggggtagctccgctctgcaggagcagtcatggagctgtcacactgccacatcagaaaagctgttttctggctgggcatggtggctcacaccgtaatcccagcattttgggaggccaaggtgggagaatcagctgaggtcaggagttcgagactggcctggacaacatggtgaaaccccatctctactaaaaatacaaaaaatatccaggcgtggtggggagcacctataatcccagcttattgggaggctgaggcacgagaatttcttgaacccaggaggtggaggctgcagtgagctgagatcatgccactgtactccagcctgtgtgacagagcgagaccatgtctcaaaaacaaacaaacaaacaaacaaacctgttttctactatcagctcacccttgaattatttcctgggtaaagccaaggacttccccaggctaagccccaattttggggctcacctgtgttgcacgggtatcattccccttctttaaaacttcaatactgtcatttcattttgaataagattcaaagtcaggtgtgcaagtgagtgtgtgtgtctgtgtgtgtgtgttgcttcttcacagccctgatgcatcaaagttagtttgggtttttttgttgctatgtttttttagagataaggtctttctctgctctgtcaaagacttcaggaagaaaaaaagaaaaagagggcctcactcactctgttgtctaggctacagtgcagtggcatgatcataactcacagcaacctcaaactcctgggctccagggatcctcccacctcagctatgactacaagcatgagccaccatgcctgaatcagacagtttgtttgggggttttttttgtctttttttttttttttttttttttaagatggagtctggctctgttgcctgggctggagtgcagtggcacgatctcggctcactgcaacctctgcctcccaggttcatgccattctcctgcctcagcctcccaagtagctgggactacaggtgcccgccaccaaacctggctaattttttgtatttttagtagagatggggtttcactctgttagccaggatggtctccatctcctgacctcatgatccgcccacctcggcctcccaaagtgctgggattacaggtgtgagccaccgcgcctggcttctttttttttgagacggagtctcactctgtcacccaggctggagtgcagtggcacaatcttggctcactgtaacctccacctcccgggttcaagcaattcccctgcctcagcctcccaagtagctgggacttcatgtgcacgccaccacacccggctaatttttgtatttttagtagagacagggtttcaccatgttggtcaggctggtctcgaactcctgacctcaagtgatctgcctacctcagcctcccaaagtgctgggattacaggcatcagtcactgcacccagctgtttttttttttttttttttttttttgagacagagtctggctctgtcactcaggctggagtgcagtggtgccatcttggcttactacaacctctgcctctgaggttgaagagattcttgtgtctcagccttccgagtggctgggattacaggcacctgccaccacatgccaggctacattttgtatttttagtagagatggggtttcgccatgttggccaggctggtctcaaactcctgacctcaagtgatccacctgcctcagcctcccaatgtgctgggattacaggcgtgagacaccaggcctggcccaaagacagttttttgatcgtcaaggttttacctgatttgggcccaggctcagccaatcccatttcctcctactccctgctccattcagccacactgacctccttctgtccttcaaatgctatcaagcacatttttacttcagtgcctttcttttccctctgtctctaaatctctgcatagctgcctcctttttaatcctcagatctcagcagaagtgtcacagcgtcagagaagccttccatgaccacctgagcaaaaataaatctctctctttctctcaatccgtcctccccatcttgttctttatagttcgtatctccatatgctgttttgtttgtgtgcttttctatctctcacactagagtgtaagctcctagaggacatattcatgtactgatacatcccacctggtatataacaggtattaaatatttgtttgaatgaatgtaagtaatggggtttgaaagtctgattatctgacagaaataccaggcatttgattccattgcaataaccagtaattgtgagttaggaattacataactttctaaaaataaaaataacaagtgaagctaatcaaaaaaagatggtggtttaagctgtcattgcgctggctcccagcatcttagtgaaagaccacaattgtcatccctctcactgttatgaaactataataggctgggcacagtggctcgcgcctgtaatcccagcactttgggaggctgaggcgggaggatcacctgaggtcaggagttgaagaccagcctggccaacatggtgaaaccccatctctaccaaaaatacaaaaaaaattagctgggcttggtggtgggctcctataatcccagctacttgggaggctgaggcaggagaatcacatgaacccaggaggcggagattgcagtgagccaagatcacaccactgcactctagcctgggcgagagtgtgagactgtctcaaaaaaaaaagaaaaaaaggaaactataataattattattttggctcagatgaagctattcttattaattttcaaaatgtttttgatatttaatccctttaccaaaaaaatcagtaatctgttgatgagttacttattttctaatttctctccttctctactctaggctctgagaagctgacttttattgatcgcataaacggggatgctttgagctctaacttctggttggctgaagcaatgacagccgacagcaggacatcaaaaaggggatgaagaatggagcttgaagggtattcctgtagccccttcctggctggatcacaacaggctggctaggttgccttatcaaactgaaaccgcctttgcaaaattatcactgagacggtgaaagagttttaacttaaccgactccatcttgcttctaacctccttgttcgttcagcataggctgaactaactttgagagaaacttatagtttaaaacaaagatgataacagccctttcccaaagcacacctccttcttgcctggggactagattccctttgtaggactaacattagctacaagattagaaattatggtttaagagtcatgcaactrgaggcttcaagattttcttcaaatatctcagtgcttgagatattttccagaccctgcaattgccggatcagctggcaccacccagatggataaactggctaatctgatcttgtggctcccacccaggaagtgactcagcacaagaagacagcttcaactccctatgatttcatttccgtcctgaccaatcagcactcccgggtcactggcttcccccaacccaccaatttatccttaaagattctgctcctggctgggcgtggtgactcgcacctgtaatcccagcacttttggaggttgaggtgggtggatcacccgaggtcaggagttcgagaccagcctgaccaacatagtgaaaccccgtctctattaaaaatacaaaattagccgggcgtggtggcacatgcctgtaatctcagctacttggtaggctgaggcaggagaatcacttgaacccaggaggcagaggttgcagtgagccaagacagcgccactgcactccagcctgggtgacagagcaagactctgaaaaaaaaacacaaacaaaaaaaaactctgctccccaaatgcttggggagactgatttgagtaataataaaactgtctcccgcacagctggctctgtgtgaattactctttctctattgtaattcccccgtcttgatgaatcagttctttctaggcagggggcaaggtgaaccccttaggcggttacaaattcaaaggccacagttcctttcaggtggcttcacctgtggtcactctggcaaggttttggttttgccctccaggaccagaagaggtaaggtcttcctgctattgtagcgctatggtattgaactacctttacccttgctctgccctaactctgtccacacctttgggaacagctcctttattaacatctccttgcttctcctgtttgaacttgcccaactcttaacctgcttggatcctgagtcatccattgtatgactcagactcctgagaatttgaaagtcacagatctctaacctagaaacaaagcaagtgtttctagccaatgggaaatttcaacaatgtataacaatccatgagcatgggcactgttatttccaatttggagtgtgatattataaaacaagctatgaaaagaaactaaataaaaagacgtgttattttctcaaaggacacttggagagttaagagcaatcctatttgaaaataacctacacatggtaggataataaagtaggggctcacttggcttagctccgttctgttcttgcgaaagcacacattcatataaataagatatacttgttttatatatatttattgtattttaaaacatgggtccacatacagctcatatattacattatgaattaacagcatgatttaagaaaagtaattttgttaattatttttataaaacaaacccagaggccgggtacggtggctcacgcctgtaatcccagcactttgggaggtcgaggtaggtggatcacaaggtcaggagttcgacaccagcctagccaatatggtgaaacctcgtctctactaaaaatacaaaaaaaaaaaaattagcctggcatggtggcacatgcctgtaatcccagctacttgggaggctgaggcgggagaattgcttgaatccgagaggcagaggttgcagtgagccgagattgcgccactgcactccagcctggagtaaagtaaaacaaacccacagcaacaatctatgataacgtttactttgtatggtagctatggtaggaagtggaggagattctgagctagaggaaactatattaaagtgggcacagcaaacagagaggagaaaaggaaaatatcttgcccttagcctaaccctgcctacaaatcacttaccatacactagaaaagactttcattcccaataactttgcattcaaagataaaccatgaatagcgggaacctcctaaaagccttgactaacgggaaatcctaaaagctttgcctccagagataagccacaaaaacaagaacatcctgttttccttaccacaaaacaggaacatcttgttcttatccaattggaatgaactgccatatctgagctataaatatctgccatttcatctgagctataaattcctctattctatttagcgagccactctctgaaagtctgattttcttgaactgcaagtaaaaatgtctctctgtgctcatatttgtctttgatttttattttgacatagggttcctgaactgatttttggggggggaaatcctgaagttggacgcacccagggctggcttcatgggtgggcaaaatgtgcagtcacacgggccccactctgggtttagtgctctgctatcaccatcttaaaattcgtaatttctttgttttttttgaggtagagtctcactcttgttgcccaggctggagtacagtggtgtgatctcggctcagtgcaacctccgcctcctgggttcaagcaattctcctgcctcagcctcctgagtagctgggattacaggcacctgccaccacgcccagctaatttttttgtacttttagtagagtttctccatattgcccaggctggtctcgaactcctaacctcagctgatccgcccaccttggcctcccaaagtgctgggattacaggcgtgaggcatgtgcattttagctttctagatcaggtgagggcacatggacaaatggctcaagggtcaaatccagtccactgtctgtttttgtatagcttgcaacttaaggatggcttttacatttttcagtggctgaaaaagatcaaaagatgagtatttcatgacagttgaaaattacataaaattcaaacttcagtgtttaggataaggttttattggaacagagacccacccattcatactgtctatggctaattttaagatacaagttgaatagctgtgaccaagccagcatgacccacaaaacctaaaatatttcttgtttggctctgggaagctaaaagacaacaaagaaagaattctccaaagatactgagtttctttgggagtgaacaaaaagaattataatccaagatgtacagctatggcaagccacgggtctggagaagggaagaatagggggaagattttactggtaaaggagggaagttcacataaactcttggaaacwaagttgattggttcccaaggctcaaatcaagaattggagtccgttcattggtggaggtcctgctgctgggccaaacgtcctttcgacagtatcttatctgaactgctgcagttttaaagaatatttagcaataaatcttgtcatagaaatgtgcgcatatttgcaaaacaagcaagttgtgcaaaacattaaatgcatgaaagatgtgaagaaattgtgggttttttggtttattttttaaagtccttgaggcagttctttctttctttttttttttttttgagacggagtcttgctctgtcgcccaggctggagtgcagtggcacgatctcggctcactataacctcctccgagttcaagcgattctcctgcctcagcctcctcagtagctgggattacaggcgcccgccaccacacccagtttttttttctttttttttttgtatttttagtagagacgggaatttcaccacgttggccaggctggtctcaaactcctgacctcgtgatccgcccgcctcggcctcccaaagtactaggattacaggtgtgagccaccgcgtctggccttgagacagttcttatctcagacatacaagcatgagtttccttcctttctggtctctaggctccaatttgtctgggtctgacaatagttacttctcctggaatctgcaactttcagagcactttatggaaaaagtcggccaacccctgccctacactcactcttgatcactctccagtgtagccatcccaaactatttgcagaccacccttttctctctgatctgtatcccacccccccaaccatgggtgcttccatagaactaaccccatctaagcatttaacagttattctaattgcccttttacttgtctgacccaagtgttcgccactcaatcctcagcacccagcacgatccctagccctcgttcagcgcttaataaatccatgttgattcaatgtgtagcatcctgaacaggcaacagcagtgggttccaactttcaaggagcttaaaaaaggaactcagcatacaaacaacagactaatctacaaggaagaatgaggggggtggagggagcactaaaaagcagcaagtactctgcagcagaaccaaagataaaattccacctaaaggtgccctttcttcaggatccttcctaatttgaatacaggttcccttctcctccatgacgaaattcttagtgaggttacttgttggtacgcagtgtcctcatctgtaaaataaggctaaataattacgatttcaccggattataatgaatatggttaagtattgaactaaggcctagaaagcacgtagctcagtgcacgcttcctagaaagtgctcagtaaactcggatcctctaacacgctccgtttgatgttaatggagtccgtatccgagcgggtctccagtgtgcatcgccaagggtatggcccagcatccaacgcatccttttagtaagagtagcgacttctcagcgctcccttcgccccaggagagttctcggctcgcggcgtcgcggcggggctgcgcgctgggctgaactcccaagaaacctcctgcagctgaaccggagcagacgcccgccaggtgaaagaactacaattcccgtcacgttgcatccgagtttagggcctctttatagtttatcacacccagcctcttccgcgcagccctcagtggctccgccccaaagggggctctcttctttccttgtggagtccgaagcgtggccacgccccggtcaccggaaaaatccgtgtgacgtcacaaaaacctacgcgtcgcgcggtgggcgggagttggcggacggtccctggctgggttctggaggccctgggaccgcggaagaggcttcagacgctgcagcgatgcctcgcccacggcgggtcagtcagctcctggatctgtgagtctaccctgtcccgcctcccttcgcgccgccccagcacctcctccaaacggccaggccctgcgctgctcttcctccccgcccctttcccaccccccccgccgacctctgaagaggccccgcgtgtgtttctgtccctgggttcctgatctgtcgtttcctggctgaggacagttgtgcaaagtgggtctcttggcgggcttgcccctccaacactccgctgcgcgatgagcgtccattcctccgtcagccttgacagctcggcgccccggctgttactggcagtggcctctctcttagcagctaaaagccttggtagaaaaaaacacaacgctagatgaggttctcaaaagcttctagcagaattccacccctgtaactggaataaacattgacagaccctgggataaaggtaacaaagtggttaagaccacggatccctggctgagattgctgggttcagcccccggctctgccattcaccagccacgtgaccatggaccggtaacgtaacctctccctgtgcctaggttctttatctataaaatttttgtgataatagcacccatcacatggagttgtcctgagggataaatttaaaacatgtaaaacccttataaggatgcccagcaaataataaacaccactaagtgttattgttattattatttcctaccagaaattgtacggaaatggaagttacaagggcaattgcgtctctccaggagctttcagtccgttaatattgccatgtaaaaaacagacatcttaaggataaggagaacaatctccttaatctactgaaggctttctgaaacaatggcatctgatattttacattaaacttgggaggccgaggtgggagaactgcttgagctgaggagttcgagaccagcctgggcaacgtggcgaaaccccgcctctactaaagatacaaaaattatctgggcacggtggttcacgcctgtaatcccagcactttgggaggccgaggcacttgagatcaggagagttggagaccagcctagccagcacggcaaaaccgcggcatgtactaaaaatacaaaaattagccaggagtagtagtggcgccggtagtcccagctactctggaggctgaggcaggagaatcgcctcaacccaggaggcagaggttgcagtgagctgagatcgcgccactgcacgcctaggctgctaggcgacagagcgagactgtctcaaaaaaataaaataaataactataatatatgtagaataatatcacaagcgggagagtaacaaacttttgaaatttctaataaggaaaagaataggagaaagctttgtcaagggggttatttttgaacattggtagtatctgacggttgcaaatgggaggaaatgtatcgtagagagtgaaataaaaagagtaaaggtttgacaggcaggaaaggtagaaatatgagagaagaccagaaagtagcgctccaatgtgaatggaagatacaatatgaatagcacagtagtgagacataaagccaggtcattgggaatagaatcttagggaccaggatgaagtaagagcatttcctctttcagtcatggggagctatcaaaggttttagaactgtactgtgagcagagagagatttgaattaggcagaagttggaaatagggagacacttagaagactgttacaaaatcttaagaggtgaagagcccaaaccaggagacacatgaagatgttctttgcagaattatttctggtggcatggagctggaatgggagagttaccatggaatattatgcagctgttagaaaagcaaagggtaggccaggcatggtggctcacacctgtaatcccaacattttgggaccctgaggagggtggattgcttgaggccaggagttggagaccagtctaggcaacatggcaaaaccatgtctctaccaaaaataaaaagttagccaatctcataacctggtctcaaaataaataaataaatgaaagaaaagcaaagagtagattcatttggatagaattttaaaacacagtgcttagtgaaaaaaagaggaaacagactaacaatgttaagaaaaattcttcagaacttggggctaagacagggatgactacatgatcttcattgtcatgctagagtgtggtccctaggtaaaggtccatatttgcccttagaacctaattttgtacccttctgggacaaggtacagtctgagactggcagttggtcagcaagctatttctggtttgtaacaaagtaagaagcttgagccagactagtaattaagtgtgtcactaagcacattatttagtccagctgatgaggctttctccatgaaggaaacagggcttggtttatgttcttgcataaactccttatctcctcactgaccagcactttaacactgctttagagaatcctttggatctgggacatgaatagttttgaatagagggaccgaggaaagagaagaattagaaattactcttttagttgggggccgtggctcacgcctgtaaccccagcactttggaaggctgaggcaggtggatcacctgaggtggggagttcgagactagtctgaccaacatggagaaaccctgtctctactaaaaatacaaaattagccggccgtggtggtgcatgcctgtaatcccagctccttgggaggctgaggtgggagaatcgcttgaacctgggaggcagaggttgcggtgagccgagcttgcaccattgcactccagtttgggcaacaagagcgaaactccgtccccccaaaaaaaaaaaaaaagaaattactcttttagttttagcttcgttgacaggtagaatggtgattagactattatggaggaagaagtgtcttacggggaaaatgaatcagaatatccagtagaaatatcaagcaggcagttagaatataattttgaatctgaaagaaagatcaaggattaggctgggtgcagtggctcatgcctgtaatcccaacactttgggaggccgaggcaggtgaatcacttgaggtcaggagttcgagaccagcctagccaacatggtgaaaccctgtctctaccaaaaatacaaaaaaaattaactgggcatggtggtgcacatgtgtattcccagctacttgggaggctgagacaggagaattgcttgaacccaggaggcggagcttggagtgagccaagatggtgctactgcactccagcctgggcaacagagtgagactccatctctaaataaataaatacataaatacacaaataaaatgaagagagatcaaggattgaaactaagattgggggtataactttgtagatgataggaagccatggttaagtttaaaagagggctatagagagaaaaaaagaaagtcaaggacaaaattttatgtaacacttacattagaagcagtccatgttgccaaaactcttttatttgttagatcaattcaccatatgatgatttggccaaatagtaataggttgtttcttttaagtataaaacgtagagcaactaatattggttgggatatccacccgtctccccaattgttttacagcttttaaagattataagttttagctgacttcttttcattttgtcttgagaaatgagactgcctgtgccaactgtggggcctgagaatcaacaccacttatgtcaacctaactttttgctctaggaaatttttgcaaatcagtttatctaaataaacagctatcaggacaaacattttgatttttaggacaaacattatgtttatctggacagattgctcatcaagcctggctttttgtgtccatccgttttaaactaagtcacaaactttgcctaatccttacccattcgccactgtggggggagaagcacccacttaaactggtggcgtttatatcccagaaacttatgtatactcttgcctaacattcctctattgaaatgctaccaaaaccctgtcaagatgatctcccttgctgtagtaaatgtaatacatgatttgacaaatttaatcaatttgtttgaccagcagggtttctggatgggctttgtggccattcaatagtcctcccagaattttaagaactatttgatttgtttctgtcccaactccctgctattgcagctggagggaactggagcagaaagaggaaaccatttactttgggaaacacatggtacagcctctgcactgctgagctcagagaagagcatactaaagggctaagatgaaagagactgagagaaaaaggtggcggtggggggcagagagccatgttgtaggaaaaaggtaacatattgaaatatacctgaaatcttgcataaagcaaaatacagtagtctctccttatgtgctgttttgtttcggcagtttcaggtacctgcagtcaaccatggtaaaaaaatatatatatatgttaaatggaaaattctaggaagaaacaattcataaattttaaattatgcaccattttgagtagcatgatgaaatctcatgccaccctgccctgtctgcccaggatgtgaattctgccttcgttcagcatatccatgctgtccatttagtagccttcttggttatcagagctattgtcgcagggctactgcattcacataaccctgatattacttaacaattgcaccagagcacaagagtactgatgctggcatattgttacatgtattttttatttttccacccaatccttgtagatgttgttataactgttctattttattgttgttgttgttcatctcttactgtgcctaatttatatattaaactttaccacaggtatgtctgcatagtaaatgcagggtgtatatataggatttaggattcagtactatccatgatttcaggtgtccacagggagtcttagaatgtttttcccatggataaaggggatctgctatataacaggagtgattgtcagtcacttcaaatgctttacttttctctaatcccctactcacagaggtcatgtgcaagaggaacaagagcatttttataaagtttacacagacttaccttgtttccttgcttgactggtgtgggtcactgtaggggtacttggtgagcagtatcctcaaccaagtggtagttatctttgttatctagggcaggagttggtaacctttctgtgaagggccagagagtaatattttcagctttgtaggctacacaccctctgacacagttactcagctctgccattgtagaacacaagcagccacagacaacacataaagaaatggcagcagcctgaggatgataaggggtgtgaaacatctgttgaataccttgactatcggctcattgttgagcaacctttgcagtaaaagacctatcattgtcagagtgaaagtggtctgctttgggaggccgaggcgggtggatcacgaggtcaggagatcgagaccatcctggctaacatggtgaaaccctgtctctactaaaaatacaaaaaattagccgggcatagtggcgggcgcctgtagtctcagctactcaggaggctgaggcaggagaatggtgtgaacccaggaggcggagcttgcagtgagccgagatcgcagtggtctggaaaaccaaaaacataacacactttgatcagtgtggctggagttggttgatcagactgaaaccatgaaaccataacctgaaaaaatgtcaacaactgtaacacattaacaatagccccaggggtggtgtgtgtgtgcgtgtgtgtttgtgtgtgtgtcagtcaaaggcagtgttccaataaaatttgatttctttcttgttttttgagacgaggtctcactctgttgcccaggctggagtgcagtggcccgatctcagctcactgcaacctctgcctcccaggttcaagtgattctcctgcctcagcctcccaagtagctgggattacaggcatgcactaccacacctggctaattttttgtatttttagtagagacagggtctcaccagcttggccagcctggtcttgagctcctgacttcaggtgatctgcttgcctcagcctcccaaagttctgggattacaggtgtgagccaccgtgccaggcgtaaaacttgatttctgaaaactagcagctggctacatttgtcccacaggtcatagtttgctgacccctgatccaggtttcagtacaacaagagaatccaggtggctgaaccagaattaagtttgaatttcctaagttcccttttgccagactgccacccagagagtgtaccaaccaggctgacttggagtcattgtttggagaaagaaagctgcatatcatgcccaggaattgtcagagtggaatcccagaatatcagactaagtctagcaaaccctccccttttcatcctgatcattatataggaggtggctaggagactatgaaccctttcagggtgccttttttgtgaccaaactaccttactaagatgcatggaccaggagagtgtgaaggaggtagagtcagaaatttcttttagtggattttttaaaagtccgttttacttcttgttggagccaacaccctaaggatgataaggggtgtgaaatatccgttgaataccttgacttattggctcattgttgagcaacctctgcgcagtaaaagacatatcattgtcagagtgaaagtggtctggaaaaccaaaaacataacacattttgatcagtgtgactggcgttggttgaacagactggaacaatgaaaccataacccgaaaaaatgtcaacaactgtaacacattaacaatagccccaggtgtgtgtgtgtgtgtgtgtgtgtgtgtgtgtgtgtgtcaaaggcctgatatagtcaacttgtcagaagtaagagggaccacacaccataaaatacggtctatttcactgagacaaaacaggctgacttttgaaaggaagcacaagaccagcatgcaatggtagcgtcagatacatgtaatctttactctgttcctaggccatgatggcagataatgttgctatgtgcagtgtgttgttacagtgtgcagactgctgatcctggcagcagtggcagcagtctggatggtgtatacttgattagcagcatcattgcagtctattccattagagaatgagccattaccatggacatctgtctgattctctgctgtgatttgttttcacagttcacagtcctaaagaggagtgtctgtaatccgctagtttgttttcttccaagtggcagaccaggtaacattgtcaacagcccaagagtcagtaaaaatataatatgccttgaccaaggacgtgttgtttgttgactaaggcagatattggcaaactttgtaggctccacctgcagtgtcactttagcctctcttccccactgaagactttacccagacctcatcagttgcatttggttgcctttttcccctaagggatcagagaccaaggagcttaatgtgtgcccaagttatgaattatagcaacagccaacaggagactgctgttcaccagctggaagtgtggggaatgcagagtggcagggaggttggctcacagggaatgctgagggtgttgaggatgatatttccctcttgctgtccactcctgtattgatgccaccccagtattgatacctgagcatcagatacccagcttcctcccctgggtacctcccattgagcatccaaacccggaagtccttctttttcttccccagtggaaaccgctacattttactccacggtccttgataatttcggccacccatatgcccagcaccccatcatcctcaccaatcaaatcagactgtcgcaggagccagatatataagcagctggctttgcactgttaggcaaggctctgcattcacttttgttttgagagactgctcacctgtggctcaaccaaataaatgaggctggtctcaaactcctggactcaagagatattcccacgttggcttccaaagtgctgggattatagatatgagccactacacttggcctacaattctgctacaatttgacttctaagtctatacccagttgaattgaaactgggtactcaaatacttgtacatgaatgttcatagcagcattattcacattagccaaaggtagaaaaacccagacagatgtccatcaattgatgaatcaataaacaaaatgtggtatatttgtatagttgaatgttattcagctgtaaaaaggaatgaaatactgatacatactacaatgtggataaaccttgaaaacatgatgctaattgaaggcagccagacacagaggccacatattgtataaatccagataaatcaatagtgacaggaagcaaattggtagttctgaggtattacaacccataattggtatttgtgagaaaaaggaggaatggggattgacttttttttttttttttgagacagagtttcactcatgttgtccaggctggagtgcagtggcacgatctcagctcactgaaacctcttcctccatggttcaagcgattttcctgcctcagcctcccaagtagctgggattacaggcacctgccaccacacccggctaattttgtatttttggtagagatggggttataccatgttggtcaggctggtctcgaactcctgacctcagatgatccacatgcctcagcttcccaaagtactgggattacaggtgggagccaccacacccggcagggactgacttcttaatagagataagttttcttttgggctggtgaaaatgttttagaactagatacaggtggtagttgcacaacattgtaaatgtacaaaatgccactgaagtgcacactgtaaaatgattaatttcatattatctttcatctcaactttttaaaagaaaaaagtaaagcaatgtatgttgacaatgtcaaatgacaacggaatggaaaaattaaatgtagtatattcacacaatgaaatatatatatacacacatacatgtatcatctatatattataacatatattgagaacgaaatgaactgtggccgcatgcaaccacttgaataaattgcacaaacaaaaggttccattgtataactatattgtaattcattctatttactgtggatggtaatttgagttgtttttagttctctctgttacaaacaatgctgctgtgagttttgttgtctacatcttctgactcaaaagtgcaaggttttccagggttgatacctccaactggaattgctagatcttaggatctatacatctttagctttactagataaggccaaacagttttctcagatgcttgtaccaaattacatgcctactctcaatgtttgagagttcctgttgactaccatcttgaccaacatttgatgttctccatacctttctgaagtctttgaagtctctaaagagatagggaggcttgataaaatgctacataagttcttacaatcactagatctacagtgagcaatacaaataacatattgtatattccagaacaaatataattttatatgtgtataattgtatatatttttacttccctaacaaaatgtctaaccttttctctacatttttgaaatttctgaaaaatttgcttttctgatcctagtgatgcttaggaaagattttatatcattaaaaagaaattgggaggtcacttccaagatggctaaatgggaacagctccagtctgcagctcccagcaagattgacgcagaagatgggcgatttctgcatttccaactgaggtacctggttcatctcactgggactggttgaacagtgactgcagcccacggagggcgagctgaagcagggcagggcgtcgcctcacctgggtgcaaggggtcgggggatttccctttcctagtcaagggaagctctgagtgactgtacactcctgcccaaatactgcgcttttcccacggtcttcccaatcagcagaccaggagactgcctcctgtgcctggcttggcaggtcccatacccacggagccttgctcgctgctagcgcagcagtctgagatcgacctgggatgtgggagcttggcggggggaggggcgtctgccattgctgaggcttgagtaggcggttctatgctcacagtgtaaacaaagtggcaaggaagctcacactgggcggagcccactacagctcagcaaggcctactgcctctctagattccacctctggggcagggcatatctgaacaaaaggcagcagacaggtctatagacccaggcaaacagggtctggagtggacctccagtaaactccaacagacctgcagctgaggggcctgtctgttagaaggaaaactaacaaacagaaaggaatagcatcaacattaacaaaaaggacatccacaccaaaaccccatccataggtcaccaacatcaaagaccaaaggtagataaaaccacaaagatggggagaaactagagcagaaagcctgaaaattccaaaaaccagaatgcctattctccagaggaacacaactccttgccagcaagggaacaaaactggacagagaatgagtttgacgagttgacagaagtaggcttcagaaggttggtaataacaaactctccaagctaaagaagcatgttctaacccaacacaaggaagctaagaaccttgataaaaggttacaggaactgctaactagaataaccagtttagagaagaacataaatgacctgatggagctgaaaaacacagcatgagaacttcatgaagcatatacaatatcaatagccaaattgatcaagcagaagaaagaatagcagagattgaagatcaacttactgaaataagaggcaaagacaagattagagaaaaaggaatgaaaacgaacaaagcctccaagaaatatgggactatgtgaaaagaccaaacctacgattgattggtgtacctgaaagtgattgagagaatggaaccacgttggaaaacacacttcaggatattatgcaggagaacttccccaacctagcaagacaggccaacattcaaattcaggttgaacaatgagaacacatggacacagggaggggaacatcacacactggggcctgtcggggggttggggacaaggggagggagagcattaggacaaatacctagtgcatgcagggcttaaaacctagatgacaggttgataggggcagcaaaccaccatggcacatgtatacctatgtaacaaacctgaatgttctgcacatgtatctcagaacttaaagtaaaattaaaaaaaaaaagttaactataaatcttagttaccaagaaatcccagtttctgatactgcctcttgtgaattaaataagactgaattaaattagactgtctgtagacagattagaaggcaccacggaagagtcttgaattaaaacaagtttaaagtagcttgacactagagaagaatttatttaatctttcttcataacgaatgtgtttatccaggaataccatttgacccagcaatcccattactgggtatatacccaaaggaatataaatgattctattacaatgaatgtttgcttattgcacacatatgtttattgcagcactattcacaatagcaaagacatggaaccaactcaaatgctcatcagtgatagactggataaagaaagtgtggtacatataaaccatggaatactatgcagccataaaaagaaatgaaatcacgtcctttgcagggacatggataaagctggaagacatcatcctcagcaaactaacacaggaacagaaaaccaaacaccgcatgtcataagtggagctgaatgatgagaacacatggacacagggaggggaacaacacacaccggggcctgtggttggggggagcaagggaaaggatagcatcaggacaaatagacaatgcatgtggggcttaatacctaggtgtatatcccggaacttaaataaaaatgtaaaaaaaaaaatcagttcctggtggtttgtaagtcaaaaaggaaaggtgaaacaataaacttagtgaattcttgtagaagaaaacataggagaatatcttcatgaacttaggacagggaaagtttatgaacaggacaaaaaatcacctgctgtaatggaaaacactgataaattggactgtattagaatgtacttctcttcagcaaaagacatgattaagaaagtggaaaggcaatccacggaatgggggaatatatttgcaacgtatataacaaacagaaggttcatatccagcatataacaggaattcctatatatcagtaagaaacataattaacccaaaatgaaagagggcaaaatacttgagtagatactccacaaaagaggatatccaaccagacaataaaaagatgaatgtgtacccatattaatcagagattgcaatttaatgccacattgcattgctattatatacccactaaaatgactaaaatttaaaagattaacaatgccaagtgttggcaaggatatggaccacaagaatgctcattcaccaatggtaggattgtgattgggtacaaccactttgaaaaactggcattaagctaaacatatgcctaccctatgagccagcagttccactactagatatatacactcagttgaaacacagatacgtgtgtaccaaaagacatgtctaagaatattcatattgatattcataataataaagagttacaaatgacccaactgtatattcactgtagaataaattggtcaaacaacagaatattatacgttagtgaaaatggacatgaacaacgtgaaaatggaaatgaataatctatagctacatgtaacgatacagataaatttcacaaacataatgttgagcaaaagaaaccatggaaaaatgatggagcaatactgaaatcaaacagaatagtctctaaagtgaaaaacatgaatacggataaagagagacattacttaatgataaaaggaatattccacaagaaaatatcatgaatttgcaactgacaccagtcttacaaaaaggaaacctgtcatgtagtttagtcaaatttagtcacgttaggaaacttaataaactactcttacattttataaatacagaaaacagctcagagtgtggtcaggtggctcagatctagcagagttttccttatcccagtggattttgtagaatacactgccagtctcttgtctttcattcatcatggctacttctgatatccaggtgaaagcactggagaagtgtgcctcaggctaggcttttgaactgattctcagataccatcaaaagaatccatcccagagttccttatttcccctccaaagaagaaagatctttccctggaggaaattcagaataaatcagaagcttcagaagaaagacacaagccctgcgaagctgaggtcttgaagcagcttgctgaaaaatgagagcaggagaaagaagtgcttcagaaatcaataaaagaacagcttcagtgaaatagcagaagagaaactgacccacaaaatggaagctaacaaagagaacaggaaggcgcaaatgactaccacactggagtgtttgcagagaaagataagcacgttgaagaaatgcggaagagcaaagaatccagagatcctggtgatgaggctgaagctgactaatttgttctaagaactgactttctccccgctcttcttcctagatattcagactatactggccagtgtcattttattttttgctcctgacaaatattctagaagctgatgtaggactagataggtaaatccagcctgtacaatgttgttttaggagctaaagggaagaaactgaaagagttttactctttttctaaaatgttggtctttctaacatagctatttttcttgttgcatctttgctacttcagtacacttgggttaatggctagtactgtactggctttgtgaaacatatttgtgaaaagagtatgtagtggcttcttttgaactgtttgatacggaatatttgttcattttttaatcccaattctgtcctaattttaccagatgctactggacttgaatggttaataaaattgcacaatgttgttggtggcagtgacttctttctgttcaggtaataagttaaaaagatcctcctagtttatatttgtttcaggtagagcttttaggtcaatggaaataaccagcatacacattactgcaaagtctctgcttttgagtttcttgctccagagttgtttgtattgtcttctacaatcattgctttgtttcaatgcctggaccctgatcagctgttgctatattctttcaaatgtttatttgcaaacaatcttttttgttctgtgttcctgtttaaaaagcagattaaggccgagcacaaggctcatgcctgtaatcccagcagtttgggaggccaaggtgagaggctcacttcagcccaggagttcaagaccggcctgggcaacatatagagaccccatctctacaagaaatacagaaaattagctgattgtggtggtgcatgtctgtagtcccaactacttgggaggctgaggtaagaggatcacttgagccttggaggttgaggctgcagtgagctgtgattgtgccactgtactccagcctgggcaacagagtgagaccttgtctcaagataaataaataaaaattttaaaggcagattaaaggcacaaatggtgtttctagagaacaatttagagggaatcttaagatcctagttggagatatctggtggtttgcttgctttatgttacaggtggaggtgtattctaatgctttcctgccgtaaaagctataatttgagaattggaaaattttttgggcttttttctttacccccgactcatagtacagctttgagaatataataatattaaaaaagctttccatgctgctgtagcaactcctgtgaaatgatttaagggaactttatttatattttaaaaatcaataatttatttatagatatatgtattagtattaaaagtataattaaataatggacaggaactatttttaaaactttatggtagtaattgtctctacaaacagagatacatagagtaaaccagtcgcgtatataaaagtggctttaattttatcagaaaattttttttttctttttttgagacaaggtctagctctctcacccaggctggagtgcagtggtacaatcacagcttactgcagcctcacctcctggactcaaacaatcctcccacctcagcacccccgcaccccaggtagctgggactacaagtgaatgccactacacccagctaatttttgtattatttgtagagacagggttttgccatgtttcccaggctggtcttgaactcctgggctcaagtgagcctcctgtctcagtctcccaaagtgctgggattatagacataagccaccatgctcagccttaatcagaaatgttttatgtcttgagatgtctgacacaaatatgataaaagagtaacaaaattctaggtttgaggtacatagatgtatatcaccctgttttatatttctgtatttttgaaattttttattataaaacaacaagcaaaaacttgcagaaatgaaaagaagacttgattttaaattacaaatatcataaactagaaattccacatttagtagaaaaataagaatatagtagaattagataatactgtaaataaacatatatacattaaacatatttatgtgcaaacacatatacatacatggagagagatacttatacatacatatatatataacacacagagagaacattacatctctcacgtagataatatacattctctgaatatatagagcatgtatttggccacaacaaagagctcttacaaatttgtcaacaaataacaaaatggtcctcaaaaaactaaaaatggaactaccctatgattcagcaatttcaccactgggtaaatatccaaaagaaaataaataaatatataaaagagatatctgcactcccatgtttattgcagcactatttgtaataaccaaaatatgggccgagcatggtggctcacacctgtaatcccaacactttgggaggccgaggcgtgtggatcacgaggtcaggagtttgagaccatcctggctaacatggtgaaaccccgtctctactaaaaaagaaaaaattagctgagtgtggtggcatgcacctgtagtcccagctacttgggaggctgaggcaggggaattgcttgaacccggaaggcagaggttgcagtgagctgagattgtgccactgcactccagcctggcaacagagcaagactctgtctcaaaaaaataaaaataaccaaaatatggaatcaacctaagtgcccatcaatggatgaatgaataaagaaaatgtgatataatacatatatatgatggaatattattcagccattaaaaaataatgaaatctgctgggtacggtggctcatgcctgtattcccaacactttgggaggccaaggcaggcagatcacgaggtcaagagttcaagaccagtctggccaacatggtgaaaccctgtctctactaagaatacaaaaattagccgggcatggtggcatgtgcctgtaatcccagctatttgggaggccaaggaaggagaattgcttgaacctgggtggcagaggttgcagtgagccgacattgcaccactgcactctagcctgggcgacagagcaagactccatcttgaaaaaaaataataataaaataaaataataatgaaatcttagtcaagtgtggtaagcatgcctctagaagctgaggcaggaggatctcttgagcctaggaggttaaggctgcagtgagctgtgattgcaccattgcaccccaacctaggcaacagagcaagaccccatctcgggagagagggaggtagggaaggagggagggagggaggaagggagggaggggggaatgaatgaattctgtcatatgcagcaacatggatggaactggaggtcattttgttaagtaagccagacacagaaagacaaatgtcacatgttctcattcatatgtgggaactaaaaaaaagtggatatcatgaagatagagagtagatgggtggctaacagaggctgggaagggcaggggatggcggcatagagagaggttgattaatgggtataaatacacaaataaaaaatagtgttcaatagatgggtagggtgactatagttaataataatctattatacacttcaaaatggttagaagagaataatttgaatgttcctagcataaacaaaagataaatatttaaggtgatggataacccagttaccctgatttgatctttacacattatatgaatgtatcaaattatcacatgtaccctgaaaatatgtacatctattatgtatcagtttttaaaaataacaaaacaggcaaaggatatgtatagattgtttatggaaaagcatatccagatagccagcaagctcatgcaaggatgttgtttattggtaattagagaaatacaagttaaagtaatagtgagacatcattttcacctgttaggccttccaacatttaagagtaggtgatcttgaaaacagtgctgagtgaaaaactaaacaaatctatgacaagtcccatgtttataaattagaaatgcatgcatacaataaacatgttaaaaggcaatatacaatgaaaggatacacattaaacatgagaatggtttcctagaggggtggggaatgggagtgggaaatggagataacaaagaaatggaaagaataaataaaattaaaattaaatataaaataaataaatagggctgggtgcggtggctcatgcctgtaatcccaagtgaggagtttggaccatcctggccaatatggtgaaaccccatctctattaaaaatacaaaaattagccaggcatggtggcacacgcctatagtctcagctacttgggaggctgaggcagaagaattgcttgaacctgggaggcagaggttgcagtgagctgagatcatgccactgcactccagcctgggtgacagagtgagactctgtctcaaaaaataaataaactagccatgatatctattgctggaaggatgtagagggaaaggagctttctgacactactaatagaaatatgaagtgttttccagactttctgaaaaataatctgacaacatatcctagaaatagtggtaatgcttgtcagcatacaagtcactaaatagatcatccgtactgtgaaatatgatgtgaccattaagggagaatcagtactgtgtcggatgccttgaagggatttcataagatactgaatgaaagacagtgtataaaagtaagtgtactgtggtgccgttttaggaaacaatgacccctcccccacacaagcctttaaatgtgtgtgtgtgtgtgtgtgtgtgtgtgtgtgtgtgtacaagaacagagaaaaataagaaagaatatatgctacattggtgtagagagctaatggagggggaaggacaagagaggaaactgtgtaggaaaccaaaagaggaaaaagaaaaaattaacattgcactaaaaaattaatcacaggtatatgatcacattcactcatgaatgtaaaattttgtatatatggggatatttgtagacagaaattaataagatttgtatttgtttctttaaagtatgagtttttcagatggttggaatttcaggacacagataagatatgttggtcataagattcttggttgttgcctgataactctactttctgcctatacaaccctggcactgagtttgatatctctgtgatttgtaatatttgctgaatctttgtggttatggttctttctctagtgatttcattatccacatagttttcaagaaaaatagtaaaaacaagtttgctggattaacagataaaacttttcaattagtgggtcccaatataaagcttatttaggagtatgtgtcttagaaattagacacttaggaaaaacattcttgttggtcatttaaaatgcattttgataaatgaggtatgcatagaaaaaaattgtagaggaagagcatcttgtccgtaatttaacacagactaggtttttgaagcttacagagctaaagttgtaaatatagtattaatataaaatgtatatacttttttttgagacaggatcttgctctgttgcccaggctggagcgtagtggcacaatcacagctcactgcagtctcgaccttctgggcccaagcgatcctcccacctcagcctcccaagtagctgggactacaggctcacatcaccatgctcagctaatttttgtattttttttctttttttgtagagacagggtttcactatgttgttcaggctggtctcaaactcctgagctcaagccatcctcctgcctgggcttcccaaagtgttgggattacaggcgtgagccaccacacccagccaaaatgtacacacttttatgaaagggctaagtgctaacaaatagcattaagacaagtgttaggaatcagtacaggcccagtgtgatttactatattgtatttgtatttcagatgcctttggtgcttcatgaagaatatttccagatatctcacagacattaagcctttgcctcccaacataaaagacagactgattaaaataatgagtatgcagggacagataacagattcaaatataagtgaggtaagagtatgaataactgtaaagcaagcatattatattttctgtttagatatggttttagatttttggaacaatggtatatggtaagactggtaatcatttttaatttttttttttttatacagggtcatgctccgttgcccaggctggagtacagtggtgcaatctcagctcactgcaacctccgctgcctggacttaggtgatccctcttcagcctcctgagtagttgggactataggtgtacaccaccatgcctggctaatttttgcattttttgtagagacagggtttcaccatgttgcccaggctggtctcgaactccggagctcaagtgatccatccgcctcagcctctcaaaatgctgggattacaggtgtgagccaccatgcctggcccacattttagaatattataaagtataagggtttgtttttttccctccagataaccaaaatgtccatatgcaattatcagaggaacctgcccccaatatttcaatgtaggttctttctatttttcctaagtgtcggctggtctgagaaataaagagaaagagtacaaagagaggaattttacagctgggccgccgggggtgacatcacatatcggtaggactgtgatgcccacctgagccacaaaaccagcaagtttttattaaggatttcaaaaggggaggaatgtacgaacagggagtaggtcacatgctttaaagggcaaaaagcagagcaaagatcacatgcttctgaggaaacagggcaaggacaaaatcagaactcctgataagggtctatgttcagcagtgcacgtattgtcttgataaacatcttaacagaaaacggttcgagagcagagaaccagtctgacctcaaatttaccagggctggggtttcccaatcctagtaagcctgagggtactgcaggagaccagggcgtatctcagtccttatctcaaccgcataggacagacactcccataggacagacactcccagagtggccatttatagacctccccccaggaatgcaattctttccctagggtcttaatattccttgctaggaaaagaatttagcaatatctctcctacttgcacgtctgtttataggctctctgcaagaagaaaaatatggctctttttgcctgaccccgcaggcagtcagaccttatggtcgtcttcccttgttcgctaaaattgctgttattctgttctttttcaaggtgcactgatttcatattgttcaaacacatgttttacaatcaatttgtacagttaatgcaatcatcacagtggtccagaggtgacgtacatcctcagtttatgaagataataggattaagagattaaaataaagacaggcataagaaattatgaaagcattatttgggaagtgataaatgtccatgaaatcttcacaatttatgttcctctgccatggctccagctggtccctccatttggggtccctgacttcccgcaacatgtaatagttcctaaaacatcttctaccattgtctcagttacttctcttgtgtcaaccagagtcgtggagactgaaaatccaagcaaaaaggtttattggtggttttagaattgaattcaaggaacacagattccagaggcatctgaaatcatgtcctaactatttaattcatatgtcctaagagatatatgaggtcttttaaagagaaaggtgggagagggttatcaaacaattcattagttagaataagggtttctaggcagaagtccttgattcaggggtttggaaaaagttcagtcatcagcatagcatagtcttttcagaagtggcagcaatttcatctgcagcatcagcaagtacgttctacagtcaagcagttgcagaatgacattcaggaacaaaatggtgttgttctggtcagctcccattagccttccatacacacttgtcttcatggtacctgtacccttgacctccgtgttttcaaaaagtttaaaactttttgatcaagactcacaataagaaatatacgttacattgtgactgtagtacacaaaccacacttaggtgtaacagtataatgtatagtacattttggtcttttctatttaattttattctatttagtcttattttactgaaaaaatattgatcacagtctgctaaactgattttgtaatccattcatggataatgaccagtagttaaaaaatcactcttctcatctatactgttcttttttcaactgctatatttttcatatttaatatttccaattcacctttttatggtttcttgttttatcttattaatcttttcttatttcttttagcatattattatgcttattaatatatttggcctctctgttctaattcctctgctcctgatggaatcagtaatctttgtttttcttttgaaatagtggtgctctctagatgtcttgttttggcctgtgaacatatctctgtatactctctggtagtggtaagagtaaaggaggccagacccaagtctgtttcggccctactaagctgacatagggggtggaggcctggagaggggctggagtgatgagctccaaggcagagagccccaagcactagaaaaagatagttaatcactctttgttctgctaaacagcccgtgagattagggcttaaccttcagcctctgattttaaaggttattaaatagcagagtagataatttccttcgatactactcctgtgttatcttttgtatttttgctatttgtgtttcaaaaagtgaaaatgctagttagtagtttctacactacttacatttaaatattgtctttgggtttgcagccaccaccactctgcagccatcaccatctagtctgcagagactagaactgccaattgctgttgggggtgagcggcatctatccaggctggtgggatggtggtaaaagaatttaccaagacagttgtaggtaaagaaaggcagatttttttttttttttttttttttttgagacggagtcttgctgtttcacccaggctggagcgcagtggcatgatcttggctcactgcaacctctgcctcccaggttcacgccattctcctgcctcagcctcctgagtagctgggactacaggcgcccgccaccacacccagctaattttttgtatttttagtagagacggggtttcaccatgttagccaggatggtctcgatctcctgaccttgtgatctgcccgcctcagcctcccaaagtgctgggattacaggcgtgagccaccgcgcccggccaagaaaggcagatttattagagaaaatatgaaaatacattgcaagggagcaacgggcagaaccagcaagagaggacccaactgccaggagacaaaggcttgctggggattttatagaatggaacttgggctgattgacagcaccaaggtaggagggaactaacttgcatccttctgtcagccgaggtgtttgatgatagatcaaagtgtttggtgataagcaggaggtttatgagttttgtatgttgtctgcacaggagggctatatgttctgggccataaagaaaggcagacctatagcttatctgcttcttctttttgtttatatgttctggaccatgaagaaaggcagacctgtagcttatttgctttccccttgtcctgccagcctgactccttttccctaattaggactccacaattgctctgacttcacttcaccttctgcctaaagcctgtaatcaaaaggaagcaaggtctgatgatagcactccagcatatgtttttctgtggtttttgcttgtttgttgttttttttttgagacagggtctcactctgtcacccagggtagagtgcataatcatggctcactgcagcctcaacctcctgggctcaggtgatcctcccacctcagcctcctgagtagctaggactacaggcacccactaccacatccagctaatttttgtattttttttagagacagggtttcaccatgttgcccaggctggtcttgaacctctgggctcaagcaatctgcccaccttggcctcccaaagatctaggattataagtgtgagccacagtgcccagcctacatgctagagcatgtgactaaccctgtgactttacattggaattgcactttaacctgtttttaatgtttcttctgcattaacctgatatatctttattataatgctttattttcttcatgttagcttgcatttgaacatagataccttagtggtgtagtttgcttggctctgtggaagtagaataatatctccacgttcttattgttgatggttctgttgaagtatgtaatgttatatgtgactcatagatgaaccataatgacactgtagaaaaatggtggttttcttcacttttccaccatccacatttcttactatccctttagcttatccttcagtgacttaggtttttgtttgatggcaatccttaccattttttaagcctaattttagctgaatttaaaaggaggggtgaagagggtgaatgagatagaaaaacaagacatgatttttctgggtactctccctctagtctccatccttaacaagagtcttgcttatgacattattcaaaaagccagatacaacatccattacaaagtgacacacatctttggatggctgtttttgaagtatttcataaatctttttatactctctggatggagaaggcctttttaaacatgatactaaagttggaaaccaagaaaaaaagttggatggatttgattacataaaaatacagacttccttatggcaagaagaaaaaaaaaaaagaaacaaagtcaaaaacttggaaaaatatttacagtatgtatgaaaatctaggggcttttttatcttgacaatataaagaatccctccaagccaataagaaaaaacaaaacaaccaaataaaaaaccagaagaatcaggaaatactcagaggaaaaaatacaaatctccaataacatatcaaaggatatttaaccttactagtcatcaaagtgacagtttgcctttcagtttggcagagactttaaaaaaatcccaaaacccaatgttagcaatagtgtggagaaactgtcacttttatctcctgctagtgagagtgtaaattgatttaaaaaaaccttttagacggacagtttggcattattaaaaattctaaagatttgcttattattaattcaacaatttacttcctgtagaaatctcaggaagataatagaaaagtacacacatatattcattataatatcatttatgataataagcatagttatatatagcatatgttataagcaagacacctttatttctcacaacatatcctgttttagtaataaggctagtaaagcacagagagaaaactgagcttgatggcaatcatagggttccaggttgggcagtctgcttgcaaagcacatgttcttaatcacggcataatattgcctacctaaagcaacctaaatgttcaactcaagtgtttgccagtgtaggatgcatttaataagttatgatacttgcagaaaatggaataatatacaaccacaatctattgattttataaaaagtgctcatcttatatgtgatctgatcctgttgttcttcaaagcgttttttaaactcaaaaaacatcaaaatgaatatatacagccataaaatcatgtcctttacagcaacatggatgcagctggaggccgttatcctaatgaataaatgcagacacagaaaaccaaatactgcatgttctcacttataagtgggagccaatcgctgggtgcacacagacataaagatgggaaaaatacacactggggacttcaaaagggaggaaggaggaagggaagcaaggattgaaaaactacctgtcaagtactgtgttcactctttgggtgatgggttcaattgaagcctaaacttcagcatcatgcagtatatccctgtaactaacctgcacatgtaccccctgaatctaacagttttaaaaagctaatataattttatctctgggtattggtattatgggtaattttagttatagaggttaaaaggttaggctttggaattaaaaggacctgggttccaatcccagctccactccttttggctatgttctttatgttggctacttaagctctcagggtcttaattcccgatttgtaaaatggcaatgaccaatcccttgggggcgggcaggggggtggtgggcagtggaaagagagagagagagaatattaaataacataatgtaggccaggcacagtggctcacgcctgtaatcccagcactttgggaggccaaggcgggcagatcacctgaagccgggagtttgagaccagcctgaccaacatggagaaaccacatctctactaaaaaatacaaaattagccaggcgtggtggtgcatgcctgtaatcccagctactgggaggctgaggcaggagaatcgcttgaacccgggaggcggaggttgcagtgagccgagatcacgccattgcactccagcctgggcaacaagagtgaaattccatctcaaaaataaaataaaataaaaaataatataatgtatatgacagtacccttcctggtaagcatctaataaatagaaatcattattcttataacttattataatttttctaaattgtctgagtgttttacaataataataccttattttattttcagaaaggtaaagccatttctattttggaaaaaaaataaagaacagaaaaatacaggaaagagctcagaatgcttaggaattaatctattatttgtcaacctcaagaaaacacccaataatactggggtattttattagctcccaaaaataatgatatagaaggtaaatgttctagataagcagtactagtgctctgtaagcacttggtacacaagtgattaaagactcatacttcctaagcacagaggcccatagggagagtctctaatgccagcagctaccagaagattattactcactgccacattggttaagcttctcaggtctatggatccttcccctgaattagccatctcaacagtgctttgtgtcccaagaaggactttgccagcactgaaagctgcacctcctgctggaagtagaagtggttttctcctgctttgtgtgtctgtctgcacatggatatgcttctgtattctttgctgtattttacatcagccacttgtctgttatgaccaccaaaacactgaatatggaataaatatttgtatttatagaaagaaataattttttcaaaatcacttatttgttatagattttacatcctgaagtccaaactctagatctacggagctgcgatatatcagatgctgctctcctgcacctgtctaactgtagaaaactgaagaaattaaatttaaatgcttcaaaagggaaccgagtttctgtaacttcagaaggtatgtttattaacactgagtacattggtagattactattcactatctggtaaaattgtggagtaagggagaaaatacgtcaaaagagagtatgaagaagtcagagaaatatgaattatatttatcagtaaaaacattcagactaagaaaataatccaagttagaattcttgcttataatcagtgctcaaagttaagaaagacactgggtaagtcactaccttgtattttaaacatatgtaaaataaacatgggccaggctaggtggcttatgacagtcattccagcacttttttagctgggaggccggcagactgcttgagccaaggagttcgatgccagcctggccagcatgatgaaccgcccccgacccctacctcatctctacaaaaaatacaaaagttagccaggcatggtggtgcaccctgtagtcccagctacttaggaggtggaggcacgagaatcccttgagcctgggaggtagcagttgcaatgagctgagattgcaccactactccagcctgggtgacatasggagactctatcagaaagaaataaaaaatagggccaggtgcggtggctcatgcctgtaatcccagcactctgggaggccgaggcaggtggatcacctgaggtcaggagttcgagaccagcctgaccaacatggagaaaccctgtctctactaaaaatacaaaattagccaggcgtggtggtgcatgcctgtaatcccagctacttgggaggctgaggtaggagaatcgcttgaacctaggaggtggaggttgcattgagctgagattgtgccattgcactccagcctgggcaatgagagcaaaactctctcaaaaataaacaacaacaacaacaaaaaattggccaggcgtgttggctcacgcctgtaatcccagcactttgggaggcctaggcgggtggatcacgaggtcaggagatcgagaccatcctggctaacatggtgaaaccccgtctctactaaaactacaaaaaattagccgggcatggtgacacgtgcctgtagtcccagctactcgggaggctgaggtaggagaatcgcttgaactggggaggtggaggttgcagtgagccgagattgcgccactgcactccagcctgagcaacagagcaagactccgtctcaaaaaaataaataaaattaaaattaaaactaaaaaaaaaacaaaacatggatacatacgtctgtattttaaatattttgcctggtatagtggaagaagaaatgaccagttcatattttgttaaggcttttttgatgccatattacaaaagaattaatcatcagattaaatttactaggtactctcctatcagtttgtgtaatgcatagctttttatagctagacaaactgcattgttcagtgtcactattacatgagttagtgaatctttaccttttttcctctctatagacctctttttttcaatatttggtttgcattaatacttatttttatttatttatttaagacagtgtcttgatctgtcacccaagctggaatgcagtggcacaatcttggctcactgtagcctcagcctcccaggctcaagcgatcctcccacctcagcctcccaagtagctgggaccgcagatgtgcaccaccacccactgcgaattttttatttttagtagagacgaggtctcactaggttgcccaggctttttttttttttttaaatataagaaagagggacttttttggcctcttagaattctggaaaactgtgtgggtagttgagtatattttgcagtcatcttggttagcgagttaggatattcataatattgcaaacacgcataagttttaatatgtttacataaataataactcacaaaaaagaacttctccaataaaaccacatttctctacactcacaccacacttctgacagcaaatgtgtggggttttttcacaccaaacaattctccaactctctggacaccagctgggtgcgctacaatttaattcaattctgacactatctacctggagttagcctcagatcccacaagttaagggctcagtcccacaagactatccccacttcagatgccaattgcaaggccaggcctctggtacatatgactgaccaactataaatggagggtttccatgacctcctcctccattcaataatttgtcagaatggctcacaaaactcagggaaacacttttgttacatttaccagtttattctaagagattataaaggatacagatgaacagcaagatgaagagtacatagggtgaggtctggaagcgcaggagcccctgtccccatggagttgggatacactgccctcccagcatgtggatgcattcaccaacccagaagctcatcaagtcttcttgttcaagaggttttttgtttgttttttcttcttcctttttcttttcttttctttctttttttttttttttttttttttttttgagacagagtctcaccatattgcccaggcttgagtgtagtggtgccatctcggctcactgcatcctccacctctgggttcaagtgattctgattctcctgcctcagcctccggagtagctgggattacaggcatgtaacaccatgcccagctaatttttgtatttttagtagagacagggtttcaccatgttggccaggctgctctcaaactcctgagctcaagtaatctgcccgcctcggcctcccaaagtgctgagattacaggtgtgaaccaccacacccgkcccaagagtttttatagagcttaatccccatcccctattccctgccgtccctgacccccacctcgccaaaggtctgtggactgagctgaatgttctaaccctctactcacttgatttttctggagacaggccccaaccttaggctatctaggggtcacatgctgtcacctcattagcttaaactcaggtatgatcaaaaggggcttattatgactaacaaaaggcactccggtcactcaggaaattataaggcttttcggagctctgtgtcagggactgggaacaaagatcaaatacagttcttattgtatcacaacttccatgctggacactgataaataaaataactggtcttaagaaaaaaaaaaagttctttcttaagatatggaaaacagtaaaaatgacctacccatgaatttaccatcttcccttctgtgtattttgcccataaaggtatcttttaacagtgctaccatgtttgtttatgaccaaagggcccaggatccccgaagtactcttttatttatgtgcacccatctccaatgggcacttatatcagcttaactggatttaaagacttctcttttttgaccctcaggaaaatgtaagattggtccaggctaacagaaggagcatggtggtagaaaataaattcacttttgagaacagagtcaaagtggagcgagagagaacacataggcatagctataaatttctaaccgcaagcatgaagatcatgactgaaaccatttgggcagtttaacttttggtttgcctccaaagtccactagaaaagtaatttgattacttgaaaatttttgttttaaccaaaaggagaatcgcctactatttcactatctaattgggttctgaatgacttttgcctatttcctaaaaggaattcaacctgtggacaataaagccttgccattaattgcagatactacagactgtgtagagaattcctgaaacattccaaaagagttctgaataatgacagcatcactggaaaatcagtatttcctcacaggtggactactttgaaaagggctaacactgaactggtgattgctaaaatgaaaatcagtcacatttctcatgtatacatatacacacatatagctcattgatatataattatattttcccccaggaataaaagctgtggcttcatcttgttcatacctacacgaagcttctttgaaaagatgctgcaatctcactgacgaaggagtcgttgctcttgcactcaattgccagctgctaaagatcatcgatttaggtggctgcttaagtattactgatgtgtccttacatgcattaggaaaaaactgcccatttttgcagtgtgtcgacttttcagctactcaggtaaatgacatataggctacaaacatatagactatgtgtttaccaaatgtattttcatgactaatgagaacatatcataaggagttcattttgtttttgttgaaactattgaccacttcatgctttttgtggttaagtaattgagatatatattggcatattcctctcaattaagtagcaagggtgaaaggtatatatggctaaaacacatgtttgatgaatgggaggcattaagactatatctaaataatgaatacattttggaaaattctacttccgttgtctggattcatggactgtgtttctttttccctttgcttaggtatctgacagtggtgtgattgcacttgttagtggaccttgtgcgaagaaattagaggtaattttaaarcaattataaagatggtggtgattaaatttttatattcttagaaattatgtttaaaacctascagataaccaatgctttatcaattacgtattttagggactttgttggtgggtgttctatctctttattgccagagtaaataaaaattgttaggatataaaataaaggtgctttaaaataaaaactcattttacttccaataaaaggccttatttcccagaagttttagcttctaacagatttaagaatcatcttattatggatgaagattatgaatgtttatcagtgtaaagtgatattatttataataggatttcaggtcttaatgatatttctaccaggagtattaattctcttgacatcctgtcatcctatttttcttgatagccacattgtacgatcatttaaaaaagtttttttttttttttgagacggagtctcccactgttgcccaggctggagtgcagtggcataatctcggctcactggaacctccacctcccaggttcaagcacttctcgtgcctcagcctcccaagcagctaggattacagatgtgtgccaccgactaatttttgtatttttagtagagacggggtttcaccatgttggccaggctggtctcgaactcccgacctcaggtgatccgaccgcctcggcctctcatagtactgggattacaggagtgagccactgcacccggcctaaaaaagatcttaaatttgtgttcatcctttgaattgaatcactaatgcacttgtaacctatttctaaatatattaagaagccttttatcccaggattttggtttctgtcttccccagttgacaagtggtttaatataactatgctatttaacagtaagctacatcaaatcctttttggaagtaggcaggctgtaaattaattataaaaatgttagtaaaaataactattttaatagggcacagtggtgcattcctgtagtcccagctactcagggaggctgaggcaggaggatcccttgaacccaagagttggagtccagcctggcaacatagtgagaacttatatcttaaataaataaataaataaatacttttttattttaattttaattaattaatttatttatttattttgagacggagtcttgctctgtcgcccaggctggagtgcagtggtgtgatctcagctcactgcaacttccatgtcccaagttcaagcgattctccagcctcagtctcctgagtagctgggactgcaggcatgtgccaccacatccagctaatttttatattagagacagggttttgccatgttggctaggctggtctcagacttctgacctcaggtgatccgcccccctcgacctcccaaagtgctgggattgcaggtgtgagccaccgtgccctgccataaatacattttttaaaaagccaactattgtaatggaatgacaatgccacgtttttgccaaaatatttatccttgagttattgcccaaagagattcttttttgtgattttatatatctgggtcttggtagcatatatattttttaaatattttattaagaaattaccatattaggttgggcatggtggctcacgcctataatcccagcactttgggaggccgagacaggtggatcacctgaggccaggagttcaagaccagcctggccaacatggagaaaccccatctctactaaaaatacaaaaaattagctgggcatggtggcaggtacctgtaatcccagctacttgggagcctgagataggagaatcacttgaacctgggaggtgggaggttgcagtgagccgagactgcgctattgcattccagcctgggcaacaagagcgaaactccatctcaaaaaaaaaaaaaaaagaaagaaagaaagaaagaaattactatatttattattataccaagttttgaattccaaattgcatcctaaatgcaggagcagtaatttttggtattttaagtgcaaacatttgtcgagcacttactgttatgccaggctgtatactaactgccttatattcactaggttatgtaatgcttacaacattatcttgtaattactataattttaaataaagttctcagttaaattagtttatcaccttcaaataaaaccaccaagaaattagttgttatgcatgatagtaaatatactgacctatttacctcaacattataaaattaagagcaccaacctaagtagaatgagaaaaaaatgcaataaccagtgtgttggtgattatagtgccatatcattacattttttattttttcagttttccaaagattattccaaagtgccaaaacattttaatggaaatgtctctaaaatttattagaacttaatgccttacttaaacaaagtagggtgaatatactttttaaaaaaattgttttgttttgttttgttttgtagagacagggtctttttatgttgcccaggctggtctcaaactcctggcctcagtgatcctcctgtcttgacttcctaaagtgctagaactataggtgtgagccacatgcttggcctgagtgaatatactttaacctttggtttatagcatcctctgactcaaactgaaggacaaacttaaattttgttttttgagacagggtcttgttctgtcacccagggtggagtacagtggcacgatcatggcttacagcagccttgactgccctggctcaagcaatcctcccacctcagcttcctaaatagctggggctacaggtatgtgcccccactcctggctacttttttattttttgtagagatgggtcttgccatgttgcccaggatgatcttgaactcctggactcaagcagttctcctgccttggcttcccaaagtgctggaattacaggtataagccaccatgtctggccttaattttttttttttttttttttgagacagagtttcgctcttgtggcccaggctggagtgcaatagtgtgatctcagctcactgcaacctccgtctcccaggtacaagcaattcttctgcctcagcctcccaagtagctgggattataggcagctgccaccatgcccagctaatttttgtatttttagtagagccagggtttcaccatgttggccaggctggtctcaaacacctgatttcaggtgatccaccctccttggccccccaaagtgctgggattacaggtgtgagccaccgcacccagccctaatttttttttttttttactaactactctcataggtaatgcggaggcctacctttcatcacattttaatctgttgcttttaatttgttccattctgggaaattaaattattaatgttgctaaattatttataatttggaaatcaatttgattaaaggtctaaggacctttcctaaagattgacaagaggctgaatgtggtggctcacttctgtaatttcagcactttgggaggctaaagcaagtggatcccttgagctcaggatttcaagaacatcctgggcaacacagtgaaaccttgtctctatgaaaaatacaggctgggtgcggtggctcacacctgtaatcccagcactttgggaggctgaggtgggcagatcacctgaggttgggagtttgagaccagcctgaccaacatggagaaaccccgtctctactaaaaatacaaaattagctgggtgtggtggcgcatgcctgtaatcccaactacttaggaggctgaggcaggagaattgcttgaacccaagaggcagaggttgtggtgagctgagatcacaccattgcactccaccctgggcaacaagagcaaaactccatctaaaaaaaaaaagaaaaaagaaaaatacaaacattggctggacatggtggcttacgcctgtaatcccagcactttgggaggccgaggcaggtggatcacatgaagctgggagttcagagacgagcctgaccaacatggagaaacctcatctctactaaaaatacaaaattagctgggcatggtggtgcatgcctgtaatcccagctactcaggaggctgaggcttgaacctgggaggtggaggatgcagtgagctaagatcacgcaattgcactccagcctgggcaacaagagcgaaactccatctcaaaaaaaaaattaaccagaggtggtggtgcatgcctgtactcccagctgctcaggagtctggagtggggagatcaattgatctccttcaacttgggaggttgaagctacggtgaactgtgtttgcactactgcactccagcttggggaacagagtgagaccgtgtctcaaaaaaattataaaattaaagaaaaaaagatcaacaagcacttagtacaaacttatgttacagcatttagcaaatatcatgatcgtttctgaaatctctgttgatcattgtgttcatcattttgttcattttatcctcagcttttaatacaattctagatatgtggtagtacctcaataaatgttatcacattcttagccttatattacagtcatttcataagtttctttaatccttataattaaaatttaatttgctgtataaaatttcatttattaataaatatttattaagcatttactgttctagatcctggcatatcagagaacagactgtccgtataatgtaacatacttgttttttattgttggtaattcagattgtttctggtttttagctattagaaataattatatattgggacagtcacttttccttccgttgctataatgaattcccaaaaatggaacaaatggattaataggtatgaatatttttttaacagtcctaaattgttttccataaaagttatgctatgagtatgcaatttcagtaagaccctaatctgccagaaatattttcttttttttaatgccttaatttaatatgttttttttcgtttgtttttttttttgagacagagtctcactttgtcactcaggctggtatgcagtgatctcggctcactgcaacctccacctcccgggttcaagcgattcttctgcctcagcttcccaagtagctgggactacaggtgcacaccaccacgcccagctaatttttgtatttttagtagagacagggtttcactatgttggccaggctggtctcgaactcctgacctcaggtgatctgcccgccttggcctcccaaagtgctggatttgttctttttctaaaataatgttacagctgggtgcagtggctcacacctgtaatcccaacactttgagaggctgannnnnnnnnnnnnnnnnnnnaggctgaggcgggtggatcacttgaggtcagagtttgaggccagcctgaccaacatggtgaaaccctgtctctactaaaaatacaaaaattagccaggcatatttgcacatgcctgtaatcccagctacttgggaggctgaggcagaagaatcacttgagccctggaggcagaggttgcaatgagccgagactgctccattgcactccagcctgggcaacaagaatgaaactctgtctcaaaaaaataaataaagtaaaataaaataaaataatgttacatctaaagccctgctcaattattctccctttctgccttcagaagtaaccactatcctaaatatgattatgtatctctccttgcatgtttggataccttttcttttttttcttcctgtggaccctgctcagacagaaatggatactttttctattatgtacaaatctataaataagatatagccttgttttatatgctttcaaattttacataatagcttcataatatatgtccctttacaatttgttattcaaaattatgttttctgaaatttttcaggtataattgaggtataatttacatacaagaaaattcactcatattatgtgcatagttggataaattttggtaattgttatacagccatataaccaccaccacaattgatgtatagaacattttcatcaccctaaaaagttgtctgtgttctctgtggttttattttgtttttttgtctctggtcctttgtagttgatccccttctgtgaccctctcttaggcaaccactgatttactttgtcattgttttggcttttctataattgtatataaattcaattttatatacatataattttatataatggaattctgcagaatataatatactattttggtttttatttctttattttacttccttcacttagcatagtgtttgtgagattgatccatgttattgcatatgttaatatttcattcctttttttttttttttgagacggagtcttgctctatcacccaggctggagtgcagtggcatgatctcggctcactgcaacctccatctcccaggttcaagtgattctcctgcctcagcctcccaagtagtggggactacaggcatgttccaccatgcccagctaatttttttgtatttttagtagagacggggggtttcaccatgttagccaggatggtctcggtctcctgacctcatgatccacccaccctggcctcccaaagtgctgggattacaggcatgagccaccacactcagcccctttttattgctaagtagtgttccatagtatggatatgccataatttatttataattttaccatttgatgcaaagataaatagctgggaattaaatgtaaacagcttttgcacagcaaaaggaatagtcagcagagtaaacagataacccacagaatgggagaaaatcttcacaatctatacatctgacaaaggactaatatccagaatctagaacaaactcaaacaaattagcaagaaaaaagcaaacagtcccatcaaacagtgggctaaggacatgaatagacaattctcaaaagaagatatacaaatggccaacaaacatgaaaaaatgctcaacatcatttgtgattacggaaatgcaaagcaaaaccacaatgcgataccacctgactcctgcaagaatggccataataaaaaaaataaaaaaataatagatgttggtgtggatgtggtgaacagggaacacttctacactgctggtgggaatgtaaactagtacaaccactattgaaaacagtgtggaaattctttaaataactaaaagtagaagtaccatttgatccagcaatcccactactgggtgtctacccagagaaaaaagtcattatacgaaaaagatacttgtacacacatgtttatagcagcacaatttgcaattgcaaaaatgtggaaccaatgcaaatgcccatcaatcaacgagtggatacagaaactgtggtatatgtatacaatggaatactactcagccataaaaaggaatgaattaatggcattcacagcaacctggatgggattggagattattcttctaagtgaagtaactcaggaatggaaaggcaaacatcatacgttctcactcataagtaggagctaaattatgaggatgcaaatgcataagaatgacataatggactttggggactcagggggaaagggtgggaaggaggtgaggggtaaaagactaaaaatcgggttcagtgtatactgcttggttgatggttgcaccaaaatctcacaaatgaccactaaagaacttacttatgtaaccaaataccacctgttccccaaaaacctatggaaatttttaaaaaatttaaaaataattttatcatttgatggacatttgggttccaattttggactgctgcagacatttgcatacaaacctctgtgtagacatatgtttttatttttcttgggtaaatgcctacgagtgaaattgctgggtcatatagcaaatacatgtttagctttataagatactaccatactgtttgccaaagggtctgaactaacatgtttgagatttatgtctattaatacaagtagatatttttcattttagctgttttctataaagcattgattttcccgttctccactttttttactattacaagtaatactgcaaagggcatatttataaattgtttccttgtgcacatgtagaagagattctctgtagatcaacaattggaattgctgagttctggggcatactcatcttcagctttaatagctattacacattactttataaaatggttgggcatttaactttttaagctgctccttccaaattacttcagacttatattggtcttttctatatactttttttttgcaagtagatatctggttctttttgtatcagaatgtttctcaaaattgttcatactgttattatagatctttgttttcatttgactttattttctttatttttgcataggagattcatatgggacattgtgtaaatctgactgatggggctgtcgaagctgtccttacttactgtcctcaaatacgtatattactcttccatggatgccccttgataacaggttagtgcaatagattgcttgggttcaaattctggcttcatcttttactgtgtgaccttgagtacattacttaacccatttcattattcagtttcctcatctgtaaaacaggcataatgagagtacctacctcatagacttagtcatgattatctgacaattctttattttattttattttattttaattttttgggagacggagtcttgctctgtcacccaagctggagtgcaatggtgcaatctcagctcactgcaacctccacctcctgggttaaagcaattctcctgcctcagcctcctgagtagctgggactacaggtgcacgccaccatgccaggctaattttttttgtatttttagcagagacgggatttccccgtgttgcccaggctggtctctaactcctgagctcaggcaatccgcctgccttggcctcccaaagtgctaggattacagacgttagctgccgcgcccggcctctgacaattccttatgtggtggccttgcacatagtaagagctcaataaatgttagtcatgataacgataaatgaaggtggtaatggtggccagtgctcaataaatgttacctatgaagaagattatgatggcagcagtggttgtgttcatgatattgaacatgatgctttatgtaaacaataagaaaatttcaagtttataatattacatctatcaaatacactaaatgacttgttaactattatcaaactgtagacattaggatcagaatagccgggcgtggtggctcatgcctataatcccattactttgggaggccaaggcgggtggatcacctgaggttgggagttcgagaccagcctgaccaacatgaagataccccatctctactaaaattacaaaattagccaggtgtggtggtgcgcacctgtaatcccagctactcgggagattgaggacggagaatcacttgaactcgggaggtggaggttgcagtgagctgagatcacgccattgcattccagcctgggcaacaagagcgaaactccgtctcaaacaaacaaacaaaaagtcagaaaaatttggactcttaggctaatgtggctcttcactggaggagaacaaaacagcagtagcccattttgcctgtataagagccatggtatatatcctcctaccctagaaaccatggcaccctttcatattacccctataataggtccacaccgtaatataaactggatctaacttgtaaatcagtagttatgcccagtccttccagctcatttttcttattacagtctaaataattattccaattattcttttttttttttttgagacagaatctcgctctgtcacccgccgaggctggagtgcagtggtgcaatcttggctcactgcaacctctgccttccaggttcaagtgattctcctgcctcagcctcccaagtagctgggactacaggcgcatgccaccacatccaactaatttttgtatttttagtagagacggggtatcaccatactggtcaggccaggctcctgacctcatgatccacccaccccagcctcccaaagtgctgggatcacaggcgtgagccaccatgcccagccagtctaaacaattattctgtaggttaagctattatcctggaagtccctttgacaacttctcttttatttttaggaagtccctttgacaacttctcttttttatttttaggttgccagccttaaccaaggctgtaaccatagattgtatctgggtatcagtgacatctgtagtgaagattagatctttatgcaaagacatttcttaagaaactagagccagtaaggacactggtggccgggtgcagtggtttatgcctgtaatcccagcactgtgggaggctaaggtgggtggatcacttaagcctgggaggtcgaagctgcagtgagccatgatcaccccactgcaccccagtctgggtaacagagtgagaccctgtgtcaaaaaaagaaaaagaaaaaagaaaaaaagaaactgttaactggggttagctgcacagaaagttgtgaaggaacaagagtaggaaaaaaaatgtcattgtatacccttttgtatcttttgaattttatatcatgtggattatttttaaactattaaaaattaattggttggacgtggtggctgtcagcacacagatgatccctgacttaaaatgatcaatttacagtttttcgactttacaatggtgcaaaagccatatgcattcagtagaagccatacttcaagaacctgtgcaagcatttttttcactttcagtataatattcaatagattacatgagacagtcaacactttattaaaaaataggctttgtgtcggaaaattttgcccatctgtaggctaatttaagtgttctgagcatgtaggctaggctaagctatgttgttcagtaagttaggtatattgaacacattttcgactttgtgtattttcgacttatgagtttgtcagggtgtaaccccatcataaattgagaagcatctgtagagagaagcaataaataccaattttcttttttctttttttgaggcagaatctcactctgtcacccaggctggagtgcagaggcatgatcttggctcactgcaacctccacctcctgggttcaagtgcttctcctgcctcagcctcccaagtagctgggattacaggcttgcaccaccctacccagctaatttttgtattttagtagagacagggtttcaccatgttggccaggctggtcttgaactcctgacctcaggtgatccacctggctcagtctcccaaagtgctgggattacaggcatgaatcaccatgcctggcctaaataccagttttcaagtctggaaaatatactggagtggttaatcagattttcaaaccaaggagtcttttgagataaattatgtcattatggagatcactagtaaccaaagatatgttaacagatcatggatttaagataaatgcctagttgatgtgatttcagacaccaggaaagcttaatgacactaaatgattaatgagtgcaatgagcttaatcacactaaatgattgcaatgagctgagatcacgtcattgcactccagcttgggcaacaagagtgaaactccgtttccaaaaaaaaaaaaataataacaaatgcggttgagcattccttttttctttctttctttctttttttttttttttttgataatgagtcttgctctgtcgcccaggctggagtgcagtggtgcaatcttgactcactgcaacctccgcctcccaggttcaagtgattctcctgcctcagcctcccaagtagctgggattacagacgcccgccaccaggtctggctaatttttgtatttttagtagaaatggtgtttcaccatgttggccaggctgttgtcgaactcctgacctcaggtgatctgcccgccttggcctcccaaagttctgggattacaagcgtgagctaccacgcccagctgtttgagcgttctatagtggaaaaaatgtgaaagtcatggtattaactaaattttcatttaagagtgtgggaagaatgatccttcaatggacagctttggagggaccaagggagacaaaagtagaattgctgttaatgttgaaccttaagagccatctttgttcaacatacaaattaaaataccattataggccaggcgaagtggctcacgcctgtaatcccaacactttgggaggctgaggtgggcagaccacttgaggtcaggagttcaagaccaacctggccaacatggtgaaaccctgtgtctactaaaaatacaaaaattagttgagtgtggggctgggtgcctgtaatcccagctacttgggaggctgaggcaggagaatagcttgaacctggaaggcagaggttacagtgagccaagatctcctcactgcactccagcctgggcaagagtgggcaggactctatctcaaaaaaaaaaaaaaaacaattatggaaaacaaaatttataaaaatctaaaagatatgtgatataaatgtaactcacttaagaagcatcttagattttgtattccccgtatgtttcagagcaattctattggttttaccttcgtatttttatgttggtgatgagaaaacacttaaccatttgtaggtttcagtaattgaaataatactttctggtagtatttttcaaatagaccccaggacccatttacattcttaaaaattattgaggatcccaggccgggcgcggtggctcacgccggtaatcccagcactttgcgaggccaaggcaggtggatcacaaggtcaggagatcgagatcatcctggctaacacggtgaaaccctgtccgtactaaaaatacaaaaaaattagccgggcatggtggcgggcgcctgtagtcccagctattcaggaggctgaggcaggagaatggcatgaacttgggaggccgagcttgcagtgagccaagatcgcacaacggcactccagcctgggcaatagagtgagactccatctcaaaaaaaaaaaaaaaatcactgaggatccccaaagagtttttgtttatgtatatttgttaaattaaaatttctattaaaacagataaattttaatagacattcattttttaaaaatcgtaaatctattacctagaaaagagatatattttcattcagatcatcacttttcagatcattgtggatactcttctttgataccccaaaactcagcaagtggtaatttcttatgggttgttgcaatgtggaacttgaaaacatatcaatgaactttgcgtacattttgttatgatgcacttttcatacatttgtgttatgatgcactagtctgtcttgaattttgagttgatctttaccaatgcatgattttgtaacatcatgcattggcagttcggaaaatattggttctctgagttatatagatcttttaaatattgacacattttattatccaaaacaaaaatcagttgttaatataataactgatgtcattagaaaggtcctggatagctttcaagatcacagtggcagctacgaggcttccaaaattcacttgaaagctaaagctttatcactgacaacaaattctgtcatttgttttctttgaaatgacagcctcatttcttctattttcatgaaatagtctgccaagtactcaaataagaataaccttacactgtagtcattgtattagtccgttttcacactgctgatacagacatacccaagactgggtaacttataaagaaaaagaggtttaatggactcacagttccacgtggctggggaagcctcacaatcatggctgaaggcgaaaggcacgtcttacagggtggcaggcaagagagaatgagagccaagagaaggggtttccccttttaaaaccatcagatctcatgagacttatttactatcataagaacagcacaggaaagacttgcccccatgattcaattacctcccaccgggtccctctcacgacacatgggaattgtgggagctacaattcaagatgagatttgggtggcgacacagtcaaaccatatcaatcattcttttaaaaagtaaaaatggtgttccatgagaaaagtaactagttcagttcacaaccctgaaagggtctcagactacagaatatgcagactacactttgggaaccactgctttatggtaaagaaaaattatcagtcaacttcaacatttgcagcaagaatagcatatcattttctggccaggtgcggtagctcacgcctgtagtcctgcactttgggaggccaaggcaggcagatcacttgagattaggagtttgagaccagcctggccaatatggtgaaaccccctctctactaaaaatacaaaaattagctgggcatggtggcgcacgcctgtaatcccagctactctgatggctgacgcatgaggatcacttgagcctggggggcagaggttgcaattagccaagattgtgccactgcactccagcctgagtgacaaggtgagacactgtctcaaaaaaaaaaaaaaaaagaatagcatacccctttcaaatcacttcttatatttttgtgtggctgccagaagtagtggaagtagacattgaaatggcaggagttcaaaatatttggaataaaaatatttttgatctggaagatcacagttggtaaatgctggactaggtgttaccgttacatgatctaaaaatgacctttggggccctgtgttgtttacttcttcacagcaaccaggactgttagctcaaaagcccatcatcaccaaatcaaatgtttacacatccaattgtttaagtatagcctaaataaccaaattattagccatctatctagagcccacctgctttacataccctgcaaactacactcaacgtctactatccatagataaaaaccccaggctataaaagaccccaaatcactgctgccctttggagctctgtaacccagagacacccccccacccgccccgccgatcttgctgctaaacaacgtcatgacacatacaccctctctctagtcctccaggaattctcttaccctcccccttctgagtagtggccgccctacactgtcgctgcctttggaaggtctcatgctgtgagggacttcccggcatacaaacctgtcaaagcgctgtccaaagagagcttgttgtgtcccactgccaccttgtggtcacatctttttctttgttctgccctgaaatccttcagattcactgcagttacatggtgtgccataacataaaacaaaaagtgtttatatgtccaaaaagtttgtgaagggcaacatgccactattatgaatgttaatttgtcaaaggctctgagaaatactatagctaagaaactgtttaacttcgtttgtccaagcatttccaaatttctagcacagaacacttttttgattaccctagccaactccatcacattttaaaatgttatttttctgatccctgatttcacagaataggaaagtgagatattgaaatgttatttgtgtcagggtgcggtggctcatgcctgtaatcccagcactttgggaggccaaggtgggtggatcgcttgaatgcaggagtttgacaccagcctgggcaacatagagaaaccctgcttctataaaaaattgttttaattagctgggcatggtggtgcacacctatagtcccagctactcgggaggctgaggtgggaggatcgcttgaggccccaggggtttgaaatcagcctgcacaacattaactgagacttgctgtctaataaaataataatagtgctaagactaaaactaaaatcttaagatacagtaaaacgaacgctgatcccatccacgccatctctccagaacatcgaataaatcacttaactcttatggatctcgactttgccttgtgcataatggccaattatcataacattgagagatctaatattaataataatgcaagaggccgggcatggtggctcacgcctgtaatcccagaactttgggaggccgaggcaggtggatcacctgaggtcaggactatgagaccagcctgaccaacatggtgaaaccctgtctctactaaaaatacaaaaattagccaggcatgatgatgtatgcctgtaattccagctactcaggaggctaaggcaggagaattgcttgaacgcaggaggcagaggttgcagtgagccaaggtcatgccactatactccagcctgagcaacaagagcgaaacttcgtctcaaaaaaaataaataaaaataataatgcaagagttcatacaatatattctaccttgagtcatcacatcaaaaaaaataaattttttaaatagttcatataaaatggcttttattaataaactaaagagaaaaaagctgaagaaattttaactacccagatcacttctactcttcccacttaaccatcagtacccctaaatcttctataatgatatatttttgctaacatcattgaatggaagtaaagtgggctaacatgttcaccttatatttgatttttaatttcttctttttccaaggaagataaatgctggttgtgtttgtgggggttttttgtttgatacatggaaggcctttcttctttcgtgacaccttatataacatgattcctcttatatattcatatggttgctcacatatgagtatttaagaccataaaatttatattatatagaaagtatttactatacttgcatatgcatgtgcaattataatattgttaccctcaaagcaacctgactcccagattagcactgctcactgtaatttcccatcagatctcctgaattaacctattttctcgactatgtttctaagtatttataaaatttcttaaccttagttagaataaaacataacttcacattatgaattaggacttgaaactgttagaagtactctgagttggtttctgcagaagagataaaaactaagctgctattagaaatatgaaaattatggttttggctgtgtatggtggctcacgcctgtaatcccagccctgtgggggggccgaggcaggcggatcacctgaggtcaggagtttgagaccagcttggccaacatggtgaaaccccgtctctactaaaaatacagaaatgagtcgggcgtggtgacgggtgcctataatcccaggtatttgggaggctgagacaggagaattgcttgaacccgggaggcggaggttgcagtgagccaagatcacaccactacactccagcctgggcaacaaagagcaaaactccatctcaaaagaaaagaaaaaaaaagaaaatgagttgctacaagagctttgaaaannnnnnnnnnnnnnnnnnnnattgggacagtcacttttccttccgttgctataatgaattcccaaaaatggaacaaatggattaataggtatgaatatttttttaacagtcctaaattgttttccataaaagttatgctatgagtatgcaatttcagtaagaccctaatctgccagaaatattttcttttttttaatgccttaatttaatatgttttttttcgtttgttttttttttttgagacagagtctcactttgtcactcaggctggtatgcagtgatctcggctcactgcaacctccacctcccgggttcaagcgattctcctgtctcagcctcctgagttgggatcacaagcgggtgccaccacacccggctaattttttgtatttttagtagagacagggtttcaccattttggccagcctagtctcgaactcctgacctcaggtgatctgcccacctcagcctcccaaagtactgagattacaggtgtgagccaccaagcctgtcctaaaacttactaaagcattttaattcaattaggtcttcaatgattatcagtaagttcacctcacatacctttgctaatctcctacagcagacatgcattgccgtttctcatagttatctaagcatgtttgacagtattcaaagacatggaggattttagaagggcaataaagcagttagagagtccttatgttttaccctgagaggcaggagaatccaacaggaaatctgccactttcaatttagtcgacttgaattttaatcttatctgaggatttgttttaacctgatttaaaggcaagttcttttttttgaaatggagtctcactctgttgcccaggctggagtgcagtggcaccatctcagtttactgcaacctccgcctcccaggttcaagcgattctcctgcctcagcctcctgaatagctgggattaaaggtgtgtgccaccatgcctggctaatttttttgtatttttttagtagagatagggtttcaccatgttgaccaggctggtcttgaactcctgacctcaggtgagccacctgcctcggcctcccaaagtgctgggattacaggtgtgagccaccacacccagccagcaagttctttacttagattctggataatgtagatgtcaggatttaccacaaagagccaaaacagtattttaaatttttatttatttatttatttataaatagagacggggtttcgccatgttggtcagactgtctcgaactcttgggctcaagagatccacccacgttggcctctcaaagtgctgggattacaggcgtgagctgccatgcccagccaaaacagtattttaagacccaagtggtttgcttcagggtttccctttaattaaagctggttccttgcttaaaggagaactcatttttttatttcatatttgtcttartcctgtattattctgtttcctcattattcattcattcattactaatcctacatgacatgtttatttttgccagatcactgtaatgaaacattaggactttgatcattatttgtaaaaatgtgttcagccatacttttttcactgtgtgttctctaaaaatgtctaaattacatttcctttgaacatttgaaaaaaatactttgttaaaagtttgtattctttggccgggcacggtggtggctcacgcctgtaatcccagcactttgggaggccaaggtgggcggatcataaggtcaggagttcgagaccagcctggccaatatggtgaaaccccatctctactaaaaatacaaaaattagccgggtgtggtggtgggcacctgtagtcccagctactcgggagactgaggcaggagagtcacttgaacccaggagacggaggttgcagtgagctgagatgacaccattgcactccagcctaggcgacagagtgagactctgtctcaacataaaaaaaaaaaaaagtttgtatttcccatagtttcttcttcttcttggtgttccaagtgctcctgccatgaatctttcaaaaaatgctctccatctatattgtcatagatttttacagaggtggtcaacagttccttagaggttgggaggcagaaaggtatacctttcctcacccatcataagggtcaaggctgacagtcctatacgaaaagggaggttaataagagaaaggcgtaacaggtttatttggtcaaagatttataagagacttcagaaatgaagagccaaacacccagggaaaactgcttgtttttatgcttatgaagcatggacagccatgtagagatgtgactggaaaagagaatgaactaatagtaagagtggagaaacccagcaaggcctgttcagattcttcttggcctttctgtgtgaccttcctttttccagggtatagggcggggccactctggaatgagggccttatgatctcctatctgacaagggtacatcagagaatttctttatggccagctcctaggcagaaaggctggggaagtttagagtaatatttgtaggttttatgtcttcctttggggaaaagggttctagtttctgtgacccaccttggggaagaggaatcctggtttctgtgactcacttgcggagaatgaagggtaagagataggagggcaggagaaggtcagagaccttggttctgaggtggattctgaggccttccaatgtcctttagttcaaagtactcagcatgccaaagtgccatactttggggaatccttttctgagccccaacaaggtcatctatacaactccctcattttaaagataagggaacagagatacaattgatttaagtggcttgccccacatcttagaaatagttgatagaactggaagtaaaacctaagtcatctgaaccacaatctataattccttcctgagcctttaatgtaaagtggcttaactgttactaggatagagaaacaaataggaaggtgacatcaagcatcagtcgggtgattagcataaatgacccgttagccctttttcagtctggagagtatgtgattctttttctttttcttttttttgagacggagtctcgctcagtcacccaggctggagtgcagtggcgcgatctcggctcactgcaagctccgcctcccaggttcacgccattctcctgcctcagcctcccgagtagttgggactacaggtgcacgccactacgcccagctaatttttttgtattttttagtagaggcggggtttcaccatgttagccaggatagtctcgatctcctgacctcgtgatccgcccgtctcgtcctcccaaagtgctgggattacaggtgtgagccgccgcgcccggccaagagagtatgtgtttctataaaatgttctgccaagagattatgaaatacttagcgaccccatagtttttccctgtagcataataaaggcattgaatattcttatttaaacccacagtcctaaatactctatcttcatgggaagaagctgcctaaggagactgtaatataacactgccatctggcatcaaaaatttttaattacataaaaatgttacatgcttactattggagggaaaagcatcttcctataatgtgcaatagtgaattcaaaacagaatagtgacaaatgtagacagaagacaaattttatatatgtttgataacatattcacaacttggaaaaatgccaaaatgattgtagacacaccagctaaaatgaaattgggaagtgttggccaggcgcggtggctcacacctgtaattgcagcactttgggaggccaaggcgggcagatttcgaggtcaggagatcgagaccatcctggctaacatggtgaaaccccatcttttactccattacagaaaaattagctgggggggccaaattctggctaatttttgcatttttagtagagacggggtttcgccatgttgcccaggctagtctcaaactcctgaactcaagcgatccacctgccttggcctcccaaagtgctgagattacaggtgtgagccaccttaccaggccccatcttattgatttctgcaaaaaataaaaagccagcttgtattttgatatgaatttcattgaatctataggtaatttgggaaatattgctatcttaataatattaagccttctggtttggatttctttatttaggtctttaatttctttcaataaagtcttatagttttcagagtataagtttttcactttcatttgatttattcctaagtattctattctttttgatggtaacataaatggagttattttctagttcatttttggattattcattgttgatgtatagaaatacatttgatttttatatattgttcttgtaccttgctgaactcatttattctatttttttagtgaattccttgggatattgtatacacagtataacatctacaaatagatagttttacttcttccttctaacctgaatgccttttctttttcttgcctaatttccatggctggaacctctggtacatgccatttctatgttggatagaaatggcaagagtggacatcctggcgggtaacggtggctcacgcctgtaaccccagcactttgggaggccaaggcaggtggatcaggtctcaaactgctgaggtcaggagttcaagaccagcctggccagcatggttaaaccccgtctccactaaaaatacaaaaaattagctgggcgtggttgcgggcgcctgtaatcccagctactcgggaggctgaggcaggagaatcacttgagcctggaagccagggttgcagtgagccaagatcacatcattgaactccagcctgggcaaagggtgagactctgtctcaaaaaaaaaaaaaagtgtggatatccttgtcttgatcctagggagaaaacatttaatttttcactattagctataggtttttcttgtttgtttttgagacagggtcttgctctgttgctcaggctggagtgcagtggtgtgaacacactcactgcaacctctgcctcccaggctcaattggatcctcctacctcagcctcccaagtaattgggactacaggcatgtgccaccacactcagctaatttttaaatttctttcgcagagacagggtctcactatatttcccaggctggtcttgaactcctgggctcaagtgatcctcccaccttggcctcccaaaatgctgggattacagacatgagccactgcatcctgccatctatgggtttttcatagacgccctttatcaggttgaggaagttatcttctattcctagttggttgaatgagcattggtttttgtcaactggtgtttctttttttttttttttgacactgggtcttgctgtgttgcccaggctggagtacagtggcaccatctcagctcactgcaatctctgcctcctggattcaagcgattcccctgcctcggtctcctgagtagctgggattacaagcacccaccaccatgcatggctaatttttttttttgtatttttagtagagacggggttttcccatcttagccaggctggtcttgaactcttgacctcaggtgatccgccctcagcctcccaaagtgctggaattacaggcatgagccaccgtacccagccaattggtgtttctttgtctattgagatgatcatgtggttttagttctttgttctattagaatggtgtaggtggtaagctgaataatgctctcacccacccaatgatatccacgttctaatgcccaaaatgtgagtatgttatgttacataaggttgccaatggaattaaagttgctaatcagttgatttttaagtagggagatcattctgtattatctatgtaggcccaaaataatcataagggtccttaaaagtagaaggagagaggaccatagagatggcagcttgagaaggactgtgctcaatgatgcccacttttttttttttttgagatggagtctcactctgtcacccaggcaagagtacgatggcatggtcttggcttactgcaatctccgcctccctggttcaagcaattctcccacctcagcctcccaggtagctgggactacaggtgcatgccacagtgctcggctaatttttgtatttttagtagagatgggggtttcactatgttggccaggctggtctcaaactcctgacctcatgatctgcccgcctcagcctcccaaagtgctgggattgcaggcgtgagccaccgcacccagcccaatgttgttcactttaaataagcaggaaggaatgcaaggaatgtggtagtttctagaagctagaaaagtaaaggaagtagattcccctgtagagcctccaaaaaaaaaaaaagataagactttcctctaaaaagtaacgcagacctgcccacacctgattttagcccagtgagacccattttggaattctgaccttcaaaactgtacaataacaaatttgttgctttaagccactaaatttgtggtaatttgttacagcagcaataggacattaacacagtatattatactaattgattttcagatgttaaagtaaccttgcattcctatgataaatctcagttggtcatggtatgtaatcctttcttctagtggctggatttggtgtgctggtgttttgttgagcattttttagtctacattaataaaagatccttgtctgcagttttctttttcatgtgatgtctttgtctggctttggtatcagggtaacactggcctcacagaaagagttggaaagtgtttcccccttcttctatagccacccagctttgtcatggttgccatttaaatggtatgtctttgtccattcttttactttcaacataatttgaaccyatctttgattgagatttcctctacaataaccaataatatttttatgaccatgaataaaactgcatttatcttactagctgcttttttaaaaaattgtaaacctttgttttcccaatgataataacttttcatttctatacactctctggttctcttgctggcaataaaccttggtatttttgcttaattttgttaaacttaaaataaaattttgtcactgtatatgttgggcccatctttttttttttttctactggtctgtgaaatctgtctaggaaccaccaaattacaggatttccaagactaggttagagatatgttgtacataaaacataggttgtatctatggaaacaagtttattaaacttatgagtaatatttaaactaacaaaattttatcagtatttttgctttaattcagatttttaaaagacatcctaaaactaggatggaaaccatatcaaaatcacgactgtacattgtgaaaaactgaaaacatctaaatgtccaataatatagattggttaaattacagtgtatttatataatggttatctatttaaaatcatgctttatagtagtattatacagacatggaaaaatgttcagctacaggtcaacttgtcacgttcggtgactactacctcctytaaccctttgggtgtgttgcagcttcccaaggtggtttaccgtacctattggctttctttaatcctacttttttggtaaatattcccttcattaaatgctgttcagtcaccccactttagtgaatcatctatttccggctaagatcctgaaaaaagttattaaccattaacacaggttaatggtgaaattagaccattactctggttggtggaattatgatgaaattacagagaaaacaacaaatgcctgttttttttttttaaacaagtaataccatgataggtgcactacacctaataatagtgagggctaccattaattaattattagtgagttagttgtatattgtgctttatagatcacctcctttaatcctttaaataactgtataataattaacatcacctccagttagacatgaggaaacattaaacattttttattgtcaattaatatattgtcattrttttcttttatagatcattcccgagaagtgttggagcaattagtaggcccaaacaaactaaagcaagtgacatggactgtttattgatgcttttttgaagatgatcaatgctaggaaagcttatcaaaactactttcccaggaaaccatctatagagatttgcattctacttaatgttaacactatttttaattattttattgtsttaagttataactctcagagaattagctaagtcttggtatatacatggtttgtgctttactcttaaacatctttaaagtgctattattctatatctgttggatgagtcattatttttgaaatgataatcctagcatgaactctgatctrtggtgttggattctgtttcttaaataactttaaaattaactgttttcccttgagatttccttctcctatgtaggtatttgagctattgttctaagtttacctgtaagtataaaccttgggagaatctaagtaaacatatttctaaaagcatagttaccttcctattttctggctcttaccttcttggagtatttaaatgcccatttgccaaaagcagacctgaacatcaagcctgttaattcttcaaagaatttaggtatttgtttcaccgaaatgaagtgacttattagccattcagcgtattagtattacagaggctcttgcccagccacatccattcattgatttttatggctactcttcccagttacattttatgcatctgtaagctttccttccttagcaaaattgcattcaaaaatgkgtaaaaatgagtaaatacagaatatcactacagagacttgtatcctcaggtttattgatttcacattgtgaaataaacagcaaaggtcttagttttcaagtgraaactttttggtaatcacaaaattacctgacacataccacgcttaaaccaacccccaaatttagcatattcattttgccatgagccagtcttgagattttcttaaaagatttcttattttgcctctgatgtagtgaaaaacggggtaagtatgctaactttcttgtatatgttggggggtacttattcaaytccatttcttgtccttacaagatttataaatgtggtatgtttatagtgtggatatatatgttgccactgcaaaggtggtgcatatgtatatatgtgcaaaatgggtaaggcctgttctaactatgaaatttttctaaagacaaattcaataaaatttaatactgaatatttaaccaagtcaatcacattttcccctttttgcagaaactagtttcgacatctaaattgtgagcttctttgggtctatgaaggatttatcttcctaaaacagtttgcagtttgatatttctccttttttatgttgctagctgtattaactatttctcaccactctgtttaaaatatctgtaccccatccagtacccagtattccctattacccttacttctttttctccttactacctatcaccatctgatgcctgttttcatttgttcattatgtctccctactctagaatacaaatttcataaggacaaartatttatctttttttttcattgctgtatccccatatccccagtgcctagaacagtgcctggtatataataagcactcaaatattcattgaataagtaaatatggaaagaaataaaggaggaaagaaagaaatacccagtaatacccagcctggccaatgtagcaagactccatgtctacaaaaaatacaaaataaaaaaactagccaggcatcatggtggtgcatgcctacagtcctagctactaaggaggctgaagtgggaggattacctgagcctagaaagtcgaggctgcagtgagcacggtcgcattgctgaactccagcctggatgagagagcaagacctgtctaaaaacaaacaaaacaaaacacccaacaacaacaacaaaaatttccagtctctagtctgatttatattttctaatataaagagattggaagtcatcattcccatcctcacaataagaaaaaagctcaataaactgaaaagtcaacaacacttagatccattagagaattaaggttaaagagagaatgcctcacaaattagaaacgcaaatacaaagaaccatagcttacagggagcagaagcctgttgctggagccagtaccaataggaacatttatgctgtaattcctgagttgctggaggctccatgtggatggacttaagaatcaaaagctccagcctggcacagtggctcacacgtgtaatcccagcacttggggaggctgaggcaggtggatcacctgaggtcaggagttcgagaccagcctggccaacatggcgaagccctgtctttactaaaaatacaaaaattagctgggcatggtggtgcatgcctgtaatcccagctgggtttggtggtgtatacctgtaatcccagctactcaggaggctgaggcaggagaatcactttaacccaggaggtggaggttgcagtgagccaagatcacgccattgcactccagcctgggcaataagagtgaaactctgcctcaaaaaaaaaaaaaaaagaatcaaaagctctaggaatctgtccataaacgttatctaaccaggtgtggcaaccctgcagtcactctgaacctattctgcttttgggagctgcccaattcacagattgttctttgctcaattaaactttgttaaattaaaacaaacaaactccagggggcccactcctaggggagacaccacactttcatagttttacctccaggatacctaccaggttctcagggtgaggatcagagaaaaatcccctcttctggtatgaggatagggaaagtaaccattttgaaatatgcccaagtgttcagttctccttaacaaaagccagttctcaagggaaactattttaccagagcctcgttgacctgggggaaaggaagcacccaactccagctgcctctagccttcctgtctcaccaaagtgacaaaagaaaagctgaaagcacttgtgaaggtcacagcaggggcacaggctgacttaactgactgagacttaatcacaggactatagaacataccttctcccataccttatcacatcagttaggctactgtataataacagggaattacaggtgaaaaaaactgcaagcttcagactctatataagaaggaatctctagggaaactcaaagataacagaggagacaatagccaggacactagaggaaaatttagcctgtaatatctactctacagcaaacagtagccctacccagattttaaaacctcatgctaccttagtttacttgtttatttatgcaatacatcatgtctagctatcaacaaaaaattacaaggcatgctaaaagacaaaaaaacagtctgaaaagaaaacaagcatcagaaccagactcagttatggcagacattttagaattaccagatcataaatttaaaataactgattaacatgcaaagggctctaatgcgaaaagcatacaacacgcaagaatgatgggtgacgtaagcagagatagaagctataagaaaaaatcaaaaggaagtgatagaagtaaaaaacatcgtcaggctggcgtggtggctcacacctgtaatcctagcactttgggaggccaaggcgggtggatcacctgaggtcaggagtttgagaccggcctggccaacatggcaaaaccccgtctctactaaaaatacaaaaattagccaggcatggtggtgcacacctaaaatcccagctactctggaggctgagacaggacaatcgcttgattgggggaggtggaggctacagtgagccgagacatgagtcactgcactccagcctggacgacagagctgagactccatctcaaaaaaaaaaaaaagcccagagttcaaggctgcagtgcccaatgattaagcctctgaatagccactgcattccakcctgggagcaaagtgagactgtctctaaaaaaagaaaaaatatatatatagtcttcttctgttttgttttgtttgtttaattcaaagttacatcacagttgtcctcractacagaaacagatccagctacaatgtttaattcttctccattacttaaattaaatgctgccaccattgagtatggcattgtataatcatattccttcagcggttaaaatagaaaaaaaaatgcagatagagatgtgtataattggcaygcatagaaatacagaaccagttacatgacaaaagtaaacaaaactctaaaccttcatattttaaaaacaagattttccatttaacaagaattacrttcattaaactggagagtatctcctatagagaaaacttttagagtcagatccaaacattactatattcatacttggaagcactttgacaactcaaggctgaaaaccccacactgtgcttgttgtcagtccactgttttcctgcctagtagactccaaaagtgaatattctaccactttgtgcaggtgatgctgaatgctgtgtccactgaactggggccgcccagggtcaccaatcagtactcgagttctataggtccagaagcacttcttcagccactgatgaagactatctgcaaggtcttcatcataaaacatatcgccaagaacaacaaggtcccacttatcttgttccaaattcaaaatgttttggattaaaataggaaaaggattcagtctgttcaattcacaatttagtgtaatagccattcctgcaacttaaaaaaaaaaaaagcacaaaatgaattggtatatgctaggctgttataattccatgttgattaaataatttagaagatctgctaacaatatatttttcttcctttttgatgaaagttgttttttaaagtagagaagtataaaggttatcccaatataagctataccacaatttccaaatacatgactggatatcctgaaaacaaacaattcaaaacacctagaaatgctgggacttttaggaatatttgctgatttcattaaccaaaagattttgtttttttactgtggacagggaaacgagacttgggcttgattgagcatggcaataaattagaactgagaccccttggctgggcgcagtggctcacgcctataatcccagtactttgggaggccgaggcgggtggatcacctgaggtcaggagttcaagaccagcctggccaacatggtcaaaccctgtctctaataaaaatacaaaaattagctgggcatggtggtgcatgcctgtaatcccagctactcgggaggctgaggcaggagaatcacttgaacccacgaggtggaggttgcagtgagccaagaccgtgccactgcactccagcctgggcaatagagtgagactctgtatcaaaaaaaaaaaaagaaaaaaaaagaactgagactcctttataaaataaaggttttcagccaggcgcggtggctcatgcctgtaatcctagcactttgggaggccaagacgggcagatcacgaggtcaggagattgagaccatcctgamtaacacggtgaaaccccatctctactaaaaatgcaaaaaaaaaaaaattagccaggcatggtggcaggcacctatagtcccagctactcaggaggctgaggcaggagaatggtgtgaacccgggaggcggagcttgcagtgagctgagattgtgctactgcactccagcctgggtgacagagggagactctgtctcaaaataaataaataaataaaataaaataaaggttttcaaggactatattctcagtgaaagggtagaccagaagaaaatcagatcaaataaaaacttacctgtctcagcctgggttctaatggaataaaaataaccctcaaagacaggtcaatactcacttgggtttggggtcaaataaacactatttacatatttcaggaaattcctagcccataaattaacataagtgcttactctggatgtctggcagacacaaatcctcttgggaaaaatgcaccatctactcagacctcaggggattcctacagataatgtcccagtgcacagagattcacaatgtccaatcacaaaatacatataacgataagctaccacactgagcatgtgtacatatttatcccagagaaaaaaaaaagatgagccttaaatattttaaaatatgaatccttactagggtctatgtcattggccaagatccttgatgccccactcatcttagcagcaatagctgtagctccacatccactcccaagatctaatacagattttcctctgacaacatcaggattatccaaaagatacctaaattaaaaaggagaaacatgtctcagagagatgaggaaaaataaatgttgggaacaggccccccaaaatctggccataaactggccccaaaactggctataaacaaaatctctgcagcactgtgacatgttcatgatggccataacacccacgctggaaggctgtgggtttaccggaatgagggcaaggaacacctggcctgcccagggcagagaactgcttaaaggcgttcttaaaccacaaacaatagcatgggcgatctgtgccttaaggacatgctcctgctgcagataactaacccaacccatccctttatttcagcccatcccttcatttcccataagggatacttttagttaatctaatatctatagaaacaatgctaatgactggcttgctgttaataaacatgtgggtaaatctctgttcggggctctcaggtctgaaggctgtgagacgcctgatttcccacttcacacctctacatttctgtgtgtgtatctttaattcctctagtgtcactgggttagggtctccccagccgagctggtctcagcaaataagaggtatgcaaaaaaagaaaaaagaaaagaaaaggaaaagaaagaaaagagatgtctttaggttgactggacaaaagaaatagtgaaaagtagcagaacttggtccaaccttggcaagtttggtctgactagagtgacacaaaaagtccatctccagagctgggcagaggtggcagaagaaaggacctagtcatttggtctttctcttcagcaggtgtgaagcacagtaccacacaactgactgattatgctattcaagtcaatttttttcaaaaaaaagttgtaggctgggcacagtggctcctgcctgtaatcccagcactttgggaggctgagcaggtggatcacctgaggtcaggagttcgagaccagtctggccaacatggtgaaatcccatctctactaaaaatacaaaaattagccaggtgtggtggcgggcacctgcaatcccagctactcgggaggctgaggcaggagaattgcttgaacccaggaggcagaggctgcagtgagtagagatcaagccattgcactccagcctgggtgacagagtaagactctgtctcaaaaaaaaaaaaaaagaaagaaagaaaagaaatgtataaatggccaggtgtggtggctcacgcctgtaatcccagcactttaggaggcaaggtgggtggatcacctgaggtcaggagttcgagaccagcctggccaacagggtgaaaccccgtctctactaaaaatacaaaattagccaggcgtggtggtacatgcctgtaatcccagctactcgggaggctgaggcagagaattgtttgaacccgggaggggaaggctgcagtctgccaagattgtgccattgcactccagcctgggcaacaagagcaaaactccatctcaaaaaaaaaaaaaaaaagaaagaaaaagaaatgtataaatactgtgcctcctaaaaacctcttagaagagcacaggccacaaacttttctgtgacttgcatttttcttgggcttaacaaaccttgactggttgagactcatgcctcagtctctcatttcggctgacaaagtattgaatacttagtatgttccagaaactaccgagcaccacgaattaagactgacaaaatactgctaaaacaaagactaaaattagtaaactcaatccaagagtcactgtctcctcttgactccatcatagagtgattttcctgctgcttgaaatgtagtataatgacctctctggtaaaactcaaagtccaattcaaccaaggaatttggactggagctaaatagttaccaaamaagcgaagagggatggagaaacgctgaaataacaaatttcagctgactcttgatcttcggattggagtaataaggaacagtgggtactactgaggcaggagaatggcagaggaagtcaggggtgaaggggacccgttggacataggctagctgaagcaataccaaaagcaaagcatacaagatagcagaaacaggacatatgaaataagacagtaagcagtaagagatacgggagtaagcaatgagttagaacatgcaagataaggaaaataagtggaaaggggttgcagtagcaatttggttacaagaactaaaagtaaagatgagcaattttgtcagaaaagataaaataaggttaagcaaggatgcacaattagcttatgagaaataaagtgyggtttaggcacaatgagggaaaggccaggatgagcaattcacttacgaaaaacaaagtaaggttaagcaagtgaggaaaaaacatataaaaggccatgaactataacaaactggggctgataccactcgcaggtcagcctgatycgttgctgattgcattctgcttaacaaactgtttgctgccttgctacttgtatgtgtcatgtccaattctttgttgatggcactaagaacctgggacttgacatcaaccagttaacactatggcaaagtagaggcatacatgccctgtctaaatagctgctactgccaggcacgatggctcatgcctgtaatcccagcactttgggaggccgaggctggcggatcacttgaggtcaggggttcgagaccagcctggtcaacatggtgaaaccctgtctctactaaaaatacaaaattaagccaggcgcggtggctcacgcctgtaatcccagcactttgggaggccgaggagggcggatcacgaggtcagaagttcgagaccagcctgatcaacatggtgaaaccccatctctactaaaaatacaaaaattagccgggcatggtggcatgagcctgtagtcccagctactcaggagggtgaggcaggagaatggcgtgaacccgggaggcggggcttgcagtgagccgagatcacaccactgcactccagcctgggtgacagagtgagactctgtctcaaaaaaaaaaaaattttttttttgtagagataggggtatcactatgttgcctacgctggtctcaaactcttgacttcaagctgtcctcctgcactggcttcctaaagcactgggattacaggcactgcacccaacagaagagggaaactttgaacagcccactcactcacagctcctgttttatgggaaaataagcaactctggaaggaatgtgaggtttatggagcgacattcactgaattaaaggagagcgaaaggactgggtgtttagcttccatctaggaactctgcaatggtcatgcgctatgaactatgaacctcctaacaggtgagatttctggatcacttatagctatccagggtcttgacagctgactctaggatttctcttggggagacagttacttgggaaaatagcttgataagcttgggttagaatgggaaattacgcaacaaggcaacaaaaaatatggctaacctgaggctaggctcagaggctcatgtctgtaataccagcacttggggaggttgaggaggccagatgtttaagaccagcctggacaacatagcaagatcctgtctctaccaaaaaaaaaaaaaaraaagaaagaaagaaaaaagaaaacaacaagactgagttttgccrgtttctgttttgtttttgagacaggccaggcgagagtgcagtggcaggatcacagcttacagcctcagcctcccaaagtactgagactacaggcatgagccaccacgcctagcattgctctggttttttgtagaggttggagggaactgaaaacagcaaagatctrtagcgccttaaaggtttcattagggtagtacctagacagggcttggcctcctggccagtagattgmccagtaaggatcactgtggggccacaggtcagctctctcccaccagaatttgcatctgggggtcaaaagcckcaactggatttcaggggtgaggctaccactgctggtgacttcagtgttctcctccaggaaagcctttatctcagggtccaaaaagcttccagctcctctccagggacactggccacagggaaacaagagaagaccactgcttcgcagagcctgcaagaggagaccacagtggttcctgtgtgctttccaacctagactcaaagccatcagtcctttccccaaacacaggttctgtcaatgttctgttgatwatagctgcttctcaaggagaatgaacaagggtgtgtctcccaacttgatctcaaccggaacctctgactctgaaaaaaaaaagaaaagtaatactgagaattgtgaggaagagcaacatttctagatcctattacataataagaaaatattggccgggcgcggtggctcacgcctgtaatccctgcactttgggaggccaaggcgggtggatcacgaggtcaggtgttcaagaccagtgtggccatcatggtgaaaccctgtctctactaaaaatacaaaaaattagccaggcgtggtggcgggtacctgtaatctcactacttgagaattgcttgaacccgggaggcggaggttgcagtgtgccgagatcgcaccattgcattccagcctgggcaacaagagcaaaactccgtctcataaaaaaaaaaaagaaataaaatattacagtgtatattactgtatctgatgattcacatgtgcaagttcatttcagatgaaagctttggtgcatcaattgggaaaatccaatctttttaaatgatacttttcacaagagaatccttttagtaatttaacacaacaaatatacaagcatttgattttgaaagaatcctcaagaaaatgcctcttacaggaaatcagccatacagtcatccttcagtatcctcaagtgattggttccggtatcccctgcttccaggataccacaatcagaggatactcaagtcccttatataaaatggcatcatatttgtatataaactaggcatatgctgtggtatactttactttaaatcatctctggatgactcataatacttaatacaacgtaaatgctatataagtagttgttacactatttttgtgttatttttattgttgtaattttatattgctatattgttatattgtgggccaactgtacctttaaagttctttcataaatttaacaaagtaggcatgcttggtaactgtgaacaaaataacagaagtcttctgtcttcaggaagcttatattctagtggtgggataaagcagttaacagggcaaacacagtttttgcctttatgaagtctagccaagagttctgggggttaatgaatttataattgtctgtgggcagagatatattaatacaaattatattgactactctatttcattaaagattgttgtatcataaaacaatgcaatcaagattcaggttttttcctttaaaaatactgtatgcatttaattgtaataaaagaacatcaactcctaaatctctttctgtaaaagtatctgatggttcgattttaccaagcctaaactgaaaagatttgctccaacagaaaaacacctgtgcaattgatcactaagatttgtttaaaaatatatatatatagaaaaacacccggattagaataaatgagaatgaggaacaacttaaacacaacttatacacccagttgtttggggacctcggatctcttctgcataaatgttttaaatggtcttaaatccactaaagtatttaggggtcaaaaatccaaatccccacaaggggctggacatcataaatgagtgatgcaggctggctgtaaaataacagaggggctgtggcaagctggagactgttttcaaacagttcaaaaaggctaggcaggacatgctgccagatcctccgatttctcaaaatcatcaaaaaaatctagatattgacacattagcttccacctttttttttttttttttttttttttttgagacagagtctctgttgcccaggctggagtgcagtggcgtgatctcggctcactgcaacctccgactcccaggttcaagcgattctcctacctcagcctcccgagtcctgggattacaggggcgtgccaccacgcccggctaatttttgtattttttttttttttttttttagtagagacgaggtttcgccatgttggccagactggtctggaactcctgacctgaagcgatcctcctgcctcgacctcccaaagtgctgggattacaggcgcgagccaccacgcccggccagcttcggcttgtaaacatcagcaactcattcaaatatcaaaacacagggcaggtcaaaatgcatgtcaggtcatacatagcctgtgaactcagcgtagacttccagtgggtgttagttaccccacatcagtgtcctgggatcgtaggggtctctcagggcctggtatcccactagactaattgttaagcagtactaggctgtcacttgaatcacacaacgcagcctaagtttaaaggtaacgcagagcaaatagagattatttgggatttggaccccatgtcatttagatcggcgcttccctctcccgtcccagcaccgatgaggcatgggttatgaagtatgtgactgtggtgaccacttggtatttctcttaatgagaaggagagctgatgggatgaaaagagttacgttccacaacgggtagacggcggcgtcattttcctccagaggcggggtggagtcgatcttaaaggggcaggcaccgtcctccctgtctccttacctagctttgctgacaccgccctcggaagtaaagcatagggctcgcctgtcactcgccctggcgactgttcccgctcatgctttacatttccggggtcccgctaccaaaactgagccacgctctagcagagcgccgcggcccggcagggggcgggacggacggcggcccctcgcggccccgccctttttcccagcagcgctttctttctcctccactttcttaaagggacagaagcgcgaaaccaaagggcgccctgacctcacctggaaaataagggaacgttaaatctgtgtgcaatgtttgtagaattttgattcctaaaaagttcattctgaaactatgcaacacctactatgtgccagtcgcacttccaggcaccgggcatagagtggtgagcaaaatagacaccgtatatttaaaaaaaaaaaaaaaaaagacacagtataagccctctgtgctgcctacattcaacygcgattaaatcataatgaatgtcctttcttttctaataattcataaattcactagcaatttatttgcagcctatatcactcgagtctggatctacatatatccacctttcaactggacccacatcccactggcccctcaactcaacactcaaagttaactcaccatctgacctgacaacaattaaaacctgctctggcgtgctagaggggggaaaacggtccaaaactaagaaacaggaaaatcgtgtttctgcattttagtttgcagtttgagaaatgcactggcacctgcctgttcaaaattagaatttgtcgcttgggttctgcgctcctgccatgggtgtgacagctttctgtctttccatgtaaactggaatctttaggaactactacaaggaaaggaaactttgtgcttccagtcaacagccccagatgcagccttatcatttctttcttagttgaatggtgtatttgctacattcttgttgataagctatacaccttgcatttcacagtattctgccttagatttcctgtgtaataactgatataatgtgtttatgaactgcattcatccacttatgagctgcttttttcttaattagttgctgatgtaaacgcttgttttctcaactataacttttcattaccacacactctccgattctcctgctagcagtgaaccttgatccatgttcaagatcaatttctataagaaatattgtttttaaccagcttcggtgttctatcccaattaatagtttgaacatcccagtcactgcccaagaaaccagaacgaacaggctaacctaacatttttacaaaagagggttggttcctggaaaaaagcttggtagtcatcactgaagatgcatttaataatgtttggataactcattcaaaacttgcaacttggctgaagggactgcaacatgcctttcctgtcccataatggatttaaaactggtccagttctttctatccctcctgccattgccttagtttggcattataatggcttgcctgggttcctataacttgtctatctctaattctgccttccttaaaactattcttttttttttttttttttttttgagatgaagtcttgctctgtcgcccaggctggagtgcagtggcatgatctcggctcattgtaacctctgcctcctgggttcaagccattctcctgcctcagcttccccagtagctgggattataggcgcacaccaccacacccagctaatttttgtgtttttagtagagacggggtttcaccatgttggtcaggctggtgcccaacttttgacctcgtgatccgcccacctcggcctcccaaagtgttgggattacaggtgtgagccactgcgaccggccaagattattctttatattgcagcttaaatgatttttttctgaaacttagattccatagtctagaaaaggcctgcccttcctttagtcccagacaaagcatgaaaaacagggatatatggattttcttttctgttgtttggtgttgatgcattgtaatgtcttaatagaaaggaccgtctagattttaacaaaattgacccacatacatccaagcagacttgtgaactgataacaatttgagctgttgtctatccttgtgatttttttactttaaatacctgccctacatttttgtttacaaagccagttctctaataatcggtccctcttgcaggtgcaagtaaaaaattctattccctacacaactttgtctttaagggttttttggtttttcaacaagttattcaattacacttattaactgtatgatcttggacacattgctaaaccttcttaataatcagtttcttcatctgtaaaatagtgatgatagtaataatgttttaggaagatttaataagataaaagcacatcttgtttagcccagttcctggcatgtagtaaatgcttgctaagtatgctattacagtgatgatcattattagaaacacagagatagtgttgatgagcagcagatcaggttttcagttaaaggtgagaggatcaaacttgaattttagaaaaatgttttatgctgcaggtagcaaagagttaaaggcggggcaagactgaagacaaggaaaccgccattggaggatattatggtaatccaagcaaacaataatggagacagaactaaggtaactgcgatagggatggaaagaattggaacatttgaaaatgattaaggatgagctattagcaggacttggagactaattaaatacactcgtttaaccgtaatgctagccaatctaagggcaagatggtttctcttgctccactcgattggcctgtgctgttcatcagcaggctatctgtgttctcccttgcttaaaacctgctctagctccccagaccttcaatggtacagccggattcctgaccacagctttcctggcccatgctgatcagtcccgacttaacctatcctgcctcttttcaaaacactcctcttctcccctctctgctgcaatttgttttcctcccacagcgccttgttctctcatccctaggccttgttgaagacagaaagctgccactgctaaccgctcctcactgtccaaaccacctactcgtccttcagaactcagttcaacgttaaggtcctctgaaaagccttccccaacatgccagcctacacgctaatcttcctattttcttagcttcctatgggcatgtacaacaagcatatcaagcagaaccgtcactgcctagacttgaaagcagaccatgtcatacctcttttagcctctggcacagacactcaataaactctgttaaatgaaagaaaaggcaaataaatacatgagtaaaataacaaacattacatatcagtatctcatttaaaaaatttacttttaacagctttattgaggtatatttgacttcacattggcaactttgcatgtttacagagtacagtctaatgtcctgacatatgtattgtcaacccaaatgagagactgaggcaagaatctcaatcaatccaggtttattgagccagagcttaaaggtgtgcccaggaaaaccctgagtcacagaaacatgagtctgtggcccgtgctccttgggaaaggcttcaggagactcggtatttacacatttctttaagagaaaagacatgcaggaaaagggagataggcgtgaagcaaatgatgacattcttgtgagattttaattagtgcccagtacatctatgctatacatgagataaggcaaacattcgaaaatagggagtaaaggaagaattcattattcagacttctcaggataggtagaagaataatggatgtcatctttgtttttgcacttgggaagataaggcttataattgacacagtcggtgtgaaatttaccagactttaggttcctggacaaggagttagacttaagtcacagacttaaagtgacagttgacatgtccttgtttatgggaagatttattatacaccttgaaaggtttaggagccaggaaagaattttcttaggcgcgatttgtgagggcagttatctggaaatgcctgagaccttttccttttgtagggatctggctaatgtatagcgctttgacacaaggttgtgaagtaagcaggcttaattttccctttggcataatgagtttgggggttttgagagtttttatgttcctttacagtatatactcatgaaaccatcaccaaaatcaagatagtgaatatattcagtgctcctgtgtaattcctccctccagttcttcccctacttttttttttttatctttttgttctgtttttttktttgtttgtttgtttcatgagacagagtctcactctgtcgcccaggctggagtgcagtggcgcgatcttggctcactgcaaccttctcctcccgggttcaagcaattctcatgcctcagcctcccgagtacctgggattacaggcgtgaaccaccacacctggctaatttttatatttttagtagagacagcgtttcaccatgttagccaggctggtctctaattcctgacctcaagtgatctgcccacctcagcctcccgaagtgctgggtttacaggcatgagccacggcacccgtccagtccttctcccttctaccacaaccattcttggctttctgtcgctacagattactttgctttttctagattttcatatgcatgcaattgtatagagtttatacggtttttgtcttatttctttcattagtaattatttttattcatccatgtttcctgcatcaataattcattcctttatattgctaagtagtgtttcattgtacatatagataagctcccatgtttatccatttacatgttgatgaacatttgagttctttctttcttttactattacaaataaagctgttttgaacatttgtgtacaagtctttgtacagacttaggctttctttcctttgcataaatacctaggagtgcagtggctagatcatatagtaggtgtatgattaactgcaaactttttctaaaatggttgtgcctgctgggcaccatggctcatgcctgtaatcccagcactttgggaggccaaggtgggaggatcacctgaggtcaggagttcaagaacagcctggccaacatggtgaaaccgtgtctctactaaaaatacaaaaattagtcggacatggtggcgtgtgcctgtaatcccagttactcaggaggctgagacagaagaatcacttgaacccgggaggtggaggttgcagtgagctgagatcgtgcaaccacactccagcctggacgacagggtgaggctctgtctcagaaataaaataaaacaaaatagttgtgtcattttacatttccaccatcattgtatgagatctccaattgctccacatcctagccaacacttgctattatttgtcttctttattttttttgagacagagtttcactctgtcacccaggatggagtgcagtagcgctatctcagctcactgcaacctctgcctcccaggttcaagtgattctcccacctcagcctccccaatagctgggattacaggcacccgccaccacacccagctaattttttgtattttcagtagagacaggtttcgccatgttggccaggctggtctcaaacttctggcctcaagtgatccacccacttcggcctcccaaagtgctgggattacaggcctgagccaccgcacccggcctctccctagacttttgaaggaagtttgtagttttgggttttctggagcttcagcttccttctagcttctctctaccaaactgcccttgcaacaaatctatgggcaccgtgtctgtgtaaatttgtgtgtttccttttttcaattccctatctgcagtttgtacttgttgctccctcagttagtaaccgggcaaacttttaagcataggtcactgagtcacacctaaacatccgacaactgacactagaatcctcactccctgcaaaacccagaaatcttcagctaactaagactgtggtgccatctactgataatttagcttaacatcggccaagtgtgcttcagctaaaacagtaaaagcaaaaacaaaactgaaacttaaacagttatgtataaagagcaaagattctcacccacaatgttactacacactggtacctttttttttttttttttttgagacggagtctcgctgcatagcccaggctggagtgcagtggcacgatctcagctcactgcaacctctgcctcctgggttcaagcgattctcctgcctcaggctcctgagtagctgggactacaggcgcatgccgccaaggccggctgattttttgtattttagtacagacgagatttcaccgtgttgcccaggctggttccgaactcctgagctcaggcaatccgccggcctcggcctcccaaagtgctgggattacaggcatgagccaccgcgcccggcctggcacatttctttagttgtaagatatgatggaaatacttatcattggtcataaatagttcaggcttaaagcttaagaaagatttggtataatctataacacattctctctcaatctttctctcacacacacgtgcacactccacaactaacccactagcaaatccaaaacactgtctatgcagaatctgaccacttttcaccacctgcattgctttcctctaatataaatcaccatcatctctagcctggattattgctgatgggaggataaattctcctctactcccttgggatcgtctaaagctaagtctaagaattaaatggacataaaccagattaacagaaaagcatacaagtgttactaatttttacttgcacatgaagactctcacaagatgaaaggggcgacgacctgaagaaaatggccagaacagaaagcttttataccttttggacaaagaaatgataaatttatgaagaaatgataagacaaagggatttggactaggggcagtaaattgcgggggaatcactaggagatatatggtgatgaagggaccataccactgtctgcggtataaacccggggtttgtcgtcaggcgccaggaaaatttaggacactgacacacacaaggagtgtaggagcagaggtttaataggcagaagagaagggaaagagaaacagctttctctatagagaaatggatctgcgagtggaaaggaccagccggcagtggatgcgccgaagtttatagtcaggtctgaggagacggtgtctgatttacatagggctcatagattggtttgatcaggtatgacgtttacactgtgcgcaggggaagcctggttaccccaccctaatcttattatggaaatagactttctagttgatcaacaccatcttgtctgctccttacagtacacgtggctgacaaagggaagggaagatggagcctccaatttgaacatgtgtactccgaagttcctccctgcgttcactcgtgcaagctcccagcttgcttgtctgtgtctgcagctcggctttacagaatgctctttgttagaaaatgatttggggctgcttttcatgaaaaggaaaagccttactgaggattcccatactcctactatctgcctaagtgatttcttctaaactcctgtatcagtgaagtgcaaagctagtgaaaggtaagtgttcgtttagtaagtttatctgtataggtccattgtagcatcaattcccagtctctggagataagggttattttctctttctactaaaggaaggcatcggccgggcgcggtggcccatgtctgtaatctcagcactttgggaggcggaggcggctagatcacacctgaggtcaggagttccagaccagcctggccaacgtggtaaaaccccgtctctactaaaaatacaaaaattagccatgcgtggtggcacgcacctgtaatccctgctattcgggaggctgaggctagagaattgcttgaacccgggttgcctcactgcaacccgggaggtggaggttgcagtgagccgagattgcgccactgcactccagcctggacgacagagcaagactccgtctcaaaaaagaaaaaaaaaaaaaagggaaggcatctttctcaaaggaatttttatggcttcctaaaggtaggaatggacacgtcagtggggagggcaaagcaactccatcctggatgctaatccatgctggtttctgattaacgccagttccaggaagtcttgtaagacttccagtttatctattgttccttgtgtaagagcacgtactgactgtaaatcctgcccttaggtcaagtggccttgatgttatcatacttaagttgttctccacgtcccttctgaatcactcctctcctggggtatataagccctgggtttgaggggtaatggtgcggggatccaccatcttgtctcactgcttcctgagatacagacatggcttctgttctaagtccctagtaaaygtttcttcctaagaaactggatgtgtcagcctctttcttccacctctcagcttccttggccgcaggtttgcatagaccctgtccactgtgaaacagtgagctagctcttcctgcaatgacagtctctcaagtaccttcagcttgaaataatcagtatgccaaactggcatatttgggggtggcacgtccttaactctttcattgcaaaggtctttgaactaacctccttatccctccttgcttcctttggtctcttctcaacagaaaagccagagtgattctttaaaaaaaaaaaaaaaggtcaggtcatttcaatcttccactcaaaaccctcttagtgttactggaaagggatcacgattcagatcccaagagagggttcttggatctcacgcaagaaagaaatcagggcaagtccataaagtgaaagcaagtttaagaaagtaaagaaataaaagaatggctactccaaagacagagcagccccaagggttgcttgttgcccattttttatggttatttcttgatgatatatgctaaacaacgggtggattatttatgcctcccctttgagactatatagggtaacttcctgatgttgccacagcatttgtaaactgtcatggcactggtgggagtgtagcagtgaggacgactggagatcactctcgttgccatcttggttttggtgggttttggttggcttccttactgcaacctgtttgatcagcaaagtctttacagcgacctcctatctcattctgtgactaagaataccttaacttactggaaatgtagcccagcaggtttcagcctcaggttaaccagcccctattcgagatggagttgctctggtacaaaggcctctgacagcagggctgagtgcagtggctcatgcctgtaatcccagcactttgggaggcaggtggatcacttgaggccaggagttcgagaccaacctggccaatatggcaaaaccccacctctactaaaaatacataaattagctgggtgtggtggtacgtgcctgtaatcccagctactcagggggctgaggcaggagaattgcttgaacttgggaggtggaggttgcagtaagctgagatcatgccattgtacttcgctacggagagagattctgtctcaaaaaaaaaaaagaaaaggaaaagaacacacacatttatccattaagttcaccatctttcatgggtgctccaaaacaattacaatagaaacatcaaagatctatgatcacagatcaccagaacagataatcatattaggttggtgcaaaagtaattgttgttttggccattacttttaatattaatgaaaaaaatttaaatactgtgaggattaccaaaatgtgacacagaaacacgaagtaagcacactctgtttgaaaaaaaaatggcaccaatagactagcccgacacaggggtaccacaaacgttcaatttgtaaaattcacaatatctgtgaggcacaataaagccaagcacagtaaaaggagggatgcctgtgagtggaatcatatgcagtcctttgtgactgactctttcattgagcataatgttttcttcattcatgttgtagaatgaataagtacagtcagacctctgtatctgtaggtttcacatccgtagattcaaccaaccgcagattgaaaaaattggggaaaaaaatttgtatctgtactraacagcatgtatagacttttttttcttgtcattatttcctaaaaatataacaactatctccagcctgggcaacacggtgaaaccccgtctctactaaaatacaaaacattagcccggcatggtggtgggcgcctgtaatcccagctacttgggaggctgaggcagaggttggcatgagccaattgcacgccactgcactccagcctaggtgacaaagcgagactccgtctccaaaaaaaatacaactattggtcgggcgtggtggctcatgcctgtaatcccagcactttgggaggctgaggcaggcggatcacaaggtcaggagttcaggaccagcctgaccaacatggtgaaaccccgtcacagggctgggcgtggtggctcacgcctgtaatcccagcactttgggaggccaaggtgggcagatcacaaggtcaggagatcgagaccatcctggctaacatggtgaaaccctgtctctactaaaaatacaaaaacttagccaggcgtggtggtgggcccctgtagccccagctacctgggaggctgaggcaggagaatggctagaacccgggaggcagagcttgcagtgagccgagattgcgccactgaactccagcctgggagacagcgagactccgtctcaaaaaaaaaaaaaaaaaaaaaaaagaaacccatctctactaaaaatataaaaattagctgggcatggtggtccatgcctataatcccggctactcaggaggctgaggcaggagaatcgcttgaacctgggaggcggaggttgcagtcaactgagatggtgccattgcactccagcctgggcaaaagagcgagactccatctcaaaaaaaaaaaaaaaaactatttacatcatattcaacattataatctacagatgatttaaagtaattatgcaaatactacatcattttatataaggaactcaagcatccatggattttgatatcctcaggggtcctgaaacgaatcccctgtggatactgaaggacaattgtactacattccttttgtggctaaataatattccattatgtgaatattcagtactatattgtgtttctccattcatctgtgataaacattaaggtggtttccactttctggctattatgaataatgccactataaacattaatgtacacatttatgtggagacatatgctttcaattcacttgggtatatacctaggaatggaagtgctgggtgatatagtaactctatgctcaaattatttaggaattgccagactgtcttccaaagtgactgcacaattttacattctcaccagcaatttatgaaggttccaatttctccacattcttatcaacacttgttttttttttgtttgtttgttttctttggttttgttttgagatggagtctccctctgtcaccaaggctggagtgcagtggcgtgatcttggctcactgcaaccttcgcctcccgggttcacgtgattctcctgtcccagcttcccgagtagctgggattacaggcacctgccaccacacctggctaatttttgtatttttagtagagacggggttttgccatgttggccaggctgatctcgaactcctgacctcaggtgatccacccgcctcagtcccacaaagtgctgggattacacgcgcccagcccctaaattacctctttaagcttcaaaataagcataggatgtaggtatactattatgacctctgttttagaggtaaagaagtgaagtcacaggaaggttcagtaacttgcctgagggctcataaatagctggcagtagagttgggatgacacacatgtcgtctggttccagagctgcacttaaacacaggacgtagactcggtaatgagaaagaggaagctatttcaagcacgagccaaaggcagggatttacaagttcattgcagaaaataaacagcccagtctgactacgaagagcactcaccggagccaggttgcgggagatgaaatgaggatagggtgaggcaggctggtggagggcctggactgtgaggcttagaggcttggattccattaagaatattaattgggagtcatggttggttggtgtgtggtcaagggaacaataaaacaaaaacagcagctcagtggctgtcgacatgttaatggcctttgaaaataaagtatacaaacartgagtggcaggaaggcgaaaagaaagctttctcatcaccaagctcaaactactctgcattataattacacaatataaaaagatggaggatcatgcctgtaatctcagcacaagatccttwgggaggctaaggtgtgaggactgtttgaagccaggagtttgaaaccagcctgggcaacatagcgaggctttgtgacaaaaaatacgaaaattccagcctgggcaacataatgaaacctggtctctacaaaaattgtaagaactagctgagcatggtggtgcacacctgtcatcccagctactcaggaggctgaggcaggaggatcacctgagcccaggaggttgatgctgcagtagccatgttcaagccactgcactttagcttgaaggacagagcaagatgctgtctctaagaaacaaaacgaaacaaaaaaaggctgggcgaagtggctcacgcctgtaatcccagcactttgggaggacagggtgggcagaccacgtgacatcaggaggtcaagaccagcctggccaacatggtgaaaccccatctctactaaaaatacaaaaatgagctgggcgtggtgtcatgtgcctgtaatcccagctactttggaggcagagatttgaaaattatttgaacccgggaggtggaggctgcagtgagccaagatcatgccactgcactccagcctgggcgacattgcaagaccctctctaaaacacaacaaaacaaaacaaaacaaaacaaaagatggaaagattgtaagttatccttaccaaacttctctgtccccttcagacacatttagatgttcacatctataattagccattgtcaatggtaatgagattctaacaaccgcgtatcgcctgtgtgcaatgtgctgtgtacaaagtttttaatctccacagcaaccagttcagaagaggaagctgatgcttgggcgggtagggggaatgttatgtctctttccttttctctggaaaaaaacaacaactttcatgtcatccaggctctctctcatcaaacatgaatcttctctacagcatctgaaggcctctaggattcttcctattaagtcacatctgcctctgagcagggggacaaggcagcgttgcacaaagcctgtctccacctctcttagcccacagtgaccccaggagctaaaagaacatcagagaaaaacatcactaatatctcaaagatactgagtgctgcttagagttgcagtggcaaaaatttttatccatgtaaaaatgtagtccaggaaagattagtttgtcttcccctgctggactccagcctatttctacctaattattttttcatgtgccaaaagtacaggtagggaattcagggggaagtaaaatagtgtttattgagtgcaactctatggcaggctctttattcacatgatctcatttaattcccttaacaatcttgtaaggtaaaaattgttattcccggtgttaatgcaatatatggacactgaggccaaacagcttaagtaactggctgaatgcacaaaggcctggaagtggcagaacttggactcccatccaagttctaaagacttccttctatgtcccttgcactctctgatcgcccacattctctttcccagcagtctctagttaccaaaattgctctccttaaaaaaaaaaaaaaaaaaaaaaaaggccagccacagtggctcacgcctgtagtccagcacttcgggatcctaaggcaagaggatcacttgagcccaggagtttgagaccagcctgggccacatagggtgaccctatctctattaaaaagaaagaaaattagccaggtgtggtggcacacacttgtggtcccagctactcaagaggctgaggtgaaagaatcacctgattacctgaggatcacttgtggttccagctacttgggaggtcgaggctgcggtgagccaagatcatgtcactgcactccagcctgggcaacagaaagagatcctgtctcaaaaaaaaaattgctctccctcracagcctgcttagacggcacctggcttcaacaaataatgccttgaacattagtagcagtgcyggggaggaaatgagctgaacccaatacactggagatggtggccagggggcctctcacaattcctgctcccacctcatcctgtagcaaaagaagcactttcttccacttccttattggttctgtgagggttaattctatgtgtcagcttgactgggttgcaatgtgttcagacagttagtcaaacattcctctgggtgttcctctgagggtatttctgaaagagatgaacatytgagccygggcgtggtgtctcacgcctgtaatccgaacactttgggaggctgaaggaggtggatcacctggggtcaggagtttgagaacagcctggccaacatgatgaaaccccatctctactaaaaatacaaaaaattaaccgggcgtggtcgacagtgtcccctggcaccgctgtatgtgcagcaacagataggtaaaatctaaggttttaggacagatgtgtgaaggctgctggtgaatggatgggaccaggacaaagagggtacctcaagtacaaggtgctctttgatcaagccaaggaccattacgggttgcagggttgtttccctcccggtcagccctgacagctaaagggacatcatttatgccagtgctccaagccacccttcagctcttttggttaaaccaacatgtatggctctgggctgggcatggtggtgcacgcctataatctcagcagtttgggaagccgaggcgggaggattgcttgagcccaggagtttgaggctagcctgrgcaacatagcgaaaccccaactctacaaaaaaatacaaaaattagcyrggtgtggtggagtgcacctgtaatcccacctacttgggggctgaggtgtgaggctcacttgggcttgggcagatgaatgtgcagtgagctgtgatcatgccactgcactccaggctgggtgacagagggagaccctgtctcaaaaaaaaaaaaaaaaaatgtatggctctggcatttttcacgtttgctgaagcatgttccttgggggcatawtgagaacacagraaccttgtctataatgcataatgaccatcggaggaaagaatccccagctagctccattgtcagcaactatcaagaacctgctagggggccaggtgcggtgtctcatgcctgtaatctcagcactttgggaggccgacgcaggcggatcacttgaggtcaggagttcgaaaccagcctggccaacatgatgaaactccgtctctactagaaaaaatataaaaattgtccaggtgcggtggctcacgcttataatcccagcactttgggaggccgaggtggatggatcacttgaggtcagcagttcaagaccaggctggccaaaatggtgaaaccctgtctctactaaaaatacaaaaattagctgggcgtggtggcatgcccctgtaatcccagctacatgggaggctgaggcaggagaatcgcttgaacccaggaggcagagtttacagtgagctgagatcgcaccactgcactccagcctgggtgacagaacaagagtccgtctcaaacaaacaaaaacgaaaaacaaaaattagccctgtgtggtggtgtgtgcctgtagtcccagctactcaggaggctgaggcaggagaattgcttgaacccgggaggcagaggttgcagtgagctgagatcacgccactgcactccagcctgggcaacagagtgagactccatctcagaaaaaaaaaaaaaaatttgtgggagaaacaaaaatgaatamgacttcggtcctaccttcatggagttttaatatgaatctgagtagtttcaaaatatgcctaatgagactcaaaataatccatatgtyacagaatgaattctgttaaagggcagaacagagtggctctaaagtcaatctgttccaccacttactagctctgtgagcttgattaagtgccgtaacctctctgtgcttcggtgaatttgtctataagatgagagaacaaggcygggcacggtggctcacacctgtaatcccagcmctttgggaggccgaggtgggtgtattgcttgagctcaagagttygagaccagcctgggcaacatggcgacaccccatctctactaaaagtacaaaacaaaataaaattgaaaaatgagagaacaagaagtacctacttcataggttgtggtgaggattaaatgagtcaatgcctataaacttcttaaagcaaggcctggaacatagaaaatgttctattaatattaataataattattatttaaactatcaacaaatattgtgtctctgcatgagacgtaacaaccaagagttttataaaggtggcacaaggatacctcatctcttggttattttgggagtcggaaacattgtaatggagacacttagtttccaggctctcaaacaaaaggttctctaagccgtgttatcacttgagagttgcatgttttcagtttaaagacaaatttaagaccattctattgtaataaccgaaaattaaatggcacmctgataaaaagagaaccagcagcrttttatttaccttgaaaggtggtaatttaagaaaaacaggggagattttaacaggatgaagaggaatataaaaatttgtgacaagatgaaaagaaatatcggggtacttgaaaggttttagaggttgagactcaagtattttttttagaaagtcttatttcaccctgggacttamatgactttttttccccagccattactagaaggggttttgcacctccacacggtattaaaagcgacagaagaggacaaaaggaagatatgtatacaggagggagaaataaattatgtgcaatggaattaactcagctttaagaaataagggcaggatggagagtcttcaaaaggaaatataaaatattcccagcagtccgggacctctataccttcaatgatcgtgttaccggaaaagggatctctatccagaccccaagagaacgttcttggatctcgagcaggagggacttcaaaacgagtcacagagtgcagtgaaagaarcaacgttattagaaactacactgttagagtagggcatcctcagaaagcaagaggaggaacgcctcgactttgttttttgtttttcttctctagagatcttgtctatataaaggctaagctaagctgtgtccacgtgtgggtgagcagacagcatgacagaatgtatgactactgatttaaagaaaactggccttgacattctagtgtgtggatacatcaaagcaaaactattattatcttgaaaacagagattgttatgggtattggacatctggactcttggctgtagtaggagtgtgtccttgtaggtatctttaggctgtttcttccactgtaaacagcccatgamtgtgggtcgtgaccagcagagaatgggctttactatttctcaagatggagctgaacttaaaatggtgctactctggccctcmtaggctcctggttccctaacattacccccactaattttgagggaacccttaatctttttgttttgttttgtttttttgagacagggtctcgctctgccacccaggctagagtgtggtggtgcgatcttggctcactgcagcctctgcttcccgggctcaagcgattctcgtgcctcakcctcccaagtatctgggattacaagcatgcgccactatgcccagctaagagagcccttaattttaagaggagaggagggygaaggtcattcttctgtaacttcttcctgctgatagtggacatcgattgctgggacagggtcctttcacgaaagcatgcagtgagcctcctcagggagccaggtggttccttgcttgagcaatgtcccaatagttcctataaaggtaaaatatgaaatgagtaaatagatgggcaaagaagttgctgagctattttatcttgcaaacctacacaagtgcaacagaagtaaaaagcacagcaatttataataacgagtattacaataccaagcatgctgaaaagaaatgctttccaagtactggatagctaacaaaccaggccattatggggccttgagacagagaattaatgctgtaatgtgagtttccaaggaactcatagcctgggatacattatgggaatactcaggaatataaatacaacattcagttttgatcagggcaaaaattcccccttgggctgcagttaaaatgtctaaagccatacagttttgtagagccatttgtcttatttggtaagtctcttctgtcagaagggtgatagcctggtaagtatttttttttttttgagacggagtctcgctctgttccccaggctggagtgcagtggtgtggtctcagcccactgcaagctctgcctcccaggttcacaccattctcctgcctcagcctcccgagtagctgggactacaggcgcccgccaccatgcctggctaattttttgtatttttagtagagacggggtttcaccatgttagccaggatggtcttgatctcctgacctcgtgatccgcccacctcggcctcccaaagtgctgggattacaggcgtgagccaccgctgctggccctgatgagtattattgaaagctacagtgggctgagcctggtggctcacacctataatcccagcactttgggaggttgaggcaggtggatcacttgagttcaggagttagagaccagcctggccaacgtggtgaaaacctgtctctactaaaaaaacaaaaattggctaggtgtggtggcgcacgcttgttgttccagcgactcaggaggctaaggctaacctgggaggtggagtttgcagtgagccgagatggcaccactgcttttcaacctgggtgacagagcgagactccctctcaaaaataaataaataaaagctgcagctgtgtgttttgccagggcttctacttgtaattcaacatctatagccactgcttgaggagagaagacagccatagaataaaatcaccaagaagcccactttttctgtctatgacgggctgtcactgtttcccaattggtggggagggaatctagatgtgtaaggacacctgggagataaggacagtcycaagtgtattgtccagtccaactgtaaggtggatatggtcaactgtgagactcacatgctcataaccatccccaaggagaggaatgggcacccaatcttagagatgtattttgctgtcctatccacatctgatcagttaaggggagggtttgattgcgttggttgggtggcagccatccatgttatatatttcagcctggaggctgctgttttcatgcctctcaaggcataaaggtactttgcttactacttgaatttgggtagccattaaccaactaaactcattatatatgrtgtagcctaaagtagggatgttattgggaggccaaggcaggtggatcacctgaggtcgggagtttgagacaagccggaccaacatggagaaaccccgtctctactaaaaatacaaaattacccaggcgtggtggcacatgcctgtaatcccagctactcaggaggctgaggcaggagaatcrcttgaaccggggaggcagaggttgcagtgagccgagatcacgccactgtactccagcctgggcaacaagagcgaaactccatctcaaaaaaaaaaaaaaagtagggatgttaatcatttgtttgtggattaactgaaaaaggcatttcttagcttcagtgtagaaagaaaaggaatagtgactggtatccctttggtgcattggagaagggatatttcttttttgtgtgtgtggttttttttttttggagacggagtctgtctctgtcccccagactggggtgcagtggcgcgtaatctcggctcacttcaaattccacctcccgggttcaagggattctcctgcctcagcatyccgagtagctgggattacaggcacrtgccatcacgcccggctaatttttgtatttttagtagagacggggtttcctcatgttggtaaggctggtctcaaacgcctggcctcatgatccgcctgcctcagcctctcaaagtgctgggattacaggcatgagccaccgcgcccagctaaggtgtgttatttcttacagactacttatagaagtggctccaaaggcttaaatcagcctattgaatatgccaaaataagcctgaggtcgatgaaagaggtaactcatggcttaccgaacaatttggttttgcagggggagagagtttgtgcccaatctgcaaacaaattagtttcaactctatagcaaaacaagcttaatattaaggccgggcgtggtggctcacgcctgtaatcccagcactttgggaggccgagacgggcagatcacgaggtcagcagatcgagaccatcctggctaacatggtgaaaccccgtctctactaaaaatacaaaaaaaaaaaaaaaaaaaattagccgggtgtggtggcaggcgcctgtagtcccagctactcgggagactgaggcaggagaatggcgtgaacccgggaggcggagcttgcagtgagctaagattgcgccgctgcactccagcctcggcgacagagagagactccgtctcaaaaaacgaaaaacaaaaaaaaaaacagtaacttcattttgtgagtggtacccattcactggatggctttttcttgaaaagaagctttttttttttttttttttttttaagatggagtctcactcctgtttcctaggctggagtgcagtggtgcgatctcagctcactgcaacctccgcctcccaggttcaagtgattctcctgcctcagcttcctgagtagctgggattacaggcgcccgccaccacacctggctaatttttgtatttttagtakwgacagggtttcaccatgttggccaggttggtctctaattcctaacctcaggtgatccgcccccttcggcctcccaaagtgctgggattacaggtgtgagccactgcgcctggcctgaagagaagctgttgatcctttattggctcacaggagtgttccagaacagcggyccctgtgtgagatgcctgtggcatgtagctccaggagagacaggtttaattccggataagtgtacccaactgcatactgatattcacaaagtgccttttgtacctgtcgaaaattaatatatttttgcaattggtggctgttttcatgtattagaaaatctgcagtcaagaaaggcctrctgccccggcacagtggctcacgcctgtaatcctagcactctgggaggctgagatgggtggatcacctgaggtcagaagttcaagaccagcctggccaacatagtgaaaccctgtctctactaaaaatacaaaaattagctgggcatggtggcacaggcctgtagtcccagctattcaggaggctgaggcaggagaatcacttgaaccygagaggcagaggttgcagtgagccgagattgcaccactgagctccagctggggcgacagagtgagactctgtctaagaaaaaaaaaaaaggaagagaagaaagaaagaaagaaagagaaagaaaaaagaaagagaggaaggagggagggaaggaaagaaatatttgaaaattgtgaaatgaaattaaacatttgattatccattttaattctctggaaatggaaatccccataacatgtaaactcacatagagtatataaatccaactttttcacttgattttcagaaatactgtgcatatgtgcaaaagtmaagkcatggtctggccgggcacggtggcccatgcctgtaatcccagcmctttgggaggcwgaggcgggtggatcacttgaagtctggagttcaagaccagcctggccaatatggtgaaacctcgtctctaccaaaaatacaaaaattagccgggcttgatggtgggcgcctgtagtcctacctactccggaggctgaggcaggagaattgcttgaacctcggagacggaggttgcagtgagccgaaatcgccactgcactccagcctgggcgacagagcaagactctgtctcaaccagccaaccaaccaaccaactaaccaaccaaccaaccaaccaaccaaagaataaaggcatggctggcacaaagccaggaagcacgcctggccgggtggctccccacattggccaccagggggcaccatcatctcataactgtctggctctgggacctacacatgcgagagaggaattttttagtgcggtttgagaaggaataagcaacctgctgtttaatgtgttcattcaatgggtcttttacaaattgctatttgtaacctagagcgtgccagttatttaggatataattaggtttttgctgtttcactaacatacctcgtataaatgcttttttttttttttttaacacacctctatactaaagaggaaaatgcttttaaatgtaatcttgaggttaattgactctcacttctcctttctctgaagggcctgcagaactctttyagttctgacgtggccccagtagttttttggttttatttttttgagrtagggactctctcacccaggctggggtacagtggcacgatcatagctcactgmagcctcwgcctcccaggctcaagtgatcctycctcctcagcctcttgagtagctggggctaaaggcatgcgccatcacgcccagctaagctttgtttgtttgttttttgtttgtttgtttgtttgtttgtttgtttgttttagagacagggtttcactatgtagcccaggctgatcttgaacttcygagctcaagcaatcggtccaccttggcctcccgaagtgctgggattacaggcgtgagccacctggtcgttttttttttttttttttttttttttgagatagagtctcaccctgtcgcccaggctggggtgcaatggtgagatctcgtctgactacaatctctacctactgggttcaaatgattctcctgcctcagcctcccgagtagctgggattacaggtgcctgccaccatgcccagctattttttttgtatttttagtacagacggggtttcaccatgttggccaggctggtcttgaactcctgacctcgtgatccgcccgcctcagcctcccaaagtgctgggattacggcgtgagccaccacgcctggttaccacctagtagtttttatctggtgacatctcatctctttgaaatctgaaacaccaaatctaagtaagaatctgactttagattttgatgtctttaaattagataaactagctggacgcggtagttcaagcctatgatcgcagcactttgggaggccaaagtgagaggatcgcttgagtccaggagttcaagaccagcatgggcaacatgacaaaacccctctcaataaataaaataaaaataaaagaatacaaataaataactaaattaggtaaactgttgcacttaatatttatctgagccagtggtgtttatgtcaagatggggtcagattctagactaaatcaaactctcagacaagaaaatggcctcttgccctgtcatgctctctgtcatgttatgctgcggtaagaaggccctcaccagatgcagcccaacarctgtggactttcaaacctccagaactgtaagaaatacgtttattttwaaaataaatttaaaaggctgggcatggtggctcatgcctgtaatcccagcactttgggaggccgaggygggtggatcacctgaggttaggagtttgagaccagcctggccaacatggtgaagccccatctctactaaaaatacaaaaatcagccaggcggggtggcacgaagcctgtaatcccagctactcgggaggctgaggcaggagaatcgcttgaacctgggaggcagaggttgaagtgagccaagattgtgccgttgcactccagcctaggcgacagcaagactttgtttttttgttttttgtttttcaaaaaaagaaagaaagaaatctccagcatggggaacattatgaaaccctgtctacaaaaactgcaggaaaaaaaaaatcactgaacatggtagtgggcacctgtagtcccagctactcgggaggcacaagaggatcatttgagccaggaaggcagaggttgcagtgagctaagattgcaccaytgcactccagcctgggcaacagagtgagacccaccctgtctccaaaaaaagaaaggaaaagaaaggaaaggaaaaggaaaaagaaaaaaaaaggaaagcaaaggaaaggaatctcatgtcaaataatcatagtagaagttaaagtacataacaatggcatctattttcattgccatgttactgcagagagtagtttttggtggtcattgcattttttttttttttgagacatggtctcactctgtcacccaagctggagtgtagtggcgtgatctctgctccctatggtctccacctccctcccacttcagcctccaaagtaactggcattataggcgcacatcagcatgcctagctaatttttgtwttttttgtagagatrgggttttgccatgttgcccaggctggtctggaactcctgagctcaagcaatctgctggtcttggcctcctaaagtgctgaagtgctgggattacaggtgtgagccaccacacccggcctgattattgtctttagtctgctgtagtcatactacgtagaattgagtttccacttcatatatttattatgcattcatgtgaccaaagaagttccagatatgtgctgctatcattatttcatctgggccacagtcttgaattgttacatagcacattgttacatgcctctagaaataataaaagaatgttacaacaaaaataaactttttgttttctttttattgagacagagtctcgctctgtcgtgaaggctgcagtgcagtggcgtgatctcggctcactgccaaactctgccgcccaggttcaagcaattctcatgcctcagcctcccaagtagctgggattacaggtgcctgccaccatgcctgactaatttttttgtatttttaatagagayggagtttcaccatgttggccaggctgttctcgaactcctgayctcaggtgatccacctgccttggcctcccaaagtgctgggattacaggcgtgagccaccgtgcccggccaaaaataaacttttaaagttaaaattaacaaggaagaataaattctcrcatcccattgcacagtagggtggctgtagccaacaataaggtattgtatatctcaaaatagctagaggagaggattttgtatgttcccaccacaaaaaaaaattaatctttgaggtggtgagtgtactagttaccctgattttgtcattacgcaatatatacatgtatcaaaacatcacattgtaccctataaatatgtacaattattacatttgaattaaaaataaaaatttttaaaaaccactgtactacttgctatggactgaattgtgttccttcaaaatttctctgttgaagccctaatctccggtgtgatggtatgtgtttttgattttgttttgagayggaattttgctctgttgcccaggctggagtgcagtggcacgatcttggctcactgcagcctccacctcccaggttcaagcaattctcctacctcagcctcctgagtagctgggattacaggcgcctgccaccatgcctggctaattttcgtgtttttaatagagatggggtttcaccatgctggccaggctggtctcaaactcctgacctcaagtgatctgccctccttggcctcccaaagtgctaggattacaggtctgaacagccacgcccggcctcttttttttcgactttaaagttctggggtacatgtgcaggatgtgcaggtttgttacataggtaaatgtgtgccatgttgctttcctgcacagatcatcccatcacctaggtatgaagcccagcatccattagctattctccctgatgcgctccctcctcccatcccccgacaggccccagtgtgttgtttcccccatgtgtccatgtgttctcatcgtacagctctcgcttataatcgagaatatacggtgtttggttttctgttcctgtgttagtttgctgaggataacagcttccaactccatccatgtccctgcaaaggacacaatctcgttcctttttttttttttwcctctktttttagagaaagagtcttgctttgtctcccaggctggagggcagtggtgcaatcatagctcatggcagcctygacttcctggactcaagctatcctcctacctcagccacctgaagaaaataattarctgtctggacaattttatcctttacctccaaggcctaaacaatacagaagtaaactttggsaagaagagctttggtggagatgcttctgtagttccttttcccattcagaacctaatggtaggatcagggtctctgctgacccgtccctgccactttcaggtgtacgtaaagccacagggacctacaatgcctgggcttgagctttcccagctgggaaactgaggtgaagaggactaacttagagaggtcttttcagtatggtaaaacattagcccaaaggagataatgccttctctgtagaatgggagttgcagtggaggagttgggagagtaaagaagaaaraaggctgggtgtggtggctcacacctataatctcagcagtttgggaggccgaggcaggtggatcacctgaggtcaggagtttgagaccagcctgaccaacatggtgaaaccccatgtctactaaatacaaaaaactagccgggygtggtggcacatgcctgtagtcccagctactcgggaggctgaggtaggagaatcttgaacccgggaggcagaggttgcagtgagctgagatsgcgccactgcactccagcgtgggcgacagagtgaggctccgtctcaaaaaaaaaaaaaaraagaagaagaagaaatgctgggcagaaaagaggaagcaatcccaggagtggcctttcccgaaccagctgaagtcagagcaccctccattacgggatgtatccacggggagacgcatgggaaagcattgcgttcaggtgcgcagatggggccaagcttgtgttgaagctcaccagtcccttagttcatctgcagcgagagtcagctttatgatttgggtttacacaccctagggaagtgtggtctaggtaagaggccattaggaggggcttatagtaggatttgagtttatgttagatgacttggggaagggctsagccgagcgaggcctgctctggactgggtgcagtcagatagtgtgggcaatttggtgattgagtatcttaatgatttttatttagaaagtggcaggaaccaagccccactcaaaacctcattgataaagaagcctcagctgcttatagtagccaggaaagggaggtgtttggtcgcttctgtagtttacacagtacgtgcacttgtttctgtctgtgctgagggcatgggcatgattacacactggtctcttctttgtttcactccattgtgttacgcattgctttgctgtgaaatggtctgtttggcaggtgcacattgtgggggagaaaacatattttttccttttcttttttaggtttttagttgagatactctcctgaaaacaaaagttagattaacaaaaaaaaaaaaaaagcagaaatttattaatgcatgcagtacccatcacacgggagaggcctcagttcaaaagtatttctctctcaaggcagtggcttaggggctttgcttaaatcatagtttaacaaagagccataaatcctacatagtgacaagatgaaagagagagcagttccagtcttttcaaaggcggaaaaatatggtgtgatggttaatactgagtgtcaacttgcttggattgaaggatacaaagtattgatcctgggtgtgtccgtgtaggtgttgccaaaagagattaacatttgagtctgggctggggaaggcagatccacccttaatctagtgggcacaatctaatcagctgccaatgaatataaagcaggcagaaaccatgaagaggtgtgacaggcctggcctcccagcctacatctttcttccgtgctggatgcttcctgcctttgaacatcagactccaagttcttcatttttgggacttggactggctctccttgctcctcagcttgcagacagcctattgtgggagtttgtgactgtgtaacttaatacttaataaacttccctttatctctatctatccatgtatctatgtatctatctacgtatgtatgtatgtatgtatgcatctatctatctatctatctatctatctatctatctatctatctatctatctatctctttcctattagttctgtccctctaagagaatcctgactaatacatgtgggaagagagtaaaatctgttcccagtttccgctggtgcctgctggtgccttctctgggccaaaaagcaagtgctgtctccaataaggaaggatttatgccccgccatcaggcacacagaggctgaggcacagcggtcccctgcggtttagtgtcttcaactaacaatcctcaatattttggggagaaatattttggtttccctcagtgttcggcaggtggacaccatactctggctgttgtgcttggctaattcccagctgacagtttctttttcacacgcttctatccagagataccagacaccgaaaggagcatttccaagaagccgcctcttaggaaagcccatagcatggtgattacaagcccaaccatggcctcagactgacctgcatttgcgtcccagctctgtcactcactggctgtgtgaccttgactaatttaactgagagcctctgtttcctgtcttataagacagggctaaaaataatactttcctcttatggaaattgggaaaattaaatgtgayaacaaacataaaacacataaaatagtacctagcacatgataagcatttaacttaggctctctacccatatcattgtttgtcagaggtcacattctcttggcaagtcccactgcactctggcaacccatcygggggctgaggaatcaaacaatatgyggtttctatggaattcctggcgctagaaggagctcagaagacgagctgatgggttgtcttccatttctggtttgtcaaataaaaaaaattctggatgtggtaaaagagagaccttcattcgaaggaattattgccagggcrttgcgggggtactcctgcaatggagggaggggaatgctgggactggaaggtctgtaaacatctcaaaggttgcaaagggtttctctatggtaggaggaaacaaggctaggatgaaccagatrtgggaagcagatgaaagagtaacaaatcgagcaaattggaatgtttggccctgaagccaccctgttctctgaaggggctcaggccaagggtaaacaaagttctgaggctctgaggaaggagagaagcctaaccaaagtttgggtaacatgtattttgctctagttcttcagtgaggacaagcagttcagctaatcatctgtgaggcaaagaaaggaaattttgagggtctgtgtctggtcttaacataggtaaagaagaagagcatctgtgagtcttactgaagtgacatstggaagggttggggggtggtctttgcagtaagcccttttgcagaacatgaagggtgggggattttctttctttctttctttctttctttctttctttctttctttctttttctttttttttttttttttttgagactgagtcttgctctgttgccaggctagagtgcagtggcctgatctcggctcactgcaacctccgccttctgggttccaacgattcttctgtctcagtatcctgagtagctgggactacaggtgcctgccaccacamcggctaattttttttgtatttttagtagagacagggtttcaccatgttggtcatggctggtctcgaactcctgacctcaggtgatcctctcacctcggcctcccaaagtgctgggattacaggcgtgagccaccatgcccagcccgggtaggggatttttcttttttttttttttgagatggagtctcgctctgtcacccaggctggagtgcagtggcgcgatctcggctcgctgcaagctccgcctcccgggttcacgccattctcctgcctcagcctcccgagtagctgggactacaggttcccgccaccacgcccggctaatttttttttgtattgttagtagagacgggttttcactgtgttagccaggatggtcttgatctcccgaccttgtgatctgggtgggggatttcttaaccttcactgttcaccaggcccacaaggctcaggtaaaattcaactttgtcaggttacaaatcatgcatttcctatttctcaaattgtatttcagataaaagagtgaaatgtaggctttaacacgacttgaggcacttctgggtccttacatagagggtcaggactatttggaagaggaaactggggaaaggggcatgtttatttgtgactcccttgccaagctgcaccgtttagaacataggtgcttgggactgtagcttgtgtgactctctgacctgcaagtgatcaatgagaaataaaatgtaaaatgggccaggcgcggtggctcatacctgtaatcctagcactttgggaggccgaggcggctggatcacctgaggtcaggagttcaagaccagcctggccaacgtggtaaaaccccgtctctactaaaaatacaaaattagccgggcatggtggtgcgtgtctataatcccagctactagggaggctgaggcaggagaatcacttgaacctggcggcggggcagtgtggaggttgcagtgagctgagattgcaccattgcactccagcctgggccacaagagcaaaactctgtctcaaaacaaaaactaaaaaacgtaaaatgaggcaacatcagcacaaatgctgaaaccagacttcgtttcaacccatattggttgaccagctactgagggcctgcagctctctttcctggtgctttggccaattccctgtctttggctcagcactgaaatgctgctcactgacagacttccgcttcaggattctctctgccttcatggatgtctaaatgttttcctgtgttgctttgtctgcctctcttgggagaattcaaacatcttgcttgcttgcgttgcagggctttccatgccagtttgcacctataacatctccccctcattcttttctctctttttatagccttttgttctgcagtgacttcacttgagggccactaattcattctgcaacagagctgggaaatcttggcattcttaccacttgcagtatttctggaagccagcctggatctggagtagatcctgagagaccaccgcagagtcctcaagcctgcccccaccctgggatgaccatgaccatctttttttttttttttttttttttttttgaracagtctccctcttgtcacccaggctggagtgcagtggcatgatctgggctcactgcaacctccacctcccaggttcatgcaattctcttgcctcagcctcctgagtagctgggattacacgtgcccgccaccatgcccggctaatttttgtagttttagtaragatggggtttcaccatgttggtcaggctggtctgaaactcctgacctcaagtgatccrcccgcctcggcctcccaaagtgctgggattacaggcatgagccactgcgccaagctgaacatctttattaaatgctcctgccaggttctgggcagacaagctttgatttactttccctttcaagagccaagggaataaagctaccaagtacgagttgatgatttgaactaattctgaagatttgtgaaaatgctcaaaatccaagtggggagtgaagagcagccgcctgacaactaaaactgggaaatgggtgttatttgtctcacagtccccgcttgcccctgcctgcgctgctccatctcttcccctcctccctgccacttcaggagcccatgccctctccccttattgaaaccaaaacaaacactgctgttctaaaagaaaggatgtgaataatagaatccttcgataactaggagggcctttagtgagttatctaatccaactccctcattttgtaaaatacttgtcactccacatttggaaatctaaatctggccctttttccttacatcttggaaggttctaattatgtattttcctagaagtggaagaaaagaagtcacttctcatctgttggtctccttccttttcctggagcctgcrtctccaagcagagaagggtattttgtggcacctcaaaagagaagcaataaaacattacacatatccatgcacccagtaccctgaagggttccaaagccatgtgatatggtgtggccacgtgatatggtgtgtcccacccagatctcacctcgagttgtaataagccccacgtgtcaagggtggagccaggtgaagatacttgaaccatgggggtggtttcccccatactgttcttgtggtggtgagtaagtctcacaagatctgatggttttataaaggggagttcccctgggcatactctcttgcctgctgccgtgtaagacttgactttgctcttcattcaccttctgccatgattgtgaggcctccctagtcatgtagaactgtgagtcaattaaacttcttttataaattacccggtctcgggtatgtctttattagcagygtgagaacagactaatacaccatgtgaaccatgaggataaagattcttagaggggacacactggttaaataggggagtgggtgtggatagagtattagtcaaagaaggttgtgatctaccttttttttttttgagacggagggttgctctgtcgtctgggctggagtgcaatggcatgatctgggctcactgcaacctctgcctcccggtttcaagcaattctcttgcctcagcctccagagtagctgggattacaagtccatgccacattgccyggctaatttttgtatttttagtagagacagggtttcaccayattggtcaggctggtcttgaactcctgacctcaggtgatccacctgcctcggcctcccaaagtgctgggattacaggcgtgagccactgcacccggccgatctactactcttaacacatttatgtctgctgagaaygcataaatagtagtcaaacagagataggtggggtgtgctgatttgcaaccacatcttagagtactcctattttgctctggggagacttctgttccccactttcagtccctgtactccagataaagccaactcagctctagaggtggaacatgtgtccaagcctaagccaatcagaacatgcttatacccctggccactgggactggttcagaaatgggcacctcagaaatggggccatctaagatggtccactcgttggatcctaggtcttgctgcagctccctagaacgatttctctctcgctccctctcattgaacttgagcctcagaggctgagtcgagagctgctacttcgaccaactgctcggagcctgagaaagaaaccagcacacagagaagagcagtcagccaagaaacagaaaaatccatttccccttcacattgttgagccctgagttaggcctctcctgaaactggtcctccattccacgagccaataaattcccatttgccttaatccaatttgagctagttttctatactgcatactcagagtcctacctgagagaatcagtatgcttaacccataataggtgttcaaaaggtttttgtttttgttgttgttgtctgcttttttgtagagatggggtctgactctgttgcccaggcttatttccaacttctggcctcaagccatcctcctgcctcccaaagtgctgggattataggcttgagccaccatgcccggcctcaaaaagtttttttgaatgaattcgtgaatcaagcttttatcttaatgtaccattaagttatacacagatatttcagcttccttcctggttcctttcgccaagtgagttaaaaaaaacttcatgtgtttaaatttaaggtagagaggccaggctcggtggctcatgcctgtaatcccagcactttgggaggctgaggcaggtggatcacctgaggtcaggagttcaaaaccagcctggccaacatggtgaaaccctatctctattaaaactacaaaaattagcagggcgtggtggtgggcgcctgtaatcccagctgtttgggaggctgaggcaggaaaatcacttgaacctgggaggcggaagttacagtgagccgagatcttgccattgcactccagcctgggcaacaggagcgaaactctgtctcaaagaaaaaaaaattaaggtagataaatggtaggtattactgtgattgtgattattattttataatctttgtggcagtttttgtttgtttatttgacatggggtcttattctgttgctcaggctggagtgcagtggcgcaatcatagctcactcgaactcttgggcccaagcgatccccctgcctctgcctcccaaaaagctggattacaggcatgaataaccattcccaccagtagstattattttatttatttattttgagatggagtctcgctctgttacccaggctggagtgcagtggtgcgaccttggctcactgcaacctccgcctcccaggttcaagcgattctcctgccacagcctcctgaacagctgggattacaggggtctgtcaccacacctggctcatttttttgtatttatagtagaggcggggtttcaccatgttggacaggctggtctcgaactcctgacctcaattgatctgcctgccttggcctcccaaagtgctgggattacaggcatgagccgctgtacccagctgagtagcatttacttttgtttgaagatgagcagagcagaagatgagagagaattagggagaacaagaaggaagaaaactagagctggtgaagataagaaaattagtggaggacttccagagtaaggggttacctactcagaaaagaggcaaaatttaaatgccctctaaaaagctggacactatggcaccttaaatgaagaaactcagactcagggcagagaacagtcttctaaggcttgcaccctgaaaagcacagactctttaagggcactgcaaattgtataaacaggatcaatctattagaaactcttgccagtgtgtgggaaaagaaaatttatcttttgacctgtgtytcaagtacctttatattaggtaactactgacagacttgacggcttaatacaagttgagtatccttaatgcaaaatgtttgggaccagaactgtttcagattttggaatatttgcatatacataaggagatctgttgggaatggagcccaggtctaaatatgaaattcatttatgtttcatatataccttatgcacatagaccgaaggtggttttatataatattttatttttaatcatttatttatttattttgagacaggttcttgctctgtcactccagttggagtataagggtgtratctcagctcactgcaacctcaacttcccaggtttgagtgatcctcccacctcggcctcccaagtagccgggactaaagacccatgccatcctgcccagctaatttttgtatttttttctttaattgagacagggtgccactctgttgcccaggctggagtgcagtggtgccatctcagctcactgaaaactccacctcccagattcaagccattctcgtgcctcagcttctcgagtagctgggattaaggtgcatagcactatgcccagctcatttttgttttttcagtagagatggggtttcaccatgttggccaggctggtctcgaactcctggcctcagatgattcacccactgcagcctcccaaagtgctggggttacaggtgtgaaccactgtgcccagccaaatttttgtattattattattattgttttggtagagacagggttttgctgtattgcccaggctggtctcgaactcctgggctcaagctatctgcccacttcagccccccagagtgctgagattacaggtgtaagccactgcgcccagcccatacaatatcttaaataattttgtatatgaaacaaagtttttattttattatgctttgtggatgcgcttgcacgaaggaatctgaacagatgcagaaaagatatcacagctgaagaggactgggagggtcttttttcctctgagaatgctaagtaaactgtgtgctgtcagcctttgttttgacttcaactcatcacatgaggtcatgtgtggaatttttctcttgtggcatcatgttaatactcaaaaaagttttggattctggaacatttacgattttgaattttcagattaaggatgttcaacctatataaccatttattttgcatgcagttttgtgagtatgaaatttgggaagggctctgctagacagtttgtctgcctggctttctgtcgggtaatgagatctggaacatgcacttcccaggtggtgtctttcctcacagtctctcaaatgctctggagcttttcttgttctatacctagcactggagcccctagggccccttcatgtggcttggacttctcatagcatgggggctctcagaatagttgcacttcgccgaagtgggaagtagatgttaccaggccaaacaagggctgcacctgaaaaagcgcaatgtcactattaccatattctattggtcaaagcagtcacagggcccaggttcaaaggagagtgacaagatcacattgcagaagagcactaggatcaggaggatattgtggctgcttttggaacatacaatctrccacaagctataatttatttatttttttgagacagggtctcgctctgttgcccaggctggagtgcagtggtgcgatctcagctcactgcaacctctgcctcccaggttcaagcaattctcctgccttagcttcccaagtagttgggactacaggcatgcgccaccacccccagctaatttttgtatttttagtagagacaaggttttgctatgttggccaggctggtctcgaactcctgacctcaggtgatccaccygcctcggcctcccaaagtgctgaaattacaggtgtgagccaccgtgcctggccacaacctataatcatatccttataaatgtattacgtagaaataatccaaggaatatataagaacagaaaagttcgtctcaactttagtagggaaaaaatttggaaaaaacctacatgtctcctgatagataaatagctaagtaaattatcacataccaactaacaggaatatgaagctgtagtaattaagatgattatgaaacaatttgaatgaaagttggtataaatggagaaaaagtaaaattaagaagcacatacactgtgatgataattatgtaaaagcctgtatgcatctggacaaagtctggaaggaaatcagtggaaatggagataattgcattgaggtggtaagattatgtaagccttagattttcttctttattgttatagcatcacaaaaaataaaaatgagaagaaaagaagagaattacaattttaatggtcagtrctcaatacttggtaggtacatgtactaagtgcagggaaggcaaaggggacactcattacactctaattcactcagattcagagaaacttccaggccagaggagccacagatatttataattaataacctgttttgaccccttatctttggaatgctgattaacatgaagcaataattactattaatatattagtctttcaatattgctgagactattcataagactgaaaaccctttaaaaagctcccacgacggccgggcgcggtggctcacgcctgtaatcccagcactttgggaggccgaggcgggcggatcacgaggtcaggagatcgagaccacggtgaaaccccgtctctactaaaaatacaaaaaattagccgggcgcagtggcgggcgcctgtagtcccagctactcgggaggctgaggcaggagaacggcgtgaacccggaaggcggagcttgcagtgagcggagatcgcgccacagcactcccgcctgggcgacagaacgagactccgtcycaaaaaaaaaaaaaaaaaaaaaaagctcccacgacacataaacataaggtgatattttaatctttatcataatgaatttatccaatccagggtttctaaaattgtcagtggtaatttggcctgggaatttatcctagaatactctgacgagaactagattaattctggtctcccacttcacagtgttctgtttgccttgggactcattgtaggtaaaaaggatgtggagtctggaatagtctatgcttatgaaacygcaagcaaaattcctagagtggccctgaattcaacccatcttcctgggactatgacactcatggctatgggtgaaaccaacctttgaacagtcattkcattccagtactcccataacttgctagtcattgcatttttttcaaggcctcttttgaagagttattaaggaaggtaaaagtgcataaaggtcaaagtcttaagaaagtctgattaaataatygcaaaaacaattttttttttttgaggcaaagtcttgctytgttgcccaggctggagtgaagtggcatgatctcggctcactacaacctccgcctcccaggttcaagcgattctcctgcctcagactcctgagtagctgggattacaggcatctgccaccatgcctggctacagaaaygtttttttaaaaaaagaacatatcatgagttggcatagccactaattatgttaacatagttaataactggggaaaacctgaatgagggaagtgtttagattacatcttggtaaattattttgatttggttcaattgccttttgggaagttaaaaaaagggaaggggctatctactggttgccaaaaaaattactgatattcttagacttgtcaaaagacaaagttacaacaagtttagtttaaatatctcagttgggctgggtgcggtggctcatgcctgtaatcccagcactttgggaggctgaggcgggtaaatcacttgaggttaggagttcaataccagcctggccaacatggtgaaatcctgtctctactaaaaatacaaaaattagccgggcatrgtggtgtgcacctgtagttctagctacttggcaggctgaggtggaagaatcccttgaacccaggagttggaggttgcagtgagctgagatctcaccactacactatagcctgggcaacagagtgtgamtctgccaaaaaaaaaaaaaaaaaaaaatctcaattggctttatttgcaattctagaaacaggtaacactttgttccacaaaacagaatcatgagctgagcagaaggcattggcttcacagagcaagaaggaatgaagaaagaagcaggctgggtgcagtggctcacacctgtaatcccagcactttaggaggcccagaagggtggatcacttgaggtcaygagttcaagaycagcctgggcaacatgctgaaactccatctctactaaaaaatacaaaaattagccgggtgtggtgrcccatgcctgtaatcccagctacccgggaagctgaggtgggaggatcatggtggaccagcccatgaggtggaggttgcagtgaactsagatggcaccactgtactcctgcctggaygacagagcgagmctctgtctcaggaaaaaaaaaaaaaaaagaagaagcaaagattatgtccattgtttcaaagtgacttttcttgtaagatgagacaaggagatagaacaacagaaaaataactgattagttaacatcaggyttcttggggctactttttctgtgtgtgaaaggattaaagcagagggaaactcattatcgtgactcttgaagattaagtgacctgtttgggaatttggctatctctctctcctgctttctcttgagacaggaataatacagggtggttgcaagagaacagaaaattccaggcagcagtttcacatgcctagcaaaatgaaactgttgaaatagctccataaactggggactgataagaccatgaaaaacaggatgtgggccaagctggctaaaaccaactggacccaacagagagcaggatttgacctaggtttctcctaggacctcattattcacycattaataaacaaatcgcacacccacctacactgtgacaagaacactgtatttggtgttaaaatgggcagcatcacagttctgagaaatcttcacctttttccaggaatcttcatgaatagtccaccccttgggtaaagaaacycatataagaaaccccaagcccctttgtgcagctctctcatgagtatgcccatgctcccctttcttgagtgtgtatttttactttgcaataaatctccgtactttcacgattttctgactcatccttgaattccttctcatcatggtatcaagaacctgcacactggcctgggtcagggtttcatcagtgtttgggaacttcccccagcccactggtctcactctgaagatcagataacaacttattgaagtttggtgacagaactttagcatgggtgactccattttgatttttggttttgtctgttggagcmtagtacagaaacytaatccaaaaaaacaayctcctatactttttattcaacagaatcaacatttcaggtttcttttttaacctgaaattggtgtttcatttaataaatgcttacctagtagttactcggtggcattatcctgtactttacagacattaactaatttagttatcaataacccattgagtagaaaaaacagtttttcctctgctctcacaccagtctcacagaagacttctgtgaccaaatgtgtgggagtttctctccaccagcaagaaataaaaaaaattagggggaagggcaagggggtgcacctatggtcccagctagggatgctgaggtgggattacctcttgagcctgagaggttgataggctgcagtaagccttgatcatgccactgcactccagcctgggtgacagagcaagaccctgtctaagaaaaattctgcaatggacactagctgggtggtggtggtggcagcagggggtggggggggcaggtcctctaattcaatccgattctcatactatctacttgggtagtgtcagatgccataggytgaggactcagtcccacttccartgcaattgcaagccccaggttgttttgtctgtgcttctgacctaccaactataaatcasggttccatgacccccttcttgggggatttatttgctagagctgctcacagagctcagggaaatacatatctacatttatcagttyattataaagaatattattggcaggtgcctgtgatcccagttactcaggaggctgagacaggagaaacgcttgaacagggaggcagaggttgcagtgagccaagattgtgccattgcactccagcctggatgacagagtgaggctctgtataaaataaaataaagtaaagtaaaaaggcygggcacggtggctcacgtctgtaaacccagaactttgagaggccaaggtgggcggatcatgaggtcaagagatcragaccatcctggccaacatggtgaaaccccatctctacaaaaaatacaaaaattagctgggcatggtggcacgtgcctgtagtcccagttactcaggaggctgaggcaggagaaccgtttgaaccagggagctggaggttgcagtgagccaagatcgygccactgcgctccagcttggtgatagagcaagactccgtctcaaaaatatatatatattgtaaaggatacttgaaaggatgcatagggcaaggtatgggaaggggcatagagcttccatgccctatgtggggtgagaggcaccctccaggaacctccatgtgttcagctatccagaagctcccccagccagacctttggggtttttatggaggcttcattatgtaggcatgattgattaaatcactggccgtcaggattaacttaaccttcagccccttccccttcccagaagttggatagggctgaaaatcataactctctgattttgtcttggtctttcacgtgcccaacctccatcctgaagccacctaggggctgccagccatcagtcaactcattaggttacaaaaagacacttatcacttgggagattccaaagattttatgccaggagatggtaggaagaccaaataaatatttcacaatatcacatccctaatgtaggtcctattatcaccattctcattttgcaggtgaggagactgaagcatgagattaagaaatcaagaccgccttccccctgtagggscggccggcgagtcccagtgagagcggagggtgccagaggtagggggccgagaaacaaagttccyggggctccctccggggccgcggtcggggctgcgcgtttgaccgcccccctcctcgcgaaggcaatggcttccaaactcctgcgcgcggtcatcctcgggccgcccggctcgggcaagggcaccgtgtgccagaggatcgcccagaactttggtctccagcatctctccagcggccacttcttgcgggagaacatcaaggccagcaccgaagttggtgagrtggcaaagcagtatatagagaaaagtcttttggttccagaccatgtgatcacacgcctaatgatgtcygagttggagaataggcgtggmcagcactggctccttgatggttttcctaggacattaggacaagccgargccctggacaaaatctgtgaagtggatctagtgatcagtttgaatattccatttgaaacacttaaagatcgtctcagccgccgttggattcaccctcctagcggaagggtatataacctggacttcaatccacctcatgtacatggtattgatgaygtcactggtgaaccrttagtccagcaggaggatgataaacccgaagcagttgctgccaggctaagacagtacaaagacgcggcaaagccagtcattgaattatacaagagccraggagtgctccaccaattttccggaacrgagacgaacaaaatctggccctacgtttacacacttttctcaaacaagatcacacctattcagtccaaagaagcatattgaccctgcccaawggaagaaccaggaagatgtggtcattcattcaatagtgtgtgtagtattggtgctgtgtccaaattagaagctagctgaggtagcttgcagcatcttttctagttgaaatggtgaactgataggaaaacaaatgagtagaaagagttcatgaagaggccctcctctgcctttcaaaagggtggtcacctacacatgtttaaggtgtctctgcacatgtctcaagcccatcacaagaaagcaagtacagtgtggatttcaaatggtgtgtaacttcagctccagctggtttttgacagctgttgctgtggtaatattttttacatgtgatggtgatagtctctggttctccccatccccacaaaggctgttgaaccacagcaccaggaagcctgagaatgaatcctgagggctctagcccaggctttgtcccaggctttctggtgtgtgccctcctggtaacagtgaaattgaagctacttactcatagtggttgtttctctggtcttgagtgactgtgtccacagttcatttttttccggtaggaataactccttttctacatccacactccatagagtctctccttttcagayatcctgggatgaaagaatttggcttttttttttttttttttttgacatctgttttcactcttaggcttttaaacaatagttattgctcttatccctctcagattctaataactgagagtgatggggctatattgaatctctgtatgcactgagaactgagctatgaagaggatcttattaaactgctggtctgactttatggattgacactgttcmtttcttttattgtgaaaaaaaaaaaaaaccctgaaagtcttgggaaccccctaaagtcttttgggaatcctcaaaaagcatgggaagttaagtatttagctacataaatgttgtaagatcatatcttatgtatagaagtaataagaccatttggaattactggactaattgaatagttaaggtttctattcgggacaataaaatgtattttgaaagtgctgctaactattgatgctgacagtgtttcactcctatgagtgacccaaacatattataaatatgtggtaaagggaatggagcctgtggggttgagcagaatgttgtactagctgtgcctggactgagtataacagctttatgattatgagaaaacaaattctttatttttttttctgttccaaagattcatcctatggggtggccataaagtctagaattagatactaatattttgtcattcattataacatatcaataaaccatttgttaaaagatttgcctggtttccagacttggtggccaccttgaataattcttgctgtcttctgggaaggatgatgaaatttattcctgctgccttaaaaatatgtatcccttcttcacccatcatgactgtccccagtgagtgtcctttactattcttgggagtgactcctgtctaacttttcatactggcgagaagaaaagargcctattttaacactttagtggtgttgaaacacattacttactttctgaagatgtcccagtgaatcctctgtcaattcactgccatatgtaatctatatgataaggaatgcatcttccaagtactgcccaaacycttgccagctcctctcccattgtcccttcatgtgaatatttcttggctaccttagtggaaatatagatcagtcttctccccatccatcctctcaaacataatgagattgtttactttttagatttatgcagtgaaaatgcccagtcaggtctgaatcgtcartgcattatattgacyctgagcactttagaatttagagttgcaattgaatgccagctgtggagatggggtgcatatcagatatataaataaagctcaggtttgctagggaaccaggtatagagaaaaataagtctgatatgaggaaaattgcacaatttagagtagttatgccrtagagaaaatttccacaaactaggaaatgtagagagttattctatagaatactcaaaagaggaaagtatgtgatttttggaaacaggaaaatcttcaaacttctttcttcacttccctttgtgtttagctgaccctccaatgtgatcattgcctttggagtttgggagaggtaygggaagtggcctgatgcctgcttccatacttcactcctccatccatccttccctccctyttcccctccagctaaatggacaattctagccaacattgagtcactcaataagtctcaacagtgggtgtgtttgctgagattgtccagcagttgagcagtttggtctcacctccctcgctagttgagaccaaaaagagacaaataactttttcatggtctttgaaacataatgcttatttcgtggtcaatggctttaaaaaaatctgtttcttgttttcttcaacaaactcactagttttcccttaaatgatattgtaaaaattaaagtaatcttgaaaatgttttgacaaaagtaaaattaaagggacaaaaaaaaaaaagaaatcaagaccactagtgagtaagcagcccaggtaggactcaaacccagacaggcagcctccagagtcctgtacttaactgctatactatgctgtctggttaagagaatagatctttctttctttctttctctttctttcttttcttttctttctttctttctctttctttcttctttccctctttctctccttccttccgtctttccttcttttcttttcttttctttctctctttctttcctttctttctttttctttctttccctctttcttttctttcctttctctctctctctcttttctttctttcttttgacagtgtctaacgctgtcaccctagctggagtgcatggtgttcatagttcactgtagctttgaattcctgggctccagcaatcttactgcctcagcctccaaagtagctgggagtacaggcatacgctaccacacccgactaatttgaaaaaatttttttgtagagaagtagtctcttttttttcttttttgtagagatggggtcttttttttttcttttcttttctttatttttttgagacggagtgtcgctctgtcacccaggctggagtgcagtggtgcaatctcggctcactgcaagctctgcctcctgggttcacaccattctcctgcctcagcctcctgagtatctgggactataggtgcctaccaccatgcccggctaattttttgtatttttagtagagatggggtttcaccgtgttagccaggatggcctcgatctcctcatctcgtgatctgcccacctcagcctcccaaagtgctgggatcacaggcgtgagccaccacgcccggccagagatggggtcttgccatgttgcccaggttggtcttaaacttctggactcaagcaatctggccaccttggcctcccaaagtgctgggattacaggtgtgagccaccttacccagcttggaaatttcattataacacatatatctacaaagagtttgtataacaaaatatttccatatctaggtgtatgctttttgatcaagttgctgcaaagactcctatactcaaaatagttcataagccctctctactctagtttgtacaactctgcattaggaaagatgctatagtttgcaatacagctgagccatttagagtatttcttttttctcagctgccagatagtcatacaataggtaaaatatactgaaccttggcatggtgtgcttgccagtttcattgattacctccacctcccttgaccccatgaaacactcctggtatgcaggccccagtatagttccttgaatctaggctggccttgtgactctattaaccaataaaatatggcagaagtgatgctgtgctaagtccaggcttaagtattggaaagactggtatcttccacattttgctcttgggaaccctgacctgcacttaagaagtccaactaccttgctgtacagaccacatgcagatgccatgtgaagagggatgtggagcggggagcccaggcctgctcttcccaggggcagagaagtcagggtttgaggaatgggggaagagaatctggtaggttcgggttgggagtacagggtagtagctggttaccaaccttttcagaagaattttaatattttaacattgagtgcaacaatagcagtacaaaccagttgaaaagtagccatggctttagcaagtaggctatcaagatattactccttttctgaattcagagaggttattttcaaaagcagagaagttggatttcagttttgctgtttcttgtcctgtaatcaacttgctatattcctagaccttggataaaattaaccaacctatctgttaaacatgggaatgtggtttatatgttcagtttagggtaattttaatacaacaaacaattcaagtattacatggaaataatctcaaaaatttagattcctatatagttcaatttgaaaacattttatattactactaaatattatctaagctatgtgactataagtaagacctatttttttatttttattaaaaaaattttttttgtagggatagggtcacccaagctggtcttgaactcctgggctcaagtgaacctcccacctaggcctcctaaagtgctgggattacatgcatgacccaccgtgcctgaccagtaagacttttaatattaccgactgtatgttatgtgatattaaggggttcattttttgtagatgtgacactggaattctgattgtgccttgaaaagacaaaaagagttttatctcctagatatacgtattacagtattttctcatggaatgacctgatgtgatatctgacagttgatttttttttttttttttttgagacagagtcttgctctgttccccaggctggagttcagtggcaccatcctggctcactgcaacctctacctcccaggttcaagtgattctcctgcctcagccttccgagtagctgggattacagttgcctgccaccatgcccagctaatttttgtatttttagtagaaacagggtttcaccatattggccaggctggtcttgaactcctgacctcaagtgatctgcccaccttgggctcccaaagcgctgggagtacaagcatgagccatcatgcctggcctgacagttgattttttaatttatttttctaatttaatttttaaaattttaatttattatttatttatttatttttgagacggagtcttgctctgtcgcccaggctggagggcagtggcacaatctcagctcactgcaagctccgcctcctgggttcacaccattctcctgcctcagcctcctgagtagctgggaccacaggttccagccaccacgcccggctaattttttgcatttttagtagagatggggtttcactgtgttagccaggatggtctcgatctcctgacctcatgatctgcccgccttggcctcccaaagtgctgggattacaggcatgagccactgtgcccagcctatttttaatttttttattattttttatttttttgaaacggagtctcgttctatagtccaggttggaatgtagtggcacaatcttggcccactgcaacctctgcctcttgggttcaagcaattctcctgcctcagcctcctgagaagctgggattagaggtgcacaccaccatgcctggtgaatttttgtattttagtagagacagggtttcaccatgttggccaggctggtctccaactcttgaccttaagtgatccccctgccttgacctcccaaagtcctgggattacaggcatgagccaccatgccctgaccaacagttgattttaaataatctagtgtgcagggggtgagagcagaggggttgtaaatgaaatagattggccatatgttgataaatgttgccatatgttgataaatgttgaatctgggtaatagatacatgggtgctcattattctattctttctattttgtgtgtgtttggaaatttctataacaaaaagtttaagaaaaaagctcaatagttattcgagatttgttcaaaacagacatgagattgcaattgttttctacctttcacttgctttagggttgcttttcttgaaaggattttgtgaaattgtatgttttaatacgaatataaaaagtagtgtgtatttaaccataacctcttttatagtagcttctgggtgcctcctatacacttccaatcttagcaacaagaataaataattccctctaatttggcctcaacactcaactgctgtcacattaattgctacgtttgtgtagctaatgcctgcctgtagccagtgataacattttaaaatacattacaagatggacaatattttagtgcctaaattcagatattaaccttataagctttccattttttggtaactttttaaaagttaaacattttaaattctgttattgtcttatttctttattataatctggccgtatgttatcttagaggcatctccagaactcactttttacccaacaatgttgacaaggtggctccaccatattttaaaatttctagctataccttatatagtatatatccctaagtaagatattcttcactcactcttttcactggtatttataatggattcagtttatagataactataatagatttgtagaaagggaatttataaaaaggcttaagtgggtattgtaagcttgaattttatgttctttttttaattttatgttcttaataacttaaaatttcaaaactgatgtctgagggttacctattattttctctattcatttctatttttcatttttatgtattttcatttttttttttttgagacaaagtctaactgtgacacccaggctggagtgcagtggaacaatcatggctcactgcagctttgatcttccaggctcaagcaaccctcctgttagaagtaaaatgttgtgtttttttttatttttttattttattattattatactttaagttttagggtacatgtgcacaatgtgcaggttagttacatatgtatacatgtgccatgctggtgtgctgcacccattaactcgtcatttagcattaggtatatctcctaatgctatccctccccccgccaaaaatgtttatttagaaatagaatgcttgttccttggtaccacaaggaaaaatcagcatttagacaaaaagttttctcagcaaggcaattttaccttctgcagaaagggtgctcctcacagatggaacaatggtgagaccacaccygaacaaaggagggaagcaattttattccttacacagcttgtccctgctaatgtgtcctgtctccattggctggagctggacctcacaatctaaattaaacctgactggctaataacttaaaactttcctaaataggtaaaagcaaaggagaacaaagaaaaagaggaagttgcttatgaaaggaaacaaatatcttggttaaagtacaaagacatagaatgtactcattcccttatatctagmagctacataggatagggcttaaccaagagttattagcataaagcaaggaggcttgagggaagttactctttaaaagaaactattacttctaacacttatgatttattctttaacaagaagggaaattttgaagagaaaactttttactttctacacatcccatctcagcctcccaagcagctgggactacaggcacatggcaccaaatctggctggattttgtattttttgttgagacaggttctcactatgttgcccaggctggtctcaaactcctagcctcaagtgatcctctcacatcagcctcccaaagtgctgggattataggcatgagcccctgcacccaatctctactaatttttaaaggctaaaatatgytattatttttgtgattttttagtagtcatttaaaaatttttcttattgaattaattaaataatttttagaaatggagtttgctatgttgccaggctgctctgaaactcctggccccaagtgatgctctggcctcagmctcctgagttgctgggattacatgcatgagccaccatgcccaactcagaagtctatttcatatcacacgtatgataataatttaatcacaaaggaccgtacatttaataatgtttataagagctaaggagatcaagcaaagatgtgtgaaatgagtcaaaccttcaatcctctcagtctggtatttactagtgtaagaaaaaaattaaaatgtataacttgaattacagttgactcttgaacataggygttaggggcaccgacacttcctcaagtagaaaatttgcatttaacttttgactcccccagaatttaactactaataacctactgtacagcacaagccttatggataatataaacagttgattaacacatattttgtatgttatatgtgttatgtattgtattcttaaastaagctaagtaaaagaaaatgtgaagaaaatcataaggaagwgaaagtatgtttactgtttattaagtggaagtagctcttcataaaagtctccatcctcatcatcttcatattgagtaggctgaggaggaggaggaagaacaggctgtctcaggggcagcaaaggcagaagaaaattggcatataagcagacccacacagttcaaaccagtgttgttcaggatcggctgtataatctaccttagagaaaaaatttcactttttttttctttctttttttttttttgagacgaagtttccctcctgtttcccaggctggagtgcaatggcgtgatctcagctcactgcaacctctgcctcctgggttcaagcaattctcccacctcagcctcccaagtagctgggattataggtgcccaccaccacgcctggctaatttttgtatttttagtagagacagggtttcaccaccttggccaggctggtcttgaactcctgacctcaggtgatctgcctgccttggcctcccaaagtgctgggattacaggcatgagccaccgtaccgcacccggcctttttttttctttttgagatgggattttgctgtgttgtcaggctggatttgaactcctgggctcaagggatcttcccacctcagccttctgagtagctgggactacaggtgcctgcaaaatttcacttttgaaaaatatggggcaagttcaatggctcatgtctgccgtctgttattccaggactttggtaggcagaggcyggaagattgtctgagcccaggagctggagaccagcctggacaatatggtgaggtcctgtctctacttaataatacattttttaaaattgaaaatagaaaaagaaaaatatggccaggtgaggtggcttacgcctgtaatcccaacactttgggaggctgaatttggcagatcacctgaggtctagagtttgagaccagtctggccaacatggtgaaaccttgtctctactaaaaatacaaaaaaaattagctggacatggtggcacacgcctgtagtcccactgcactccagcctgagcaacagagggagactctatttcaaaaaaaaaaaaaaaaaaagtaaaagaaaagtatgatttccccaatttaaattgagattagaggtaatgcatatgttagctagatttagtcattataccatgtatatatacttcaaaatattgttatacacagtaaatacatataattttatctgtcaattyaaaaaaaaattaaaactgagattaccctttttgtgttgggccatttatttactagtcaacctgtttgaggagcttgatgtttttttcagcttatatagacaacaatttcgctgaatgatagagagtttgcttatatattaaggacagagaagctaaacacagggacataaagttattttatccatcgtaaactctaaaggggagtataaatctaaagtggttgattcatgctcctggctttttgctactagataatgctctctcctactcttaggtaataacatgcatagccaaaattaagcctcttatgttgccttggattctgttactttaaataggcactcaccagattataattttggctcgtttggagattgctgcagtctgatactaatttttttcctccccccaacccacaaaattacaatgggcaagctagaagtcaggaacaattattccaacagtacaattaaatgggcttttctcctggcatttttcttgccatctttaattactgtttgagtctgaagttaaaggaaatagtcacaggagaagaattcttaagagagagagaggagaatgagtccatacttttcctcaaacagaatagatactttccaaaacattttccaaaaactattatgtaagctaacattgctccttagaaatgatgcctgtggaggggatatagacttggaggatgatgtttgcttagaagggagccatggcaaataaacatcctgaagtttctaagatttcaagcctaattcaataatgggattatggctaaattgctaaacttaaaataattgccttatgaacagtcacattgattatgactaaaaaggacagaggatttgtgttctatttttagagtagatatacggcctttgttggggaggctgagggatgcatttaatcaatcaatcttctgaaagtataaactgtgtgatgtgtggatgtgaggtgagagaaaacagctccctacctccggaagctcttagctgcacaagtagggaagaaaacattaatgttattgtctgaatgtttgtgtcttccccaaattcacatgttgaaatcctaacccccaatgtgaggcgttgggaggtagagcctttgggagatgattaggtcatgaaggcgggtaccttatcagtgggattagtgcctttataaaagagaccccaggagaactagttcttttctttttaccacctgaggacacagtgagaaggtgccatctatcatccaggaaactagccttcaccagacaatgaatttgctggtaccttggactacccagcctccagactgcagtaaataaatttctgttgtttataagccactcagtttatggcattttgtcacagcaggccaaacagactaaaacaattaatacacttagaataatattgcaatactaaaaggtgtgggaccagttacaagtgcctctgaattcaaagtgggaaagaatagatgagtgagatttctgtgatttaaaagaggtgttagaaattgcatgtgaaggccaggctccatagctcatgcctataatcccaacacttcacaaggctgaggtgggcagatcatttaagtctgggagttcaagaccagcatgagcaacacagcaaaactcagtctctacaaacaaacaaacaaacaaacaaacaaagaaacattagccaagtgtgctggtatatgcctgtgatccagctactygggaggctgagtgggaggatcacttgaacctgggaggtggaggcttcagtgagccatgattgtgcctgtactctagcctagatgacggagtgagacctaatctcaaaaaaaaaaaaaaaaaaaaaagamcaagagaaattgtatgtagcagggggcatggtggcaggcacccataatcctagctacatgggaggttgaggcaggagaatcacttgagctcgggaagtggaggttgcagtgagcygagatcgcaccactrcactccagcctgggtgacagagtgagactccatctcaaaaaaaaaaaaaaaaagaaaagaaaaaagaaaaagagagcgagagagagaaatcacatgtgaagtctgtaacagagaactcaggttcaaagtctggcatgtggccagagtttaaagatgctggatccaaaatatactcagatcaagactgatagtgttattccgttggctactggagtgttttcaaccttaaggtttttagatggaattgagaaagattacaaatttgtaacataaaatcaagttaatcactgagtagccaaattggtttttttgatgattgaaaattatgcaaactttgtttcatttctctttttttacttttttttttaaraaacaaagtctctgttctgtcactcaggctggagtgcagtggtgcgatcatagctcacttccacctgcaactctgggctgaagcaatcctcccacctcagtctcccyggtagctggggttataggcacatgccatcacacctggctaatcctttcaatttcatagttatttatactcttcagactattttgaatgtatatatgtacagcattatatatctctaggattttattcattgatatatccctggaacattacctggcatatagtaggcattataagaattgttgagtaattaatgaatgttcatgcatccatgtatacatatgcatatatgtatagttattcaaattagtctcactaataagtcattataatagttacaaatttgagtgatttatataagaatagccatgattcacaatgctgatcatcttttctcacagaaacacacacggacttaagaaagaaaggctttgaaktacaaaaagcaatagatgcctgttgtcaatttttaacaatatagaaatatgaaaaataacaaatggaagctgttcagatgttttcatgcacaaacatgtatacagtttatttttaacacaaaaataggaactatatatttttcttttcttgctttttttttttttgagatggagtctcattctgttgcccaggctggagtgcagtgtcacgatctcagctcactgcaaccctccatctcccagattcaagtgattcttctgactcagcctcccaagtagctgggactataagtgcgcaccaccaagcctggctaattttttgtaattttaatagagacgaggtttcaccatattggccaggctggtcttgaactcctgacctcaagtgatccgcccacctcagcctcccaaagtgttgggattatgggtgtgagccaccacacccagctgtcttttcttgccttttatattcagccatatattagatattttttccatcagtgtaacctcattcttagcatgcattgtatcagatataccagaatctatttaaccacttcattttttgtcttttttatttttatttaaaatttttttttatattttttactttttatttttaatataggcagagttccatcatgttgcccagactggtcttgaactcctaggctcaaaggaacctcctgcctcccagagtgctgggattacagatgtgagccaccacacccagctaactgcttcctatttcctattggtaggaataagattgtttccacttttaaatataatgagcaatgtttcaggggacgttgtacacatattctttacttgcatatttctgtaggagaaagtctgagatgcagaattgatgaatcagagggtatgagtattctaacttttgatagaaaatctgcattttaatttctactcatatactcttgattttggtttgatggaaggaacccagccaacccaggaaaataccttctgcagaaggctgctaaaatttcttcctcatcttgggccaggcgcagtggctcatgcctgtaatcccagcactttgggaggccgaggtggttagatcacaaagtcaggagttcaagaccagcctggccaagatggtgaaacctcgtctctattaaaaacacgaaaattagctgggcgtggtggcacacgcctgtaatcccagctgctcaggaggctgaggcaggagaatcgcttgaacccgggaggcagaggttgcagtgagccgagattgcgccactgcactccagcctgggtgacacagcgagactctccttctcaaaaaaamaaaaaaaagatttctttctcatcttatgggctgatttccaggaaagcctaccttagctgcctgaagctctagtgcagatcactgtcacatccttaagaagagctagttctggccggtcgccggaggctcacgnnnnnnnnnnnnnnnnnnnnnnnnnnnnnnnnnnnnnnnnnnnnnnnnnnnnnnnnnnnnnnnnnnnnnnnnnnnnnnnnnnnnnnnnnnnnnnnnnnnnnnnnnnnnnnnnnnnnnnnnnnnnnnnnnnnnnnnnnnnnnnnnnnnnnnnnnnnnnnnnnnnnnnnnnnnnnnnnnnnnnnnnnnnnnnnnnnnnnnnnnnnnnnnnnnnnnnnnnnnnnnnnnnnnnnnnnnnnnnnnnnnnnnnnnnnnnnnnnnnnnnnnnnnnnnnnnnnnnnnnnnnnnnnnnnnnnnnnnnnnnnnnnnnnnnnnnnnnnnnnnnnnnnnnnnnnnnnnnnnnnnnnnnnnnnnnnnnnnnnnnnnnnnnnnnnnnnnnnnnnnnnnnnnnnnnnnnnnnnnnnnnnnnnnnnnnnnnnnnnnnnnnnnnnnnnnnnnnnnnnnnnnnnnnnnnnnnnnnnnnnnnnnnnnnnnnnnnnnnnnnnnnnnnnnnnnnnnnnnnnnnnnnnnnnnnnnnnnnnnnnnnnnnnnnnnnnnnnnnnnnnnnnnnnnnnnnnnnnnnnnnnnnnnnnnnnnnnnnnnnnnnnnnnnnnnnnnnnnnnnnnnnnnnnnnnnnnnnnnnnnnnnggatcttagagactattccccttattttgagagtaaacattcagttgaaagttaaagaaaataactcaaactggctgaaacaataaaaggaattcattggctcacattaactgacaaattccagatattgagtaggcttcctgtatgatttgagccagagtttataatatagtctacttttcagtgatattcttggctctgctccattctgtatattggcttcatccttggcctggctttccttgtaaggctactggtaattttgggacggtatatatcatatttacacccaaggtaagaagaggatgttcctttctccaactatcaaacaaaagttctgaacctcatcctaattaggccagcttaggataactgttcatccctgagtcagtaactcttaaaaggaatataggttcacaaagacatcctagagctaggtgtaaacccaataccatgtgaaggacatgaacactacacaacgaaggaggaggggatggattctgattaaacagccacctattagggaggaacttcctttcctcttgcctcacgtttccatgtagaggaacttctactacagtaacactgttggcccccacttcacccctcccctgcctgctaggtttgcaaagtagttcatggtcttcatttctccattggatggcgctaatctaattaaagttagcaagcattggagagtcttctatttccttcccacctggggcttacatgggacagcaatactgaactaaatgtagatgctctacagattcaaatatccccttcggtggcctgagccagggtttggtcagygggaagaaaagattgaagggatggaaagtaatgtagcaaatctctgccacagacctgctctttcttcagatcagctttacctttttttttttttttttttttttttaaagacagagtccactctgtcacccaggctggagtgcagtggtgctatctgcactcaccacaacctccgcttcccaggttcaagtgattcttctgcctcagcctcccgagtagctgggattacaggtgtgcgccattgcacctggctaatttttgtattttcagtagagatggggttttgccatgttggccagtctggtcttgaactcctgacttcaggtgatctgcccacctcagcctcccaaagtgctgggattacaggtgtgagccaccgtgcccagccggctttagcattaacagaggctacatttaataatagaaactgttctccatctgttggcatcctatatcttatttctcaattggttccaatcttagggaagaaagatgaagttgttgattgaccttttaaaacccaaatcctgctgggtatagtggctcatgcctgtaatcccagcactttgggaggctgaggtggtaggattgcttgagcccatgagtttgagaccagcctgggcaatatagcgagactttgtctctgcttttaaaacaacaacaacaacaaaacaacaacaacaacaacaacaacaacaccactaccctgtttcagtttctggtctatttagagcttttccttcccatagatgaggacacttgatgtggattttcaggcctatccctgccccattttctgctacaaatgggttctgcttggaccttctaccaagtcctgtcaccgtcttttgtatttagactttgtcattgtacgtaggtccttagaatttagcttctgccttatatgcaagtgtctctctccaggagccctcggtcctagtatcttgggttccgctctggtaacctacctaggtctctagttcctttttcaggctgggcccttgcaggttcccctctacattaatttcctagggctgctgcaaccaattaccacaaacttggtggtttaaataacagaagttaattttctcacagttttagatgccacaaggctaaaaccaaggtgtcaggagggctgattccttctgggggacccccagggagaatccattccatccctctctcctagcttctggtgtctgctggcaatgcttggcactccttagcttgtggcaacaacattccaagctctgtctctgtcttcacatgatcttcgcctatgtgtgtctcaatatctcaaatctcccttttcttataaggacaccagtcattgggtttagggcccactcagctataattgcactgcattaaggatctcaagatgagatcctcaattacrtctgcaaatattttatttctgaataagatcacattcacaggtatagggattaggacttggacacacctttttggggacacaattcaacccactatatcctcttgacttcttattacaactggagagaacctgtgattccatgatagacttcctgaagctgcttgcctggaattttatattatattattttaytttttggagacaaagtctcactctgtctcccaggctggagcacagtggygcaatctcggctcactgcaaccttcacctgcctgggttccggcgattctcctacctcagccttccaagtagctgggattataggtgtgcgccaccacgcctggctaattttgtatttttagtagagacagggtctcgccatgttggccaggctggtcttgaactcctgacctcagctgttccacctgcctcagcctcccaaagtgctgggattacaggtgtgagccaccacccccccacccccgccaccttgcttgcctggatttccgaatgccagatgccttggatgctcctttctgtcaccatttgcaacaactaaatcttacggccccttttgctgaccgtgtagacgccatctagagatggtggcccactttggatgctaagtttgactgccacattgaacttctcttgtcaacacagcacaggctcagtgaccccaacccccctatacccctctcagtatttatcatgtctcattgagtgggcctggaactagggtctgcatatctccattggccctatctgattaaagtgatcatgacctattgtattctgaagtgctacgcaagaagtgctagacctcttggactgattttcatgactgggcgtggtggctcatgcccactttgggaggccaagrcaggaggatcatttgagtttaggagttcgagacttacattgcacacctgggcaatgtaaggataccctatctctattaaaaataaaaataaaaagttggccaggcggggtggctcacacctgtaatcccagcactttgggaggctgaggcgggcatagcacttgaggctaggagaccagcctggctaacatggtgaaaccccagctctacaaaaaatacaaacattagccgggcatgatagcttgtgcctgtggtcccggtactcagggagctgagaggtgggaggatcatttgcacccaggaggtggaggctgcagtgagccttgatcatgccactgcactccagcctgrgtggcacagtgagaccttgactcaaaaaataaaataaaataaataaagaattagctgggcatggtggcatgtgcctgtagctgcagctcctagggaggctgagatgagaggatcacttgagcctggaagatggaggctgcagtgagctataatcacaccactgcacttcgcccacaatccctcgcactcttcctttccarcttgggcccctcagaatgcctcccgcaaagaagggtggtgagaagaattacagttctgccatcagtgagctggtgaccagagaatataccatcaacattcacaagcgcattcatggagttggtttcaagaagagtgcccctcgggcactcagcgagatctggaaatttgccatcaaggacatgggaactacggatgtgcacactgataccaggcttaacaaagctgtcttgaccaaaggattaaggaatgtcccatatggcatccctatgctttcaaaaatctacagacagtcaatgtggatgagaactaaccactgattgtcgaatatatcaaataaaattataaaactgccttccaaaaaaagaaaatcacaccactgcactccagcctgagcaacagagagagagaaactgtctcaaaaaaaaaaaaatcaaaataatgagatagagtatgttaaaatgtctagctcagtgtctggcacacagaaacaatgagttacatatattgaatactttctatgttctagggactgtgctaagcactctacatgtattatctccttcaaacttcacaataacttaattttgatctgcactggacaaataaggaaattaaagctagagtaacattaagcagattgtcttatagatactaaaagaagtgagatttgaacccaggtagtgagagtctggaggttgtcccctttatcagcacaccaaaccaccccaaaacatactggttgaaaaaaaaccaaaattgaataaaatttttgtaagaatttggatcagtccttgtcaatcaaccaaaatgagtagaattttaggaaatgtaaagttttgaaactttacaaaagtttttgaaaatgagtaggatgcaataaaaactggacataaatcttttggctcttttttgtttgtaaatagatttgtgagtacaattttatttatttatttatttatttatttgtttgtttgtttgacagggtcttgctctgttgcccaggctggagtgcagtggcacaatctcagctcatcaaaacctccatctcctgggttcaagcgatcttcccatctcagcctcctaagtagctgggaccaaaggcatacgtcaccatgcccagctaagaggtacaatttatatatattaaaatgtatttgctagccaggcgcggtggctcacgcctgtaatcccagcactttgggaggctgaggcggacagatcacctaaggtcaggagttcgagaccagcctgaccaatacggtgaaaccctgtctctactaaaaatacaaaaattagccgggtgtggtggcgtgcacctgtaatcccagctactcaggaggctgaggcaggagaattgcttgaacccgggaggcaaaggttgcagtgagccgagattgagccactacactcctacctgggtgacagagtgagactccatctcaaaaaaaaaaaaatgtatttgctgtaagagtacattgggttttgacaaatatatctgtctgtgaaagcactaccacaatcaaggtacaacattttcccattgctccggaaagctccctcctgcccttttgcagtcaatttcccaccacatcacctctggccccaggcaaccactgatctgcttcctgcccagtctagaatttcatatgagtagagggatacactatggactcctctgtgcctggcatcttttgcttagcatatttttgacagccatgcaccttgtggcatgtatcagtggttcattcctctttactactaagtagtgttcccttgtatgaggataccaatttaattctccattcatctggtgatggacatttggcttatggattagtcaggagatagaaaccagtaatttgaacacgaaaatttattataattgttagctagtaaaaagtggttaacaacaacaaggggtaaaagagggttctaaggtggctcaaacctktaatcccagcactttgggagactgargcaggtggatcgtttgagcccaggggtttgagacccgcctgggcaacagggtgaaaccctgtctctaccaaaaatacaaaaaactagctgggtgtgattgcacatgcctgtgggtggtcccagctctttgggaggctgaggtgggaggattgcttgagccagggaggtggaggctgcagtgagtcgagattgtgccactgccctccagcctgggtgagtgacccgccacccccccaaaaaagagggctgtaagggatcgagaagtagcaaatacgatgaggagaatggactctccaaaatatttaagtcgtgttaaggagaggagaggttatttttctcttttgatgctatgacaatccttgtcaacaccgttcttcaccaccacactccagccacatataaacaaccaagaaagaagggattgattgctaatgtaactatttagagcccaaaacattcattggaccacattttactggtagtcagagtcaccatgtgccaccagcttagcagtgctatcaatctctcattcctccacttccgcagaccgtggcaggactcagctatcccaagcatgccatgccgtccatttgaggctttaccagtaagtcctttggagacagcagatcattgctcagatttttgttcactgagctaatttacttctctgtcattatttcagaggacaatctgcatataatgatacatasctaattcttgagtatcctttcaacttcgtttcattgtagcttaatgcagaatatacttacacagtgtcatcctgaagtgataattaaaaaagtatacggatattttcaaattagtgtttaattttgtaatgtgtgactattttcctaaaagctttaggaaagattttaggaattctatttttatgagattagtatattttaattgcatgcattgtttgttggtgattcaatttttttcaccttaaaaatattaatgtggggcttacaaactcataaatcagttactggtcaaatttaaaaaaaaaatgacgtgccttggctagtgcaaacagtaaatcagtttttttactgtgtttgtttgattcgcttggaatctaacaaacattctgtaagaagttaccaccgaagacaggagaaacagatacctggcacttccttccttactaatgaaatgttatgcatttcagtactttctacgtgaggaaaagcaatattgcataagagtaattaaagtgttcacaattaggtccatactctggtttctcttcagatcgtatacgtcttttgtcttttactaaagatttccgtggaagggaacaattctgagtttttgactaagttttgttttgttttgtttgagacggagttttgctctgttgcccaggctggagtgcagtggtgcgatcttggctcactgcaacctctgcctcttgggttcaagccattcttctgtctcagccccccaagtagttgggactacaggcactcaccaccatgccaggctaatttttgtatttttaatagagacagggtttcaccacgttggccagtctggtcttgaactcctgacctcaggtgatctgcccccttcggcctcccaaagtgctgggattacaggcgtgagccaccgtacctggcctgaccaagttttgaggccttgcatatgtggagcttatttttatttttatttattttttaatctttattttattattattttttgagacagagtctcactctgtcacctggagtgcagtggcatgatcttggctcactgcaacctctgcctcccgggttcaagtgattctcgtgcctcagcctcccaagtagagctgggattacaggtgtgcaccaccacacctggctaatttttgtatttttagtacagacggggcttcaccatgtggatcaggctggtctcgaactcccgacctcatgtgatccacctgcctcggcctcccaaagtgctcggattacaggtgtgagccaccatgcccagcccaggacttattttttaaaaaatgttacagatattaaagtttgtatatttttctggtagaatcaacaacctgttatcacctagataactgctcttctttcaacactcaaatataaattgaggggctaaataggaccagagttctgctagataccagaaaagtgaagaaccacagagtccaactcttgctctgtggagtttacaacacagctaagaagacacagaaaagccattacaagtgtttttgaagaagtacagggtgcaacatgacctaaaggtcaattacccagactgtggctcaccctgatttcttgattcttcttgtattttcttttcttttcttattttttttgagacagtcttactctgttgcccaggctggagtgcagtggcgcgatctcggctcactctaatctccgcctcccaggttcaagtgattctcctgcctcagcctcccgagtagctgggaccacacgtgcgtgccaccacactggctaattttttgtatttttagtagagacagggcttcaccatgttggccaagatggtctcggtctcctgacctcgtgatccgcccgccttggcctcccaaagtgctgggattacagacatgagccactgcacccggccaattcttcttatattttactaattattattttattgattttttttttttttttttttttttttagtagagacggagtttcaccatgttggccaggcttgtctcaaactcctgacctcaagtgagcctctcgccttggcctccgaaaggactgggatkacaggcttgagccactgcacccggcctcattttatttttatagagacagggtctctcactattttgcccaggttggtcttgaattcctggactcaaatgctcctcctgccttggcctctcaaagtgctgggattacaggcctgagccaccatggccagcctctttcatttcaaaattgaagaaagaaagtgaagatacaagctacattaaatgatggtatgcacgcacatgtatcttctaggaagaacattattcagtcaaataatcgaggttctctcaggcaacctctctggaaggtttgcttgtatgtctagtggtagatgccccaaatccccaaagaagaaagcagggagtggtgtggaaggggttgccatgtggagatgaattgcattcagttttctatcttttaagttttatttttacttacatggccgggcacagtggcttattatgcctgtaatcctagcacatttgggggccaaggygggaggatcacttgaacccaggagtttgagagcagcctggtcaatacagtgagaccctgtctcttaaaaaattattttttaaataaataaatgttatttttttacttagatggagacagagtctccctctattgcccaggctggtcttgaactcctggtctcatgtgatcttcctacctgggcttcccaaagtgttgagtaaattacaggtgtgagccactgagcccagccagttttctttcaaaggaaaaagaactggttgtcgagttccttccgagaaggcaaaagacagctgagcagggcaagaaagccgtgcctttgggaggagcagagttcatggtctaattcctgttgctttagcctccgattgttacttgcggggagagccgataacatcggatgggtacagggctgcggaactggagcgccttggctatttacactgacctggaaaatgtcaggataaatgacagaaggcgggggttggtgactgcactccttctagaagtctcaacgctttgtgggtattgagttgtgttttttccccctcacggttgacttgtcactaagtcactaaggatggcctgtaaatggggtgacggctgggggaagggaggaccttaaagtgagacaggcacccccacacaggtcacagtttaaaagacgatggttcagaccgttatgcgaaatgatctcagagcggctgttcaccttccccaaagctgcattaaaagaaataaggatgggtgacaacccctttagaagacagacccccacactgaggctagccctcttatcggctggccagggcgaggaggggtgtgtgcagggtcgccctcgatgccgcagccggggccagtgggcacgaatgcggccccacgccaggcttggcctccgaacccgctaggcgcgcgcgcacggtagaagcgcgcgcctccgtccctcgcgagcgcgccccccacccctctccgtcgcacgcgccgagccccggcgcccccgcccgccccgcgctcccacagcccgagcgccgctcagctgacccgcgggcgccagacgcggcggctctcagctcgcgagcgcagctgcggctgcgagggcctctcaggccgacactccccccgcgcccctcccccacccggccgggctccggacccgccgcgcgcgagcccgcggccgcttcccccgcgccgagcgaggaggcaggctgcggcggcgagaggcggctgcgcggccatgggcgcgccagtgtcgccctagggcgggcgcacagaccacagccggagcggtggtggcagcctccgcagaaagccttcccgggcggcggcggcggcggcccctggagcagcgcggccgggatgagcgggagctgcgcggcgcccggcccgggctcgggctcctccccggccgcctgccgcttcgcgcactacttcgtgctgtgcgggatcgacgcggacagcgggctggagcctgacgagctggcgggtaaggccagggctgcggcggcgctgagccccctcaggggcgcgggggacgctgtggggacgcgcgggaggcggggtgcaggctccagacaaagtcagctcccggtggcgccctcccgccgctttctggccgaactggcgctcgggcgcgatttaatgacattgttatttattccgcgtgcgggctttgcggctgcgcccaccggggctttcgcctccaggcgctgggttattaataacaggcgcgggggtggccccaagggcacggaccccgcctggcgcgccggccccttcgcytgcagccgcactcggaggcggccggtgagtcaccgggcgcgcrggctgccccccgaccgccgtgcctgcctcccacccgccagccacccggccccggccgcgaagtttcggccccgcacgtgacgcggctttcgggcctcttcgggagasggggagtcggactcagctcggctcccgccggggtagcgtccgcggaggagccggtggccgtgcggagcgagcgcggggcggggaccggtcggactctgccctctgcgccgcctgccgctctgcggtgccggccaagtcaccttttggaatcctgtggatttggccgcgtctgggagctggcagggacctttggacgctcgggacccagcaccgcgctttgttgacactgcctacactgttcccgagtttaaattcagttgggtgcaccgtgtgttagtgcctggttttcccggaggggtaccggtccttccgcttgactcatttgatggcgcagtgcggggctgtgctgggcaaacgacgccgttaaaaggggccgctaaagggcgatgggcgggggcagggcagcggagtgcgcagtgtcgagaggaggccggggagaaacaactgatttcatttttcacgcctgttcctttctgcttgcctccgcgggatctgaatcttgatttgttgttgttgttaaatgggtgagagaagtgacatctaccgcctgaactttgtgttaaagacttaggtcatagcctttcagaacaacttcctttggacaaataattccttattgattgcactaacgtaaatttttcgcttttcctttggtgggggtggggagactgggaagaatatattaaataataaacaatagtaaacaaaactgttcagccttaaaatacagyccccatcaacccacgtcttggctatcttcttcttaactcagcttcagagcaaaacattttctttttttcatattcttcggaggtagaaacacaaaacattttcaacaaaaactgtaagtctagttttagttaaaaaaaaatttggagagataatagaataccaagtttttccgtatgtgtaattatgtaatcacattgtttcttcaactaagatttcatgtacatgttaagaatggctttgttaaaggatatgaagaaaaaatgtctgcagagagatttggagagattcttctcgagattggtgaaggaatattgttatttttctagactcctttcttccctaaagatcctaaacatttgtggcaccagggtcacttggaggccttctgtcagtgatgactaatgaaaggaaaaaagcctgtatttttcttttccgtttgcctactgaagctaaaactgtaccttttaggtgtgacctaggactctttaggcacagagagaatgatgttaacaaaaccatcaattagactttaatgcatttttaagaaacaaactatgatgtctctttttgcaaaactgtgtgagtgtgggtgattgggatttctgcttctcataatatttaatgtattcaggtaataatgtattttgccttgtaatatttcagtatcattcatccaacagttttgaaagcatctatctgtagtcggttttttaggcactggggacagctgtgaagaaagcagtcagaaatccctgccatcatggagcatacgttcnagtgtaaagagataatgaaaatacaatcatctctccrtaaccatgggggatggattctagagtgtcccccacaccaaaatcctcggatgctgaagtctcttataataaaatgttgtagcatttgtatataacctatgaacattttcctgtacactttgtcatctctagattacttacaatacctgttacgttgtaatgttatgtaaatagttgttatactgtattgtttagggaataatgacaagaaaagaagtctgtacatgttcagtacagatgcaaccattgtaggcctaactacattttcaatctgtgcttggttgaatctgtggatgcggagtccacgtgaagtgccgactgtatatagttctccagatgttaataagtgctatgaggaaaaataaagcaggggagtggatttagggacatgccagcagagtggtgggatggtggggttgtgattttaaataagatggttagggaaggcctcacagggagggtgacatttgaacagagccttgaaggacatgaggaagcaggccagatggatcacctgggggcacagcattgcacgcagaagaaacagcaagtgcgaagaccctgagtgggacagtcmctagtttgtgctggtaacagcaaggagtccagtatggctggagctgagggagagggagagtagtaggtaagatcaaagagaaagggcaggggagattgtatagggcctcatgcagtttttaggcttttaactctgagatgggaaagtattggaaggttttgagcagagtaatgacaagatctgatgtgccttctaaaatgactgttgtggctgccatgttgggtagactatatyagggcaggggtagaggcargagaccagttagggagctctttcagtatttgaggtgagaggctggatgctgtggctcacgcctataatcctagcactttggaaggccgaggcaggtggatcacttgaggtcaggagttcaagaccagcctggccaatatggtgaaaccacatctcacctgaaaatacaaaaagctgggcgtggtggcacatgcctgtaatatcccagttactctggaggctgaggcaggagaatcgcttgaacccaggaggtggaggttgcagtgagctgagatcgtgycactgcactccagcctgggcaacagagggagactctgtctcaaaaaaaaaaaaaaaaaaaaaaaaaaaaaggtatttgtggtgagagaagttgttggcttggtgaascagcaggaaggactcagattctagatagatgttgaaggtaggcccaacgagatttgctgatgatttatatgaatatgtatgaattctatgaatatggtagtcatattcaaagaagtgatcaaagatgactccaagattttggggctgaacaattataaacttctctcctgaaataggaagactgatggagaatcagactggaaatcagttcagttttggatgtattaagtttgatgtgtccattagacattcaaatggagatgtcacatagacaagacatctcttgggggaagatctggactgtaggtataaatttaaagccatgaaattacttaagggttgagtatagatagaaaagagaggaggacacgcaaatgattgagccctggggccattctagcatgcataggtggggaggatgaggaggaggaggcaaccgaggagattaaggagtgtggatagtgacatggcaggaaaacaggagaatgtcatatcatgttctcaactaagaattttcttgactatttcygtagagcaacatttggggatcatgaaactgtgttaggcaaattagccagaaggtagtttctgttttgctgcattaatttcaaagttaatgatagtcaagtttctattttgccttgctggagctgatctgtctttatcacactttcttagcaagttgtcaccgtgcctctagaaggtcttaattgacttctattaaacataaattctaccagttgcttcatagactttcttaacatacgcatattcctagaattcacactctgcaggtggtgggacattgaaatcaaagacaacaacagttaaatagactaagaccttataataaaacttatcaaggcttcaaatggtttttagaccctcctagtaaaaccaagcttaaacagcaatggaagagacttctttcatctcaaatacgtagaactcttaatagctgaaaataatttaactatatacataaaaatatattttaaaatggaggacttagaaactttatggtgatgtccacatgtatatactgatatactcatattacctgtcgtcctttctgtaccacatcgaagttcttgtgcttctcctacccactgtatattttcaagaggtactttgcccatgaacaaaacgtcctttgggagaaatgtttaaattccctttaaatattaaagataaggaaaaggtttcaaaacgagattctttattgcatgtagaagaaaggaggtataaatggaggtaaatcatgcaattagttgatgtcagggaaggcagacatcattttgaaatcttattttatagcttttatttcctttaagacctggctgtaggagtacacatggcttaatttacagcagtcaatcttttgagcaatgggaaaatgaaggacatgataaggccttgattaagtaaaataaatatacaagccctctaagagagaagggactttgcctctttcgtagtaccttatatacagtacacagtgtttaataagggaatgaatataagtttacatgagtctacaaattatgtgatgaccagaatattcttaaagtgttcccttggtagcctggattcagccctcctaatagttgtcgaagtctgatggatgagatctctgccatagaactttgtttagatcttttccttagtgtctctctctagctatttttagctttggttgtgttgggtgtggttttcaaaagagcgtagagacggtggagaccatgatctgaattcaaataagcagaacatttagtcaagactgacagaatatcatgtcacgttagttmttgaagggaccttagacatatttatggtaaagagactgaggctcagagattaagggccctctcagattacatttgatcagcagtagacacctgactagtgcctggtggttccagtccactatgctccatagttattctatttaaactcagaaaaaagatgagcttgactcattcaacaagcatttcaggattgcccttattccagactgaatgtcatagtcaagactgtgctgaagtgtgttttttaaaaacagtggccgggtgtataggcttaattgggatagaagctgccgtgatccaaataccattgatactgtgtcaattgttagctttgttgacatccttggctcacaataggttcttgggagtttggaaggtctgccccgggtagctcaggggctggggaaggagtagtacagggatcagccttcattttaatgaggccaaagaagattcaagatctggttgctgtgtgctagtttggctctttgtccccaaacctcatgttgaaatttgattcctaatgttggaggtggggcttattgggagatatttgggttatgggggcagatccctcgttaatggcttggtgccctcctagaggtaatgggtgagttctccctytatgagttcccacaagagctagttgttaaaaagagtctggcaccactcccctaccctcttcgttcctctctcttgctatgtgatctctaattggctagccttctgccatgagaggaagcagcctgaagctctcaccagaagtagatgctggcgccatgcctcttgcgtagtatagccgccaactatttcttttctttttctttcttttttttcggggagggtgggtggggggtgtgggacagagtctctgttacccaggctggagtgcagtggtgcaatgttggcttattgcagcctcaatctccttgggctcaagcagtccttcacctcagtctccctagtagctgagaccacaggcatgtgccaccatgcctggctaatttttgtattttttgtagagatggggttttgccatctctacaaagatgttgcctaagctgatctcaaactmctgagctcaagcagtccacccatccttggcctcccaaagtgctgggattacaggcagtgagccaccatgcctggctgcgccatttctttatagactacccagcctcaggtattttctttatagcaacacgaaaacagactaagacactgtggtataatgatcatttaattttggaaatctactggaaataaaactctttatagtgaaattggcccaagagtgagtgaagctaaattctctgtgataaccccaaggctcaggcttatggcccattttgttaatacaggacacaccagcatagacaactgggaagacaagggaggggaagagggtgagacatagtgtctttgagggaggagagaaagggaaagaaaaggggacagggagagagaaaggaggctggaggagtacaagttctgtttgctgctaaggtgttaagacagactgtyctaaaattcctgtgcacatccttttgcttgtatttccactgttggtcacagatactctcagagtaataaaagtaaatatctagaatacaatgcattgttagtcatgatttccataaagcttcatacggaagaaaacaatttcctcttctataatttactgaatggtagagatggttctatacaggatgctttaggaaacgtgccatatgcctgatccttagcatttttgtttaataatgacctaaattttgtttttggtaaaaccataactagctattatattttggattatttaatgttaaatgcttacagtgtgtcagattctggagtacatacgtaagyggtggccactgtcctataagaatctrtgatgaaatagtaaaatagctaacatttatagagtgctttccacatgccagacactgtgctaaattcktgttgttgttgttgtttgtttttgtttttgtttttgttttttcccagacacagtcttgctctgttgcccgggctggagtgcagtagcgtgatctcggctcactgcaacctctgcctcccaggtttaagtgattctcgtgcctcagcctcccaagtagctgggactacaggtgcgtgccaccatgcctggctaatttttgtattttttggtagagacggagtttcatcatgttggccaggctggtcttgaactcctgacctcaggtgatcctcctgcctcggcctcccaaagtgctaggattacagttgtgagccaccccacccaaccactgtgctaaattctttatagtcagtacctcattcagtctggacaacaaccttaggaaataggcattcttttctctctctctctcttttttttttttttttaaaagactgagtctcactctgtcgcccaggctggagcgcagtggcgctatctctcctcactgcaatctccgcctcccgggttcaagcgattctcctgcctcagcctcctgagtagctgggattacaggcacacgccaccacacctggctactttttgtatttttagtagagatggggtttcaccatgttgatcacgcttatctaaaactcctgaccttgtgatccacccaccttggcctcccaaagtgctgggattacaggcgtgagccaccacgcctggcctgttttctcttttgtacacaggaggaaactgagtctagagaatgaatactttacttcagttcctataataagtaagaagcctggattgaagatctgtctgacataattcatccatacccataacatccatacccataaccactatatttgctgtctccctagtaacatatgctgtatcatacagattgtaaaatctaccagaatatagatcccaaatgggtaaccttatcgtcaagtgaaattatcttcttattcctctatatgggaaagatattaaaggcgacactatcgggcaggcctttatgacctgacctagcttgtttcttctttggtcagcactagtaatttctcttgcatgcatttcctcattcattcatcacagatttagatttagaagattatatatttaatgatatttttgcttttgtcaatgaatatttttaaagataaggtgttactgtataaaggcttttactatgaaatataccacttttaactttttaaaaaacctctttgctcttcttactgggttttatcatttcttagcataaataatttgtcattaggtgagtttatagttttttaaaggaatgtatgaatgcttgtgaaaccatagctggcagggcagtgagtacagcagttagagctgaatgcacagtcagaagctgagattccattcctggcctgtcacttatgacagccgcaggcatcagtgttctcgtctgtcttgaaaagggttaaatgagatgaatgatttctaactaccacccttggggcctgaaattgtttttgagtaaaaaaactaagtttatctgttaaaaaaaaattaatcctaaatgtcatagaacaagaggacgagtacacaccacatgtatagtcagccctccatgtgtgtgggttccacatctgtggattaaaccatcatcaaattgaaaatacagtgttccaaaaaaaataaaaaccaaaaattgtggttgcatgtacgtgttttttgttctcgctattgttccctaaacaatacagcataacaaccatttacatggaatttgcatcgtactgagtattataactaaccaggaggtgacttaaagtgtacgggagaatgtgcgtatgttatctgtacgtactacacgattttatgtaaggggcttgagcatcctgggagtcttggaaccaatcccacacagatactgagggataactataccacatgaggagcgattaagtaattagaaaatcagccaccaggaaagggagaaamtcaattagtttatacagttccctttccagaaaagctactttttttttttttttttttgagacagagtttccctgttgttgcccaggctggagggcaatggtgtgatctcggctcaccgcagccagcgcctcccaggttcaagcgattcacctgcctcagcttcccgaatagctgggattacaggcatgtgccaccatgtccctctaatttttttttgtatttttagtagagacggagtttcaccatgttggtcaggctggtctcgggctcccgacctcaggtgatctgcccgcctcggcctcccaaagtgctrggattacaggccactgtgcctggccgaaagctacaatttttaagaagcattttgaaatcttaatgtcaattaatggactcccaattattatctacatggacttttaaggacccaggggttcctgtttgaaattactgtactaatctctagattattactgtagtatggatgatactgccagttcccaaatatagtcattgagatcttagaataatttttttctacttaaaattctctaataacttcctttgtatttagaataagattcaaacttttaggtatttgtttataacaaataaatattacatttatttgtttatttataacaagagtgagacagggtcttgctctgttgtccaggctggagtgcaatacttcaatcacagctcactgcagcctcaacctcctaggctcaagtgatcctcctacctcagcctcccaagtagcttggactgtaggtgtgcaccactatgcctgactgattaaaaaaattttttttgtagagatggggtctgtgttgcccagggtggtcttgaactcctgggctcaagggatccgcccatcttggcctctcaaagtgctgggattacaggggtgagccactatgcctggcctatgtgtggattttaaaaactctaaaatggaccaggcgcggtggcttagccctataatcccagcactttgggtggccgagacgggtggatcacttgaagtcaggagtttgtgagcatgctcaccaacatggcggaactctgtctstactagaaatacaaaaattagctgggcgtggtggtgtttgcctgtaatcccagctactcgggaggctgaggcacgagaatcgcttgaacccaggatgtcaaggttgcagtgagctgagattgcgctgctgcactccagcctggttaacagagtgagaccctgtctcaaaaattaaaaataaaataaaataaataaaaacagtaaaatggaagctagagttttcttaaaaatgagaagcttgagattgatgaaaaagcaagataatggataaatgatttctaaaaaaaggtatctaacagctttgtgaagggctaataaaatttctttcaactataaaatgtattagcctattcctttcctcttcaaataagatacggtaaataaaattaaccatttttaccaggtatatgcaagcaagcatgcaggtaccaacaaggctttgatttttttttaagcaaacatgtcttatttatttataarctagtgccaagtgatgagcatgtaaatgatgggcagtatttatgaaatttcagaaagtggttgtactaaagagcacttgtagcttcagttgtggttttaaaggaatatcttaggaaactgcatttacagatttgttcttcatggcacctacatcagctttgggcacagtcagtcagtacagttctctttgtttcaataaagtttaatcctatatatatatttttttatatatatttttttctgtttatactctcctattgtgctttacaatgcactgttctacctaaggcttgactttttaagatggcaccatgtaaggtcctcttggccagagattccaaaaatttttgatatgggactgtctttccccattactcttctctcttctctcttctctcctccctccctccctccctccttccttmcttmctcccttcctccctctctcccttccctcccctcccctccccttccctctttctctcactctttctctctttctccttttctttctcagaatctcgctgtgtctcaaaaaaataaataaataaataaataaacccaggctagagtgcagtggcgcaatctcgcctcattgcagtatctgcctcctgggttcaagtgattctcctgcctcagcctcccaagtagctgggactacaggcactcgccaccaagcctggctcatttttgtatttttagtagagaaggggtttcagcttgttggccaggctggcttcaaactcctggcttcaggtgatcacccccctcggctacccaaagtgctgggattacaggcatgagccactgcgcctggcctccattacttttcaaacaaaatgcagcgatgactggttgagtgtgaggaggtaagaactcagaattctaggaatgaaagtattagtattttatctgctgctgagacagcacatcctgaggatagaagaggccgcaagattagctttctcagatgttctgcaccttttccaagaatctatgactttactaactttatttgaaattaactcttgtaactatttttactaacatgggtttcttgggttaccttttatttttctgttagaaacttgtgtatatcactcatgcagaaagctaattttgaaataatgctttatttaaatgactttcaaagatatgtgctagcattattaagtcagaagtaatcccaggaagtcacccttattctatgatgctatgaaaatagctaacatttatgaggcatgaactgtggttggtgatttataaacgctaattctcacaataacttgaaaatatgacttttctcatttgatagatgagaaggatgacattcagtgagttgcccaaagacaggaaaggccatagcttggattccatcccaggctgtctggctgcaaactagccttttttcctacgccctgctgcccctctgagtccttcagaccagctgtcctcaactgctgggtggtgacacattaatgggcctactgttcatgagctaggtcacaagtaattattaacagtagtagacatactgaggttatgatatatattttaaaataagtggaatggattcaaggtcttccctctaatgatattatttttattcagttccattcctgtatgcttttactgggtgggagagaaaggtggcattatatgcatcaaaccagtaattgtgcatagccccatacataatgggaaatctattttatgctactggtaagctaccgttactgatgagctatgaatagtttccacatattaataaagccttttaggaatatcactgcagaagtagtcagtctgtttgctttactttcctctagaaaactattttgtgcattatctgaggacacccatgggagtgtgtgtctcaacacttttgctgatctggattgtttctagatacttttctcaattatacaatgtgacagtgttttggaaagagtatttataaattacaataaaaaatgatccaaaaggtgatctgagctaaagacgaacaaacaaaaatgtgatggagttaataatgttagggttgtagttttttttttttttttttttttttgagacagcgtmccactttgtcccccaggctggagtgcagtggcatgatcttggctcacttcagtctccactttctgggcttacgcagtactcctgcctcagtcccccaaatagctgggactataggtgtgtgtgctaccacgcctggctaatttttgtattttttgtagagatggggtttcactatgttgccgaagctggtctcgaactccagagctcaagctatcagtctgcctcrgcctcctaaagtgcttaggtttacaggcgtgagccactgcactggaccctgtagaattttttcattcagttctgctgtgaagactgaagtgctgaatcyttaaatatagtttgtggacctctagattttaaactgtgaaacccagtttaaagattttttttttttttttttttttttttgagacagagtctckttctgtcgcccaggctggagtacagtggcgcaatctcagctcactgcaagctctgcctcccaggttcacgccgttctcctgtctcagcctcctgagtagctgggactacaggcgcccgccaccacgcctggctaattttttgtattttttagtagagacggggtttcaccatgttagccaggaaggtctcgatctcctgacctcgtgatctgcctgcctcggcctcccaaagtgctgggattacaggcgtgagccaccgtgcccggcctaaagatatttttaagtttaaatatttttaagtttaaatctatttttatagattcccagagaccttctgatgaaaatccacttaattttgcttaattttttcctgtccatgcctggagaatccaggtttctgctttgtagactatattttcttgcccctcccttctcttcctcttttctagtacaacatactctgtcatttatttaaacaggaaattatcctatagtttgagaaaacatcaatgtagaagtgataatgtaaattaagtaaatttctgatcatcttaattcctcagtacagcttgacacaagattgctcatagaccaggcttttgtactttttttctctaatcccttcttcaaagatcacccttattttcaccttggtcctcatgatgccacctcttattgctcttttggttgtccctttttgagaaaaacctgtagaagaagaaatattcttttgacaaaaaagttcttgtatcattatgtaaaacctcatagtgaaaaagctcgctctttttttttttagaaataaggtctcactctgctgcccaggctggagtgcagtggtgtgatcatagctcactgcaggcttgatctcccaaactcctgggctcaagtgatcctcctgcctcaacctcctgagaagctgagaccacggctgtgcgccaccatgaccagctaattaaaaaaaacattttttttttgtagagatgggttcttgctttattgctcaagctggtctcgaactcctgacttcaagtaatcctccctcctcatcctacaaaagtgctggrattataggtgtgagccaccacgcctgacctgaaaaaactcttggaaatgtctgtctgaatcttccatttaccttcatttctagcagaaactgggaaatttctttttttcttttttcttttctttctctcttttctctgkctctttcttatctttcattattattacttttttttgagatggtgtgttgctctgtctcccaggctggagtgcagtggcatgatcacrgctcactgcaacacactctgtctcccgggttcaagcgattctgatgcctcagcctcccgattagctgggattacaggcgtctgccactacgcttggctaatttttgtattttttagtagagacagagtttcaccatgttggccagactggtctggaactcctgacctcaaatgatccactcaccttggcctcttaaaatgctgggattacaggtgtgagcccctgtgcgcgcggcctcattcttcttytttttttttttttttttggagacagagccttgctctgtcacacgggctggagtgcagtggcacagtcatagctcactgtaacctcaacctcccwggctcaagcagtccttccacttcagcctcttgagtagctgggactacaggcatgtgccaccatgcctggttaacttttttctttctttctttctgttttttgagacagtcttgctctgtctcccaggctggagtgcagtggcgtgatcttggctcactgcaacctccgcctcccgtgttcaagtaattctcatgcctcagcctcccaagtagctgatattacaggcatgtaccaccgtgccctgctatgtgcctggttaatttttaaatttttttgtagacatggggtcacactgtgttgcccaggctgtctcgaactcctggactcaagctatcctgcctgggcctcccaaagtgctggaattacaggtgtgagccaccacatccagcctgaaactgggcaatttcttatatctcacatcttttcgggtttagtaccttttatttccagtatctgttcagttttcttcctcttccttctcttgtggtcctttgagaaaacagggacaatctgctagtctaaggatattctttctagatattaaatttatatcaattttttattgctgtagatcaggactaaaacagcaaaaaggaattgtttcctttgggcagagatgtgacttgcttttgaagggggaagtgggtagtcacaatctactcttacgtaattccctgatgtagtcctcctttgttacaagaatcagcaccaacattatcaattggaattctatgagaatgacatactaactttaataagaatacattgagcagtaggaatttatggctggttataggtttaaagcttgtaggtgatttacttttagaaccacagtgttttctatttttaggttaagttatcctcaacttcaactctaacttttaaggaaatataaatggctggggtaacaagataacagattgtttaaaactatttcctatctcctgtctcaagtgtatgtattttcttaataaataaacttttgtcaggatttcaaaatattcttgctcagctcgaggaaaatgaactttcacactggacttaacttgttttgtgccattgttcaccagaacaatgactgtgatttcacagttaaaacacaggcattggtacccttgaggtgactatgtgaaaataggttattttgtttggtcattctcactcctgtctggcagtgcttcattttttcactggcagctctagctacaatctgattttaattaaatatgtgaaagctgtgtgtactagaatgtaaaatcttgtatattcttcatagtgaaggactgacaggacccgtttacagtgaaccacttgtaaatcatcttgtttctggtggatggrgccaatggggaaataattaaagtattgagtgtatggagaggatagaagttggtagaaaacaaaaacttaagaaccatactggtgattccaaaattccccctccacctcccttttattattttattttttattttgaggcagagtctcgctctgtcacccaggctggagtgcggtgacgcaatctcagctcactgcaacctccgcctcccaggttcaagcgattcttctgcctcagcctctcgagtagctgggactacaggcatgcaccagcatgcccagctaacttttgtatttttagtagagacagggttttgctgtgttgcccaggttggtctcgaactccagacttcaagagctccacccgccttggcctcccaaagtgctgggattacagggagccaccgcgcctggccacctcccttttaaattattattattattattattattattattttttagagacagggtctcattctctcacccatgctggagtgcagtggcgcgatcacagctcactgcagcctcgatctcccgggctcaagtggttctcttgcctcagccttccgagtagctgggaccacaggcacatgccaccacacctggctaatttttttttttatttttgtagagacaagatctcaccgtgttgtccaggctagtctcaaatggtccttgcctcaaatggttcttccaccttggcctcccactgttgggatttcaggcatgagccactgtgcctttttttttttttttaagagataaagagtctccctttgttgcccagartggagcacagtggctattaacaggccatcatagctcactacagcctcaacctcctgggctcaagggatcttcctgcctcagcctcctgggatagctgggactaatggcgtgcaccacggtgcctggccagaattctctttatctctttgatacctctatcaccytctctgccacttagaacacaaaatttgtggttagartagaagtggtagagggatagccagcaaatgccctagaccccagagcttctgtagatttaattgtccattgaagaatcatggagtcattataagagtctcttgcacaagtgttgagcctacttaatgaatattgaacgaaattacattcacttttccctggaatgaaayctctaagcaagagtaaaaatttagctttttctgaatgtgaacataaggccatgaagtagacataccttgttgaatcattatggggcagaggcccagatatgaaatgtctgttgacatgtatgcacattcagtatttatttcagtgccttattgaactctattgaataggtcaggtgacagcttttatctgaacatcagtctttgagggacagttgaagcactggtatatgtgtgagcgagagattggtgtttttttcaaatgtagaagaggtaactkcttacattttttgctcttaaaagtatattatttcataatattcaaatttgccttgggatttaaagtataaattgtcattttagtaacacaattgaatattttttaatatctctgaactaatgagatacagttttctttcaagtgtgggaactattttgtaccctgttccctgacctctgccttttgaccctgtcactttgtgatgagattatagataggcctttgagcttttctccagtctgctcaggtttccttacacagcaacatataaagctttaaggtcctttaaaagatgctcttagaattaaagagaacattcagatttaattggcatgagtttcgtaaatattttttctttaaaaagtctttttcttccttaatgctttcctgtcccccaaatctatttaattatgttttctaaaatggtatatttcgggagaggctaacaattagagctttctaggataaggaaatccaagagagattcaactgtttattccctatttgttgtctctaggtatgagaagttaaaatccagaattagagggtgtcatacaagagcaggagatttttttcagagagaatcagtgctttaaccttcttataataagcactttttagataacaccttttagatactttttcagatgcctaaaatagagtaggaagagaaacaaggacagagaaaaggagactgatttcattggctatgtgttaataactcgtgagttttttttttttttttgagaaagagtaannnnnnnnnnnnnnnnnnnnnnnnnnnnnnnnnnnnnnnnnnnnnnnnnnnnnnnnnnnnnnnnnnnnnnnnnnnnnnnnnnnnnnnnnnnnnnnnnnnnnnnnnnnnnnnnnnnnnnnnnnnnnnnnnnnnnnnnnnnnnnnnnnnnnnnnnnnnnnnnnnnnnnnnnnnnnnnnnnnnnnnnnnnnnnnnnnnnnnnnnnnnnnnnnnnnnnnnnnnnnnnnnnnnnnnnnnnnnnnnnnnnnnnnnnnnnnnnnnnnnnnnnnnnnnnnnnnnnnnnnnnnnnnnnnnnnnnnnnnnnnnnnnnnnnnnnnnnnnnnnnnnnnnnnnnnnnnnnnnnnnnnnnnnnnnnnnnnnnnnnnnnnnnnnnnnnnnnnnnnnnnnnnnnnnnnnnnnnnnnnnnnnnnnnnnnnnnnnnnnnnnnnnnnnnnnnnnnnnnnnnnnnnnnnnnattgtaaattaagcattggccaccacccctggataatatgatattaataggaaggaagggggttttccaagttggacaggcggtcttgagctcccgtcctcacatgatccacctgcgctggcctcccaaagtgctgagatagcaggcatgagccactgcacctggcctggcaatatgtgcttttaaaaaattgtagcttttggctgggtacggtggctctcgcctgtaatcccagcactttaagaggtcaaagcgggcagatcacctgaggtcaggagtttgagaccagcctggccaacatggtgaaaccctgtctctactaaaaatacacaaaaattagccgggcgtggtggctccccagctactcaggaggttgaggcaggagaatcgcttgagcccgagaggtggaggttgcagtgagccgagaacgtgccatggcactccagcctgggcaatgagtgaaactccgtctcaaaaaaacaaaaaaaaaaattgtggcttttaaattatttttctaaaaaagaaagagtgaatggataaaatggagttttctaattcaggtgtttacttttgagagatagaaattaaatccgtagttcttgcaactttttttttttaaacccaaatcctttctacaattagtaattaaagtgaaatgagaaaagaaagagtagctttgaatctcactcagttgcttaatgctaaaataatctattaaaatttttttttctatggaaaggggaaaacactagtgacaaataagatgggaagacaggaagaagctagttagcagaagaggcaactcagtgacaagataaactcttgatctctatcttactggtccgatttgtgtgttgtcacgtagaatgaaaatatgtttagacggtataagaaacctctgatggaaaaatctggktgtctccctgcaggttgctaagaaagagtgatgtttcagggaggctgagtcttgaagcagcagcagcagatctgacacttgtccttcacagctcctttcctgtctcccatagtaagggctatgtaaacatttcatgatcagtgctggyacttgcagccgagaatgcggagaatgcttgcagtttcccttttcatgcagcagaatgataacagggacaatcttttgattgtcttattatgttttggcttttgttgcttttaaaattyccagtttgtgttgctgtaagggaggtaacatttctcaccctttctgtaaatgagtttcctgccaaaacctacctgtgartttcaaatgtttagaccaatcaaccaaccaaagaccttgagataacctaagaaggtataacctaagaagggacagttacacagtaattgggaaaacttctgcaaggacagatgtgcatttctcattttctttaaacctatcaatttactgaaaatgaatatgatttttgttaataatgacagtgccaaaaaaaattactaaaatctttttgagtaaatgaaaccaaactcctaaaaaaagaaaactttttttttttttttaaagagaattttggctgggtgcagtggctcacgcctgtaatcccagcactttgggaggccgaggcgggtggatcacgaggtcaggagatcgagaccatcctggctaacatggtaaaaccctgtctctactaaaaatacaaaaattagccgggtgtggtggcgggcgcctgtagtctcagccactcgggaggctgaggcaggagaatggtgggtgaacccaggaggcggagcttgtagtgagccaaagtcgtgccactgcactccagcctgggcaacagagtgagactccgtctcttaaaaaaaaaaaaaaagagagagaattttgattagttcttatctggagatatattgcttataatttttttctcttggtttttttgtttgtttgtttttgagatggagtattgctgtgtcacccaggctggagtgcagtgttggcgatcttggctcactgcaacctccacctcccgggttccagtgattctcctgcctcagcctcctgagtagctgggattacaggcacccgccaccatgcccagctaattttttgtatttttagtagagatggggtttcatcgtgttagccaggatggtctcgatctcctgaccttttgatctgcctgcctcagcctcccaaagtgttgggattacaggcatgagccaccgcaccaggccattttttggtaattttttagaatgagttgaattgagatgaattttagttgttcctaagtactgtgtactgtgactggcagtggctcttaactgttattttttgagacagagtctcactctgttgcccaggytggaatgcagtgacacaatcatggctcactgcaacctctgcctcctgggctcaagctatcctactgcctcagcttcttgagtagctggaatcacaggcatgtaccaccatactcggctaatttttttgtgtgtttttaatagagacagggttcaccacattggccaggctggtcttgaactcctggcctcaagtgatctgcctgcctctggctcccaaagcactgggattataggcatgagccatcgctcccagctggcattggctctttaaaatttttgggaggagaatataacacagtcacaaaataatgtaagggggcaaattgtggaaaagaaggtctatttatgcccagctcactgctcctactttttgtttccagagccagatatatatgttacacacataaaagaggtatgtaggccaggcgtggtggctcatacctgtaatcccagaactttgggaggcaggtgaattgcttgagctcaggagttcgagaccagcctgcgcagcatggtgaaactccatctctaccaaaaatacagaaaattagctgggtgttggcagtatgcgcctgtggtcccagctactcggtaggctgaggtgggaggaccacckgagcctggaaggtggagatttcattgagcctagatttcaccactgtactccagcctgggtgacacagtaagaccctcgtctcaaaaaaaaaaaaaaaaaaaaaaaggtatgttgctgggtgtggtggcatgtatgtacctgtaaccctagctacctgggaggctaaggtgggaggattgcttgagcccaggagttcaagaccagtctgagcaacataccagacccttgtctcaaaaacaaagaggaatatagattagcccacttcaacattttatgaagtggtgggagatgacttgggaaaagaggttgaatcagcctttggagttctctatcagttagaatgctgtggtttataggtcaaagaggagataaaggaatttggctggttcacaaaatttaaaaggagtttttgggggcatgtgttcagggtgtaatttgaacgtggctccagcttcatttcactgcagctgtttaggcgcaacctttatgcactgttgacttctcttcwggtggcttccctcagagttattaagtggcagcagaagttaagagtttgtattcgcacatcacaccttccttagaagagatttaactttcctcctctagccttcactcctgtcaggaaacaaaaatatgggtgtttgctgtggcctgtcctttaacaaatcagtgtggcaagtaaaatgggattaaactgattactgagactaatttgggatgaaaactatatagctagttcacagtagaagagggagggaagtggctgctgggaaacattcccaatacaggttgagtatcccttatccaaaatatttgagaccaaaagtatttaggattttgtgttttttcagattttggaatatttgcatatacataatgagatttcttaagggtgggacctaagtctaaacatgaaattcacttatatttcatatgtaccttattcatgtagcctgaaggtaattttatacagtattttaaatgattttgtgtacccatcacattagttcaggtatggaattttccacttgtggtgtcattagcagtcaaaaaatttcagattttggagcatttcatatttctggattagggatgctcaacctgtattctctacttgttgaatgctagactataaagatggccctctgaaggacagaaaagaggccagttgtggtggctcacatctgtaatcccgtactttggaaggccgaggtgggaggatggcttggcttgagcccaggagttcatgactagcctggtcaacaaagcaagaccctgtctctacaaaacaaaacaaccccctaaaaatagaaaagagccactgaaaggtgttttgttgttgttgttttttaaagaggtggaatcttgctctgtttgcctaggctggagtgcagtggtgagatcatagctcactgcagccttaatctcctgggctcaagcagttctcccacctcagcctcccaagtagctgggactgcaggtatgcaccaccctaaaaggttttgaacaaaggagtggcttgctcaaaactgtagccttaggaatatcactctggatggaggatatagcatggaattaaactgggacgagatttgaagtggggaaaccaattaggatgcttttttttttttttttttttttagacagagtcttgctctgttgcccaggctggagtgcagtggcacgatcttggctcactgcaacctctgaggaggctgttctgtaagacaaattagaaggcaacattctgaattagaatagtagtggtgggagtaaagaagatgggggatggataggaaagataggacacacaagtaaattgaatttggcaacttctttttttttttttgagacaaggtcttgctctggcacacaggctggagtgcagtgatgctatcacagctcactgcagcctccatctcctgggctcaggtgatcctcccacctcagctttccaaatagctgggactacacccacgtgccaccacacccagctaatgaatttggcaactttattgtatgttgggtttgtcaacctaaataacaaatarggataggctctctaaaagaaaattatttttattttgaaataaggtgttgcaataggaatatacatgcgatagtaaactgtgtgttctttaacattgtggaatttgtatagcttaccagtttgaatgtctgcaagtgcttgcactgggttctaacctccgcctcccaggctcaagcagttctcctgccttagcttcccaagtagctggtagaacaggcacactccaccgaacccagctaatgttccagtcatctggtactaccatagaaaaatgtttaccaattagctgtatagaagaatctgatgttgaactgcctgctattggttgataatgcttgtatagtacttactatgtagcctggcaggatgtaattgcacaataaatattagccacattttcatcatcataattaattggtttaaaccttgggcagtttgatgatgaaatttaaggtattcctggaactctcctttagatattttttctttaaaaaatttttaaaaaattattgtagatacctggtcctgctatgtggcccttgctcgtcttgaactcctggcctcaagtgatcctcccacctctgcctcccaaagtgctgggattataggcatgagctactgggcccagcctatgacatgttttatcgtagaatatgcacctaattttaatatatatatatctgttttaccatgttgccttttaatctcttaatttaataacaataataaaagtattgcttgaattacacacacacacacacacacacacacacacacagtttttaagagagaggttctcactatgtttccctggccggaatgcagtagctattcacagatgtgattacagcacactatagcctcgaactcctgggctcaagcaatcctcctgcctcagtctcttgagttgctggaactacaggtgtgcaccaccatgactggcttcaaattatattttttaattttttttgagacaagagtttcacttctgtcacccaggcttcactgtagtggtgtgatctcagctcactgccatctccaccttctgggttcaagcgatccttccaccctagtctcccaagtagttgggactacaggtgcatgccaccatgcccagctaatttttatatttttttttctagagatgggrctttaccatgttgcccaggctggtctcaaactcctgggttcaagcaatccacctgccctagcctcccaaagtgctgggattacaggtgtgaacctctgtgccaggccactattttttagtttttatagccagtcaaatatggtccctagtttgcagctggcaatcatgtttagagacgttaaatgaattacctaagtttgcattgctagtggcagaattagaaccacaacagagattcttctgggtccaaatccaggcccctttaactatagagaacagtctcagagaaacttaatcattctcatgtgtaaaagagcccaccttttaaatctgatagagagcagggcatttatatacttaaaaggaacattaataaacctattatatgttaacctaaatcacattctaaatgaaaacaagactaactttgggccttttatgcatgaaaattacagattttgttggttgtgcatctgttttaggagtagactatctacgtgtaagcgaccagaggcatccacataagcaagatgtataaattgcttaacaggactcaacgtgagtgtaaaaggactcaatagatttactcctttcttttctttcgtttttttgtgagatgatctcagctcactgcaacctctgcctcctgggctcaagcgatctttctatcctagtctcccaagtagttgggactacaggtgtgtgccggcrcacctagctggtttttttatttttttgtggagacagagttttgccatgttgcccaggctggtctcaagtgagccacctgccttggcctctgaaagtgctgggattacaggcatgagccactgtgcccagctaatcccttaatagatgcagtagtcgaattggcaaggttgtgaataccaggaaccaagaatcattgagggtcatcttgaggctgactgccacattgattaaatctgttaggatctataatcttcagcagtggttttaagtagagcatactaaagcaatagtagtgtgcaggattttgatgccatctccgctgaaggaaataatacaatctgctatctttagaattgcagtatggcatgggctggttgtggtggctcacacctgtaatctagcacttagggaggcagaggtgggaggatcacttgaggctaggagtgtgagaccagcctgggcaacatggcaaaaccctgtctctaaaaaaaatacaaaaattagcaaagggaggtggtgcctacctgtagtcccagctactctggaggctgaggtgggaggatcacttgagcctgggagttggaggttgcagtgagcagagatctcgccactgctctccagactgggtgacagagccagaccctgtctcaaaataataataataataataataataataataataataataatagaatgaaaagagaggggtggtagtggaagggaactgaaaagtgcatgataaattatgtaaggaagcattaggctttggtcagaaatgttgttagccagctgcaagtgaacccatctggcacactttttcattattcttctgaaatattcatggactcttaacagttcctaccttgtttgcactagatcctcacatactcttaccttctggcagccagwctatrgttgcagtgggttgctcttgttttgtttcttgttgctgaggatgtaatcaataaagagtagatactcaaggtaaagtttatggatactcaaattcacttacaaataatggctaatcactacattttattatgctttaatgtgtatatatataatattttatctctgaattatgaatctattctagtcattaaatagtaacattcattttcttttcttttttgagctggagacttgctctgttgcccaggctggagtgcagtggtgtgattctggctcattgcaacttctgcccctctgggcttaagcagttctcctgcctcagcctccctagtagctgggattacaggcatgcactaccatgctcagctaatttttatatttttggtagagatggtgtttcaccacattggccaggctggtcttgaactcctgacttcaagtgatccactcacctcagcctcccaaagtgctgggattacaaggatgagccaccacaaccggcccactttcattaaagaagttttttttwaatttagagagcatatgattaaaagttgacttaaatttttttatttgcaaaaggcatttgcatgtttcttattggtttccaagagatctcttgaaatcatttaggaagtagatgaagagagacagtaaataatccttttatttttaaaaattaaattatcttcagatcattgatagtaggtttatctaggattcaaaaatgtttctgaaaattggtcttacaaactcaaagttcgtaagactgctttttgcactgaatagtaacttgagttcacttaggtgttcctgcttctgttttaggaagaaactttgctgctttgtctttacaattaaagtatgatcttcttacattaactctctgctttacacaggaatggaatcctcagtttttgtttttgtttttacccccaaaggaggttagcagttggagttcattaaaaaatgctgagattttacctagttgagtgatagatttagattttagaaagagtaggatcagtctttccattttttgtagattaacactgtgatggcggtgttgaaaaaggtgggctgtttgtgttataaatttgtatgatacggattttcatgtttaagtccagtcttcctttggcttctcttcttttagctttgactccattgtctgctttggctttgcaaggtgaaaaaacatggccccagggtcagtgcttcccagaaacctagctgactttgatggtcagtagaactcatttgccaccttttaaacaaaaagtttgtagactttgcaggctctccatctgtctcaccaagctaggtgcagttattgtgcagaaagtttgcttaggggcagaggaagccttatctacgtaagtatttagaatttgttaaaaaaaawaaaaaaggaaaaaggaaagcagtttatagatgaatacttaaatagtttcattttgtacaagtcacctggttttgttcccatgtgtkaggaagaaatgagttggacagaattagaagtcttgtcactgaagtaattaaagttattacagagcagcttttttagattagaaaggaagaagctagaaattagtcattggttgctttcattatctattatttgctttcattttatttttcttacaaaactgctatcattacacagatcgtatacaactacaagccttttattttattttattttatttcatttttttttttaaagacagagtttcgcctttgttgcccaggctggcgcgcaatggtgcgatctcggctcaccgcaacctccacctcccgggttcaactgattctcctgccttagcctccctacctggtagctggaattataggtgcccgccaccacgcccagctaattttgtatttgtattagagatggggtttctccatgttggtcaggatggtcttggaactcctgatctcaggtgatccgcctgcctcggcctcccaacgtgctgggattataggcatgagctgctgcgcccggcccatttattttaatttaaatttatcctttagaaagcaattctgtagtatgaaatgtgtgtactctttacctgtgggtacataaattgccatttttatttattggacttttgggtrgtaatgaggtagggctggccagatagtattaatatgatttctaagcatgtctttctgacttctagacttgaagctacttgagggaaacagtttagcataatagtttatcatctctaaaatagggaagtatttaatttataatggtggctaagttgatgaatgagataatgtacagagtctggggtatatgggaagtacccaattaatgtaacctgttatttatttatatttgtagtccttcagcatctactacagtgcttgcacttaatagatgctcactgcaactttgttgaatgaatgatgtggcttaaacttacggagaaagttccagaatatatagccattgtcagcatgattgatgaatctattacaaagggaaaaaatgctcatgtgtttgatatttatacctcattttgactgtagttactacactcttaatgccatactagctcctgtcacaggcctgacaaatagtaggcgctcaatgtatgtttgaataaattattgattttttgttcttcctggaaawggcaatgttttctatttgtcactttatgttatgctaaacaggtttgagttttaggagtcctctttactataaattgaggtggttagatgttggctaatcaggtttcaaaatatgtatatatatattttaaacgtaagcatcaagtctcaagtaagccccttttcctagagatgaactgttgcaggcatgtggagcataaattgttgttgttgttattattattatttgagacagggtctcactatgttgcccagactgttcttgaacttccgggctcaggtgatccttcctcctcagcctctcaagtagctggaattataggtgtgtgccaccacgcttggcttaggaaattattgtgaaatgtatttgtgtatgctatgcttgagctgggatatattttcttgctgtttctcttttgcgatatgtggataaggaaatgctttgctgtgctttaaattgcgggctttgcccccttgagatgcgtacatgagtatggtgcagctgtgtatctgtgactcggacagatcctgagtatagatcctttttggtaactgatctcctcttttcttcatcccttacatacggagttctctttttaaatccctgaacataactgggatcttgacaaaggttccagcaaatctcctattctattttctcgtaagaatactccctctgatcttagtactttcttccacggtctctgctaggtgaaatgagctcactaagcatagtttactctctctttttggtagtaaaggagctggttgcaatattaaacaaggtgttcagggtagccctcactgagaggtgatctttgaacaaagacttaagaaagtaagggagttagccaagtagatatttgggaaaagtatcccaaagtaaacatcaagcggtcacctggtgagttcgagtaaccctaaagagtctggaggagtgaacaagaggaatgaataatagaaggggaagccacaggaggccccatcatgaagggccttatgttgttgaaaggactttggtttttactctaagagaatggggggagccattgcctgatttgaacagggtagagagacctctgacttagttttaaaaggatcatcctggcagctrgctgtattaagactaaattgtgtgtgtgtatgcagggaggttcaagggtagaagcaggaagatctgttgggaagcctgcagtaatttaagtaagggatgatggtggtggctcaggccacatagtagcagtggagatagtgagatgtagtcaatttctggacatatttggaagattgaaacaataggattttgttatcaaaaggcggggtgtgagagaaaggggatgaatcaaagatgactctaaaggttttaaacttcagtaagttgaagaaaaatggaattaccatcaacttaactggagaataccatagtatgggttgcataggttggaggagggttggcacagctcaggaatccatttttggacattctgagtttgagacacctgtaagatattctggtcaagtaggcagttagacgtatgagtctggagttaagagagaagactgagctggaattatacattatggaggcaaaatatttaaatccttgagtttagataagatcaccaagggagagaatgtggatagagaagaggaagagggccaaggatagttcatggatgttctaacagtaagattggatcagtaagcacatttacaacattttaggggaaaaattactaagtattttttgaatatatggagaatagaacagtaaagaaggaaggcagcagcagcactaagagtatctcttttttcttcccttttttccttccgttgtaaaattcctaaaaaatttccatgtggtaatagactcaaggtcagagtgaacacacagctaacscttttcttggtggattaatgccttgattctatttctttcactgttgtttttcttttttcttttatttcttctttcactattttattgaaattcttaaatccatgattaaacttcaagtgtataattgctaaacagatattaataagtgctgtcagattcttacatttccattacactttaattaagctaaacagtataggcaaaacwttcctaatgttaataaaaattaaagatgtaaattctgaaaatcatcagcggttgaacataataggattttaacatttttcttgtgtttttactctttgtctggagataactccaaaatatttgtgtttcagctactttacatgcttaagcagtacatggtaatgaatgataaatacctggtctagttgatggaacatccttgccaatactttgaattagattaactaattctggactataatatggcataggagacagtgtcctcttttattcttttattctgtgtttccagttttgtaagcttgtctttgagtttgatttgttgaggaaaaataacttagggagggtagcttaatttgccatgagttcatcgtttcctccactaatgtgaaggtttaactaaaatagaccgaagactgactgtttttccctactctcccatgagaattttctatcagtacgaggatggtagaaagtttacttttcatttttcatctggggttagaacttatgttccaagtgacatatttaccagtgaattaaggtgtatttgattatatgatctatatttgaagggacaagtatattttctttctttcagctgtttttcttttcgtattacaaaaaggtaatgcttccaggtgctgaatagatgatagtcaagagtcttcagtcattcctagagaggagatgaaatggtgttagttgcatttgttagtaaaaatcatttatctggctatattcctgaagaaccacagaatttcaaatgctaaaataaactttcatttgctaaatggatgcatagttaatgcttagtcatgagattgattcatgtttgggttctactactgaaattaagccagtcctttaggaggaggcaagcaaaggggagttgattcagtgttgtgtaaagtgttatccatcagtatgagtatttttcatgttttattcatgagtaatagattcaaagaagttttaataaagtgcccaattttatttgcataggtcagaataaactttgtaaataagtttgtgatacctgggtacaaactaaaaggctaggaatgaagttatttgggtcttatgcctaaagtttaggagttccaggaaaatttttctgttaagccctggaggtctacatgtttctgtagatcaaagaggtgagaaccatttctcttattgtgctgttcttgtagttgcactgtaataatctttcatggaacaactgagaactcatgtcattgtggagagtcaccagtgcaattgcctcttgctccaagcccaggaaaaagaaaacaagggggttggggggtgggttctgattcatatatgtataaggaaattaagaacaccatctatgaggaattgctgaaaagaacaataaaactgtctggtctttgatacacgtctacattattttagaaagggctcagtgtctgagtatctctagcgctgttatcaaggtagtgaactcctaagactagtctatgcgattgcttttgtttggggtttttagacttttttttctaagagacgggatctcttttgcccaggctttagtgcagtggtgagatcatagctcaccggagcttcaaactcctgggcttaaccagtcctctcgcctcagcctccaaaatagctgggactactaccatgcctggctgaagggttgggagacttcagagcagcttcttgcctgcattggttttgatgtggctaaagtggtgagcatttctgtgtctttttttttttttttttttttttgccaccacagctccccagtttctctggttttaataggttgtatattgttcccacstttcagccctttctttttctctcttctccttttccctactctctaaaatacctaaagggtagtagtcagataggttattttttttcaattgctaaacttcctattcaccttatgccttgaatttgtacgtttactttttgcctttaaaaacaaagttcgagatcagcctgggtgacatggtgaaaccctgtttctacaacaaatacaaaaattagcctagtgtgctggtgcatacctgtaatcccagctacttgggaggctgaggtgggaggaggatcagttgagcccaggaggttgaggctgcagggagccatgagcatgccactgcactccagcctgggtgacagagcgagaccctgtcttaaaagaaaaaagaaaaaaatgaatatgaatataactatatttttaaattctgatatgcattttatagaaaatttaagcaatacaggaaaatgtaaagaaagtaaaaatgaacagcamctcaactgtttagagataactactaatacatttagtagccattatgtctctctactctctatgcctgtataattaactttaatatatattgtttgattttaatatttgtatttaatgtcttactaatcatatgtagtaaaatcattatggatgctgtcttaacctgtttaaacccaatgatatattgtggagataattccattttatatctacattatctagaataccatgtactttacacccttatttacaggtatatccttatttacagattctcttactatagattctgaggttgttttgatttttttgttattttaagcagcattgaggagaacctcctagtgggaaaatctttgcacacatttttaatgattccttcaagtcacatttctaaggaaactgctgggtcaagaggcatgcatatttcttttttttaatcatattgccaatttactcatctgctagtattcttgaaggaatataaacagttcggcagtatttttacacttcagtgtgtattttgttaagaaaacagacctgactgaaagacctagaatcactttattctgtaaacaataggtttcttttcttgttttctatttttattttttatttaaagtagaatagagatagggtcttgctatgttgcccaggctggtcttgaactcctgacctcaagcctagcaaacagtagttttcttaatattgttctgcaaagcctctgaaattcccagatgtcataaagttctcttttgaaaattaagaatggccttttagctgggcatggtggctcacrcctgtaatcccagcactttgggaggccgaggcaagtgaatcagctgaggtcgggagttcaagaccagcctgaccaacaatgtgaaaccctatctctactaaaaatacaaaaattagctgggcatggtggcaggtgcctggagtcccagctacttgggaggctgagacagaactgtttgaacccaggaggcggaggttgcagtgagccgaggtcatgctgctccactccagyctgggtgacagagtgagactgcatcttaaaaaaagaaaaaaaaggggggaggagccaagatggccaaataggaacagctccrgtctacagctcccattgtgagcaacgcagaagacgggtgatttctgtatttccaactgaggtaccgggttcatctcactggggagtgccagacagtaggtgcaggacagtgggtgcagcgcaccacrcgcaagccgaagcagggcgaggcatcacctcacccgggaagcgcaaggggtcagggaattccctttcctagtcaaagaaagcagtgacagagggcacctggaaaatcggctcactcccaccctaatattgtgcttttccaacgggcttaaaaaatggcacaccaggagattatatcccgcacctggctcggagggtcctactcccagggagtctcgctcattgctagcatagcagtccgagatcaaactgcaaggtggcagtgaggctgggggaggggcacctgtcattgccaagttagttgtttgattaggtaaacaaagcggccaggaagctcgaactgggtggagcccaccacagctcaaggaggcctgcctgcatctgtaggcgccacctctgggggcagggcacagacaaaaagacagcagtaacctctrcagacttaaatgtccctctctgacagctttgaagagagtagtggttctcccagcatgcagcttgagatctgagaacgggcagactgcctcctcaagtgggtccctgacccccgagtagcctaactgggaggcaccccccagtaggggtggactgacacctcacayggccaggtactcctctgagacaaaacttccagaagaacgatcaggcagcagcatctgyggttcaccaatatccgctgttctgcagccactgctgctgatacccaggcaaacagggtctggagtggacctccagcaaactccaacagacctgcagctgagggtcctgtctgtwagaaggaaaactagcaaacagaaaggacatccacaccaaaaacccatctgtacgtcaccatcatcaaagtccaaaggtagataaaaccacaaagatgggaaaaaaacagcasaaaaactggaaactctaaaaatcagagtgcctctcctcctccaaaggaacgcagctcctcaccagcaacggaacaaagctggacaaagaatgactgacgagttgagagaagaaggcttcagatgatcaaactactctgagctacaggaggaagttcaaaccaatggcaaagaagttaaaagctttgaaaaaaaattagatgaatggataactagaataaccaatgcagagaagtccttaaaggacctgatggagctgaaaaccaaggcacgagagctacgtgacgaatgcagaagcctcagtagccratgtgatcaactggcagaaagggtatcagtgatggaagacgaaatgaatgaagtgaagcgagaagagaagtttagagcaaaaagaataaaaagaagtgaacaaarcctccaagaaatatgggactatgtgaaaagaccaaatctacatctgattggtgtacstgaaagtgacggggagaatggaaccaagttggaaaacactctgcaggatataggaaaacttccccaatctagcaaggcaggccaacattcaaattcaggaaatacagaggacgcgacaaagatactcctcgagagagcaactccaagacacataattgtcagattcaccaaagttgaaatgaaggaaaaaatgttaagggcagccagagagaaaggtcgggttacccacaaagggaagcccatcagactaacagcrgatctcttggcagaaattctacaagccagaagagagtgggggccaatattcaacattcttaaagaaaagaattttcaacccagaatatcatatccagccaaactaagcttcataagtgaaggagaaataaaatactttacagacaagtaaatgctgagagattttgtcaccaccaggcctgccctaaaagagctcctgaaggaagcactaaacatggaaaggaacaaccggtaccagccactgcaaaaacatgccaaattgtaaagaccatcaaggctaggaagaaactgcatcaactaacaagcaaaataaccatctaacatcataatgacaggatcaaattcacacataacaatattaactttaaatgtaaatgggctaaatgctccaattaaaagacacagactggcaaattggataaagagtcaagacccatcagtgtgctgtattcaggaaacccatctcacgtgcagagacatacataggctcaaaataaagggatggaggaagatctaccaagcaaatggaaaacaaaaaaaggcaggggttgcaatcctagtctctgataaaacaaactttaaaccaacaaagatcaaaagagacaaagaaggccattacataatggtaaagggatcaattcaacaagaagagttaactatcctaaatatatatgcacccaatacaggagcacccagattcataaagcaagtccttagtgacctacaaagtgacttagactcccacacaataataatgggagactttaacaccycactgtcaacattagacagatcaatgacacagaaagttaacaaggatacccaggaattgaactcagctctgcaccaagtggacctaatagacatctacagaactctccaccccaaatcaacagaatatacattctttgcagcaccacaccacacctactccaaaattgactacatagttggaagtaaagcactcctcaacaaatgtaaaagaacagaaattataacaaactgtctctcagaccacagtgcaatcaaactaggactcaggattaagagactcactcaaaaacactcaactacatggaaactgaacaacctgctcctgaatgactactgggtaaataatgaaatgaaggcagaaataaagatgttccttgaaaccaaggagaacaaagacacaacataccagaatctctgggacacattcaaagcagtgtgtacagggaaatttatagcactaaatgtccacaagagaaagcaggaaagatctaaaattgacaccctaacrtcacaattaaaagaactagaaaagcaagagcaaacacattcaaaagctagcagaaggcaagaaataactaagatcagagcagaactggaggaaatagagaccaaaaaaacccttcaaaaaattaatgaatccaggacctggttttttgaaaagatcaacaaaattgacagaccgctagcaagactagtaaagaagaaaagaagaatcaaataggcgcaataaaaaatgataaaggggatatcaccaccgatcccacagaaatacaaactaccatcagagatactataaacacctctacgcaaataaactagaaaatctagaagaaacggataaattccttgacacatacatcctcccaagactaaaccaggaagaagttgaatctctgaatagaccaataacaggctctgaaattgaggcaataatcaatagcttactaaccaaaaaaagtccaggaccagatggattcacagccaaattctaccagaggtaggtacaaggaggagctggtaccattccttctgaaactattccaatcagtagaaaaagagggtatcctccctaactctttttatgaggccagcatcatcctgataccaaagcctggcagagacacaaccaaaaaaagagaattttagaccaatatccttgatgaacatcgatgcaaaaatcctcaataaaatactggcaaaccaaatccagcagcacgtcaaaaagcttatccactatgatcaagtgggcttcatccctgggatgcaaggctggttcaacatacacaaatcaataaatgtaatccaacataaacagaaccaaagacaaaaaccacatgattatctcaatagatgcagaaaaggcctttgacaaaattcagcagcccttcatgccaaaaactctctataaattaggtgttgatgggacgtatctcaaaataataagagctatctatgacaacccacagccaatatcatactgaatgggcaaaaactggaagcattccctttgaaaacaggcacaagacagggatgccctctctcacgactcctattcaacatagtgttggaagttctggccagggcaatcaggcaggagaaggaaataaagggtattcaattaggaaaagaggaagtcaaattgtccctgtttgcagacaacatgattgtctatctagaaaaccccatcrtctcagcccaaaatctccttaagctgataagcaacttcagcaaagtctcaggatacaaaatcgatgtgcaaaaatcacaagcattcttttacaccaataacagacaaacagaaagccaaatcatgagtgaactcccattcacaattgcttcaaagagaataaaatacctaggaatccaacttacaagggatgtgaagggcctcttcaaggagaactacaaaccactgctcaatgaaataaaagaagatacaaacaaatggaagaacattccatgctcatgggtaggaagaatcaatatcgtgaaaatggccatactgcccaaggtaatttatagattcaatgccatccccatcaagcaaccaatgactttcttcacagaattggaaaaaactactttaaagtttatatggaaccagaaaaagagcctgcatcgccgagtcaatcctaagccaaaagaacaaagctggaggcatcacgctacctgacttcaaactatactacaaggctacagtaaccaaagcagcatggtacgggtaccaaaacagagatatagatcaatggaacagagcagagccctcagaaataatgccgcatatctacaactatctgatctttgacaaacctgagaaaaacaagcaatggggaaaggattccctatttaataaatggtgctgggaaaactggctagccatatgtggaaagctgaaactggatcccttccttacaccttttacaaaaattaattcaagatggattaaagacttaaatgttagacctaaaaccataaaaaccctagaagaaaacctaggcaataccattcaggacataggcatgggcaaggacttcatgtctaaaacaccaaaagcaatggcaacaaaagccaaaattgacaaatgggatctaatgaaactaaagagcttctgtacagcaaaagaaactaccatcagagtgaacaggcaacctacaaaatgggagaaaatttttgcaacctactcatctgacaaagggctaatatccagaatctacaatgaactcaaacaaatttacaagaaaaaaacaaccccatcaacaagtgggcgaaggatatgaacagacacttctcaaaagaagacatttatgcagccaaaaaaacacatgaaaaaatgctcatcatcactggccatcagagaaatgcaaatcaaaaccrcaatgagataccatctcacaccagttggaatggcratcattaaaaagtcaggaaacaacaggtgctggagaggatgtggagaaataggaacacttttacactgttcttgggactgtaaactagttcaaccattgtggaagtcagtgtggcaattcctcagggatctagaactagaaataccatttgacccagmcatcccattactggstrtatacccaaaggattataaatcatgctgctataaagacacatgcacacgtatgtttatagtggcactattcacaatagcaaagacttggaaccaacctaaatgtccaagaacgatagactgtattaagaaaatgtggcacatatacaccatggaatactatgcagccataaaaaatgatgagttcatgtcctttgtagggacatggatgaaactggaaaccatcattctcagcaaactattgcaaggaccaaaaaccaaacaccacatgttctcactcataggtgggaattgaacartgagaacacatggacacaggaaggggaacatcacacactggggactgttgtggggtggggggaggggggagggatagcattaggagatatacctaatgctaaatgatgagttaatgggtgcagcacaccagcatggcacatgtatacatatgtaagaaacttgcacattgtgcacatgtaccctaaaacttaaagtataataataataaaatttaaaaaaaaaagaaaaaaagaatggccttttatgattcctcagagatctagaaccagaaataccatttgacccaacaatcccattactgggtatatacccaaaggaatataaatcatcctgttacaaagatgcatgcatgcgtatgttcaytgaagcactatctgcagtagcaaagacgtggaatcaacccaaatgcccatcaatgatagactgggacctgggagccattatcctcagcaaactaacacaggagcagaaaaccaaacactgcatattctcacttacaaatgggaggtgaatagtgagaacacatggacacagggaggggaacaacacacactggggtctgttggaggttgggatgggggaagagagcattaggaaaaatatatttagtgcatactgggcttaatacctaggtgatgggttgataggtgcagcaaaccaccatggcacacatttacctgtgtaacaaacctgcatatcctgcacctgtaccctggaacttaaaataaaaataaaaattaaaaaaaatagtcacattaaaaaaaaagaatggccttttatggaaacccataggacccaagaaagtaataattttctaaagaatagaaaattagagccatatagatagcgtaattaaaataataatatttgtttcagaataattttaaaaattgtaaccttaagttttatgcacattttttaaaaaatcaggattccttttcttagaattaaggaaaaagtcagtgccgttttacgataacaagaagacttggttatcattgctgataggggcagatgctacattttatctctcatttctaaactttcttactaaagtcagaatttaaaaatgaacttggccaggcatggtggctcatgcctgtaatcccagcacttygggaggtccactcggaaggatcacctgargycaggarttcagaaacagcgtgtacaacaaagcgagacttcgtgtctctaaaaaaatttttaaagaattagccagrtatagtggcaggtgcctgtaccccgagctacccaggaggctaaggcaggaggatcacttgagctcaggggttcaaggctgctgtgagctatgatcgtaccactgcaccccagcctgggttgacaaagcaagacccagtctctaaaggaaaaaaaacccttggctttcagtagtactctgtttattgatgttatgccaaaaggaaccagttttcagctgtacccaataatatattctctgcatatggggactgtagttctgaccttagaaaaatacatagccattaattaattaaattggtctccttgaaagcacacttgttgaaaggtctgtccttttacccaaaggaggaagaggtttgattaatttacagattctgctctggtgtataacacaacatttgagaaaatgtcaggttctcatgagttgaaaattatacaggaaatttatttatttattgttgtttgacaaaacgagtatgatctaaacatttatttgtttattgaactaggttcaggagtccaagaggtcttgtgatgtagtcaagtttttaaagtggcagtatgtcttgccaggaaaagaacctggtcttagatactgtgggttctgcttctggtgagagagtcgcttaaattcttttttttttcttcttcttttttttttgttttttgagacagatgttgcctaagctgctgtgcagtagagcgatcacagctcackgcagccttgacctcctgggctcaggtgatcctatacctcagctttccgaatagctggggctataggtatatgccaccatgtctggctaatttttaaaactttttttgtagaggtggggtttcactttgttgcccaggctggtcttgaacttctgcgctcaagtgatcctcctgcctcggcctcccaaagcactgggattacaaatgtgtcccactgtgcctggctggattctaatgtgaactatattagatgttaagtttaatattttaatatttttaatatcttacgttttaagcgaaagaagacaaatgcctttaaaactttttagaggctgggtgcggtggctcacaccttcagtcccagcactttgggaagccgaggttggtggatcacctgaggtcaggagtttgagaccagcctggccaacatggtgaaaccctgcctctactaaaaatacaaaaaagtaaccaggcttggtggcaggtgcctgtaatcccagctacttgggaggctgaggcaggagaattgcttgaacccggtggtagaggttgcagtgaaccaagatcgcaccattgcactccagcctgggcaaccagagcaaaactccgtctcaaaaaacaaaacaaactttttagtttgaggccgggtgcagtggtttacgcctgtaatcccagcattttgggaggtggggcgagtggatcacgaggtcagaatttcaagaccagcctgaccaatatgatgaaaccccatctctactaaaaatacaaaaattagccagcttggtggcatgtgtctgtagttccagctactcaggaggctgaggcaggagaatcgcttgaacccaggaggcagaggttgcagtgagccaagattgtgccactgcactccagcctgggtgaccgagactctgtctcaaaaacaaaacaaaaaactttttagtttgctagccggaaattttcatctaatcatgtctaagatttcttttaaaatacttcaatgcctgctccctgtcttaaaaagttgggaggggagtagataaaacaagaatagtaaactattgataattattgaagctgggtagtgagtacatgggagttcattatacttttccctttttctctggccttagatatatgtttaacaatgtgtatgtaaaaaaaagaaaagtaacacaacaataagtgcaaatctgctgagattgcacacaggcacaggttcctcagtgttaacttgtctgataggaagcaacatggcagtgacctcagagaaactctagaggaaaaaagcgtaatggctaatgaagcatatttgctggaaagagagaaaaactcagaactgtcattccccatgtgtgactctttgtttctgttaaacatagcagatatgtctgtgccaattaaacttgaatgttagtatgatatttttagaaattcatgttgcggactgtaaactcaaaataaattttggttgcggttgtcgaatgtatcaaacaaatattaccatatttttatagaacaaggaaacttagtatacagaaagtacacttccaacaaatgtttttcactcctccctgggtcttttagatgtggggttataatgttgcttttaaatgcagaataattttatactcttggaaataaaaattktttgagatggagtctcgctctgtctcccaggctggagtgcagtggcgtgatctcggctcactacaacatctgcctcctggttcaagcgattctcctgcctcagcctcctgaggagctgggattacaggcgcgtaccaccatgcctggctaatttttgtatttttagtagagatgtggtttcaccatgttggtcaggctggtctcgaactcctgacctcaagtgatccactcaccttagccttccagagtgctgggattacaggtgtgagccaccgcacctggccaaaataaaaactttattcccactaaatatgtattactcagggaggagttgraaagaaatataatggagaaagaatttaagagagctttgttttggtaaagatttggggaaatgttcagaaaatggttatagaacgacaccgtgcttaataaataacattttgaaatgggaaaaacaaatatgctgtaacataaagccaacttacctagatttgttattatatgggtcatatatatagcatatatatatagtttctaatttgagaaagaatttttaaaatcacagaaaatgcctggttattaaaactagaaagcaaagaaaaaataacttgaaagtacaaacactagccatacagtgttaatatttcactgtatttcctttccatttttaaagcttttgtgtagattttcttgttaccttacatattcccccacttttttttttttttttttttttttttttttttggagacagtgtcttactctctcacccatactggagtgcagtgttgtgatcctgactcactgcaacctctacctcgagtgatcctcccacctcagcctcttgagtagctggaactacaggcatgtactaccatacctggctaatgtttgttttattttgttttgtagacatgggtttcactgtgttgcccaggctggtgtcaaactcttgggctcaagccatccacctggcttagcctcccaaagtgctgggattacaggtgtgagccaccgcgcctggcccatatatccttttatcctgatttttcactaaacatttgaaatatgtacttttcattattatatatccttttcattactacatacattttagaggctgtataatattacattytgggtatgccttaatttgcttaacattcttttgtcatttataatttttcactgttaaaaccatgctgtcaaataccacatgttcacatttgtaagtggaagctaaacattgggtactcatagacataaagatggcaacaacagaaactggggactattagatggaggagaaaggaaggaggggaatggttgaaaaacgggtattatattcaatacttgggtgacgtgggaacatttgtaccccaaacctcagcattatacaatatacccaaatagcaaacctgcacctgtaccccctgtatctaaaataaaagttggaaaaagaaataaaaatagataaataggaaaggaaatgaaaaaacatgctgctaacatcatctttttgtacgtgaattttttagtttttttggattctttttcacaggataaaatcccaaggatgtaggctctggctctgataaggactttttagtttattatgaatggactgagaagcttctgtgtgtctgtggtgggggcgattgtctaaaaactgattccccttccctttgtttttatgcttttgattttttcaagaaactaggttattttccctgtagaatgtcccatattttggattctttgtttattgtctatttcttggtggttaacttgttgctctatctcctggatttcttaagaactttcctctaaagtcttaattagattcaggttcaacattctttgggggaaagaataaatattttattagtggttttatatagttcatagtgcatcctatcaggagggcataatgtctgattgtctcaagctgtagatattttcattagtttattcttgcctttccacttttggtggtgttccttttgatgcacaggagatttaaattttttttgtagttgaattaatattttcctttttatttcattgtaatttcagtttcactctattcatattcatagatttgatagttattggctgggcatggtggttcacacttctaatcccaacactttgggagactgaggtgggaggatcacttgagcccaggacctcgagaccagcctgggcaatacagggagaccccgtctctacaaataaaataataaaaattagctggatgtggaggcacatgccagcaattccatctgcttggaaggctgaggcaggaggattgcttgagccctggaggttgaggctacagtgagctgygcttgtgccactgcactgcagcatgggtgacagagtgaaaccctgtctcaaaaataaaaattaaaattaaaaatgtgacattgataatatcttctaaaatattttttatgaattaacttttaaaatgtattttaatgtgtattaaagttacttattacatatttaattaattcattcattaattttgagatggagtctcactctgttgcccaggctggagtgcagtggtacaatctcagctcactgcaacttctgcctctcaggttcaagcgattcttgtgcctcagcctcctgaatagctgggaatacaggcttgtgccaccatgcctgactagtttttgtatttttagtagagacaggttttcaccatgttggccaggctggtctcaaactcctgacctcaagtgatctggctggcctcccaaagtgctggaattacaggcgtgagccattgtgccggccatatttagtaaatttaaatcactttttatatgttgtttgtatcttatggatagagagtagatagagatgtgatatacttggaatttattttgctgtagggtaaggatctgagtagattatttttcaaaaaccagccacatgttccagtctgtgtttattgaataaacattccctttctgttttctaattttccttttattacrtgctaagtaattacatatactagtgtctgtgggctttctctttttttcctagcaacttgtttrtatgctgctatacttttgatgattgtcataacgttataagagaatttctaataggactaacctttttctaatttctcaccttttttcaaaatggtagcacagtatgtttgatcttaaacttccgtaacagcctagtgggtttttttccagataaaattttataagtcacttaccttataaaaactttgaaaaggtatctatgctgacaagcaaggagcataaattacttttataaaaagtcagatcttagtagcaggtactgtcaaagaagcaagctaatgacttggagtgtaaggagtgataccacacacatcatcttactcctaacattttctgttacaaaacatatggaaactctacgtagcagttttgcatctttatgaaccatttggtatgaaatctctcttgttttttgagacaaagtctcactttgtcaccaaagctggagtgcagtggcccggtcaacgctcactgtagcctcaacctcctggagtcaagggatcctcctgccttagcctactgagcctcccaggtagttgggactacaggcatgggctaccatgcctggctagtttttgtattttttgtagagatttaagtgttgtctaccaaaaaaaccttttttgtktcactacaacatttttttcagtaccatttacttatttgagacagggtctggctctgtcgcccaggctggagtaatggtggcacagtcttggctccctgcaacttccacctcccaggctcaagccaccctccacctcagcttcctgagttgctgggactgcagttgcatgccaccacactgaggtaatttttatattttttcatagagatggggttttgctatgttgctcatgctggtctcaaactcctgggctcaaagaatccacccgttttggcctcccaaagtgttgggattacaggcatgagccaccgtgccctacccatttttaaaaaattttaatttttgtggatacatagcagatgtatatatttatgggttacatgagatatttttytacatgcattcaatgcataataatcccatcatggaagatgaggtatccatcccctcaagcatttatcatttgtgttacaaacaatccagttatactcttaattattttaaaatgtacaattacattatttttttcctatagtcaccctgttgtgctagcaaatactaggtcttattcattctgtttttttgtgcccattaaccattcccactttcccccatcctaccttctacccttctcagcctctggtaactatccttctactttctatgttcatgagttcaattgttttaattttttttttttttttttgagacggagtctcgctctgttgcccaggctggagtgcagtggtgcgatctcggctcactgcaacctccacctcccaggttcaagtgattctcctgcctcagcctcctgagtagctgggactacaagtgcccaccaccacgcccagctaatttttttgtatttttagtagagacagggtttcaccgtattggccagactggtcttgaactcctgaccttgtgatctgcccgttttggcctcccaaagtgctgggattacaggcgtgagccaatgtgcctgaccagttgttttaatttttagctcccacaaataagtgaaaacatgtgaagtttgtctttctgtgtctggcttatttcacttaacataatgacttccagttcaatccacggtgttgcagacaacaggatctcattctttttatggctkaatagtgctccattatgtataagtaccacattttctttatccattcatctgttgatggacacttaggttgcttccaaatcttagctattgtgaatagtgctgtaataaacgtggaagtgcagatatcgcttcgatatactgatttcctttattttgggtatatacctaggagtgggatcactggatcatatggtagctctatttttagttttttgaggaacctccaaactgttctccatagtggttgtactaatttacattcccaccagctgtctacaagggttcccctttctccacatccttgccagcatttattattgcctgtctttgtataaaagccattttaactgggatgagattatatctcattgtagttttgatttgcattcctctgatagtgatgttgagcagcttttcgtatacctgtttgccatttgtatgtcttttgagaaatgtctattcagatattttgcccatttttgattggatgattagattttttttcctgtagagttgcatgagcttccttatgtattttggatattaatcccttgccagatgggtagtttcaaaatattttctcccattctttgggttgtctcttgttgatagtttcctttgctgtgcagaaggrttttaacttgatgtgatcccatttgtccatttttgctttggttgcctgtgcttgtggggtattactcaagaaatccttgcccactccagtgttctggagaggttccccaatgttttcttttagtagtttcatagtttgaggtcttaaatttaagtttttaacccattttcatttgatttttttttttatatggtaagagatacggggtcaaccttcattcttctgcgtaaagatatccagttttcccagcaccattgactgaagagactgtcctttctccattgtatgttctcggcacctttgtctaaagtgagttcactgtaaatgtgtggatttatttctgcattcyttattagactgtttcactggtctaatgtgtctgtttttatgccagtatcatcctgttttggttactctaactgtagtataatttgaagtcaggtaataaaattcctcgttttgtttttttcctcaggatagctttggctattctgggtcttttgtggttccatgtaaattttaggtttgtttttttctcttcttttcttttttttttggtgggggggttggggggcgggacagagtctgactgygtcgcccaggctggagtgcagtggcacagtcttggctcactacaayctctgcctcccaggttcaagcgattctsgtgcctcagcctcctgagtagctaggattacaggtagtcgccacctcacctggctaatttttgtatttttagtagagacgatgtcttaccatgttggccaggctggtctggaactcttggcctcaagtgatctgcccaccttggcctcccaaagcactgggattgcaggcatgaggcatcacgcctggcctagaattgttttttctacttttgtgaagaacattattggtatttttataggyattgcatgaaatctgtagattgctttggggagaatgggcattttaacaatattgagtyttccaacccatgaatatggaatgtctttccagttttttgtgtccttttcaatttcttgctccagtgttttagttttcattgtagggacttttcacttatytggttagttcctaggtatttaattttatttgtagttattgtaaatgggattactttmttgatttcttttttagattgtttgctattggcctatagaaatgctagatttttgtaggttgattttgtatcctgcagctttactgattttgtataagttctaatagttttttggtggagtctttaggtttttccaaatacgagatcatatcatctgcaaacaaggataacttgactccttcctttccaatttggataccctttatatctttctcttgtctgattgctctagctaggacttctagtaccgtgttgaataacagtggtgaaagtggatatccttgttgtattccagatctcagaggaaaggtttttttttttcctcatcrgtatgatactagctgagartctgtcatatatgstgtaattatattaagatatgtttcttctataccaagtttttttaaggtttttattatgaagggatgttgaatgttatcaagtgctttttaagcatccattgaaatgatcatatggtttttgttcttcattttgttgatatgatgatatatcagattgattgatttgcayatgttgaacyatccttgcrtccctgggataaatcctatttagtcatgatgaatgatctttttaatgtgttgttgaatttggtttgctagtattttgttgaggatttttgcatcaattttcatcagtgatattggtctgtaattttttttcttttaatatgtaatatgtctttgattttggtatacaggcctcatagagtgagtttggaattattccctcctcctctagttttcagaatagtttgagtaggattggtattcgttctttaaatgtttggtagacttctgtagtgaagccatcaggtcccaggcttttctttactgggagattttttattatggctttgatgttgttgcttgttattggtttgttcaggttttggatttcttcatggttcaatcatggtaggttgtagtatctaggaatttatccattttctctagattttctcatttattggcatatagttgatcatagcagccactaatgatcctttgaatttctgtggtatcagttgaatgtktccttctttatctctggttttacttagttgtgtcttctctttttcttagtctgtctagcagtttgtcaattttttttttcaaaaaaaaaaaaaccttttgttycattgaagttttgtattttttttgtttcagtttcacttatttctgctctgatctttattttttgttttgttttgtattttgagatgaaatctcactctgttgcccaccctggagtgcagtggcacaatctcggctcactacaacctccacctcccaggttcaagctatcctcctgcctcagcctcccgagtaactgagattacaggtgcacaccaccatgcccggctaatttttttgtatttttagtagagatggggtttcaccaagttgtccaggcttgtcttgaactcctgacatcaagtgatccacctgtctcagcctcccaaagtactgggrttacaggcgtgagccactgcgcctggcctgatttttattatttcttctactaatttggggtttggtttgctcttgcttttctagtsctttaatatacatcattaaatagttgtttrtttgaggtttttttcttttttgatgtaggcacttatagctataaacttgcctctcagtactgcttytgttgtatcccatagcttttcgtatgttgtgtttcctttatcatttatttcaagaaaattttcaataattccacttattattgatctctagttttattctattgtggtcagagaagatgctttatattatttcagttttttwaaatgttttaagacttgttttgtgacataacatatggtccatccttgagaatgatccatgtgctgaggaaaaagaatgtgtactctgcagctttgggatgaaatgttatgtatgtatctattaggtccatttggtctgattagktccatttggtacagattaagtctgatgttcattgattttctctctggaagatctgtccaacgctgaaaatgggatgttgaagttaccagctattattatattgggrtctgtctctctttttagctgtaacaatatttgctttatgtatctgggtgctccaayactggtatatggatccagtgttgggtccatatacaattacaattgttacatcttcttgctgaattgccccctttatcattatatagtgaccttctttgtctcttcttatagtttttgtcttgaaatctatttcgtctgatatacgtatagctactcctagtcttttttgatttccattgtcatggaatgtgtttttccatccttttattttcagtctatgtgtgtctttgtaggtgaaatgtgcttcttgtrggcaacagatcactgagtcttgtttttttgttttttgtttttttaatcccttcagccactctgtctttttattggagaatgtagtccatttacattcagtgttgttattgatgagcaagggcttattccttccattttgttacttattttctggttgttttatgggtcttgtcttccatccttcctccctgtcttccttttagtgaaggtaatcttctctggtggtatgattttaatttcttattttttattttcagcgtatctgttgtatgttttttgattagaggttaccatgatgcttgcaaatactatcttataacctattattttacactgatagcctaacactgtttkcataaacacacaagcaaaaagaaaactaataaaaactctacaccttaacttcatccccctgctttctaactttttgttgkttttatttatatcttattgtactgtctgtgtcttgaaaagttgttgtagttatttttgatttatcttttagtctacttaaaataagagtaatttacacaccacagttacagtgttattctgtgtttctctatataattactgttaccagtgagttttgtaccttgagataatttcttaatgctcattagtgtccttttctttctgattgaagtacacctgttagcatttcttctaggctagatctggtgttgatgaaatccctcagtgtttgtttgtctgggaaagtctttatttctctatgtttgaagtatattttagccagataaattattctggggtaaaagtttttttccttcagcactttaaatatgttatgcaactctcttctggcctgtaaggattccactgaaaatctgctgccaaatgtattggagttcagttgtatattgtttcttttctgttgctgcttttaggattctttctttatccttgacctttgggaatttgattatgaaatggcttgagatagctttctttgggttaaatctgcttggtgttctgtaatcttcttatatttggatattgataacctttcctaggtttctgctattatttctttgaataaacttttttttttaaatacatcttctattccyatctctttttcygcctcctcctgaagaccagtaactcttaggtttgcccttttgaggctattttctagatcttgtaggtgtacttcattcttactcttttttcttgtgtctcctctgactgtattttcaaatagtctgtcttcaggctcactaaatctttcttctgcttgatccttctgctattaaaaaactctgatgcattcttcaatatgtcagttgcatatttcaactccagaatttctgcgtagttcttttttaattatttaaatctctttgttaaatttttctgatagaattctgaactccttctccntgttatcttgaattttgttgagttttctcaaaacagctatttgaattctctgtctgaaaggtcactgtattagtccattctcgcattgctataaatatctgagactgggaaatttataaataaaagaggtttaattggcctatgtttccacaggctgtacaggtaacgtgattctgacatctgctcgacttctgggggtgcctcaggaaacttagaatcatggtggaagtcaaagtgggagcaagacgtctcacatgattagaagcaggaggaagaggggcggagagctgctacacacttctaaacaaccagatcttgcgataactcactatcrggaggaacagtaccgaggggatggctctaaaccattcrtcaaggaccaccctcatgatccagtcgcctcccaccaggccccacctccaacattggagattataatttgacatgatatttggtggggatacagattcaaaccatatcagtcacatatctctgtttctccaagattggtccttgctaccttgtttagttcatttggtgaggtcatgttttcctggatggtcttgatacttgcggatgtttgttggtgtctgggcattgaagagtcaggtatttactgtagtctttgcagtctagactttttttttacccactcttcttaggaaggctttccaggtatttgaacttgggtattgagatctaagccgtgtctgccttagggggcaycccaagcccagtaacctgtggttcttgcggatttgtagagttaccaccttggtagtttcggataagacctggatgaattctctggattaccaggcagagactctggttctcttcgcttactttctcccagacaaactgagtcagagtgtgtgtgtgtgtgtatgtgtatatatgtgtgtgtgtgtgtgtgtctctctctctctctttctctgtgctaattcacctggaggtggggtggggtgacagagtcacccctgtggctaccaccactgggactgtgctgggtcagactggaagccatgagtatatctttatccctagtgttcattaagtagcctgcagtggacacttaggtccctgagctgatagcacaagaggcagatgttcatgcagtgatggcggatggctggacacccctgcacagtacttgcaagtggtaccagagtggcttctttcttacctcagtgtgatgcagatatcaatgcccaaacaaaagcctttttttttttttttttttttttttgagacagagtcttgctctgtcrcccaggcttgggtgcagtggtgcaatctgcgctcactgcaacctccacctcccaggttcaagctatcttcctgcctcagcctcccaagtagctgggactacaggcacacgccgccacacccagttaatcaaaccaaagcctcttgacccctttgcatcttgctgctgggaaaggagacagcaaagataacctagaactcctcctgatgaaccattacatcaaaccagggctgaaaaacaacttcaaagaaacggcatttgatattgccaggaggacaagtatctatcactccttctttgtaatggtggaaggctatacaaattcttcacctcagtcttaatggttctagtaattttaggtgtctaagtaccagtggctccttcgtgcaagatataaaatattcccataagacaaagttgatttaaaacgtcttactacaaaaattcagtggtaaggtagttactattatgttctttaaagtgaaatgcctgacctgatatcagaatgtatttgaaagatgtttggatatatcttraattatttttgtggagctcgtgatttttatcagagataattttaacttgcctagacctaaaaacttgacatgactttgggaggccgaggcaggcagatcacttgaggtcaggagttcgagaccagcctggccaacatggtgaaaccctgtctctactaaaaatacaaaataaaagtaaaaataaaaataaaaagctgagtatcgtggcacatgtctgtaatcccagctacttgggaggctgaggcatgagaatcgcttgaacctggaaggcagaggttgcagtaagccgagatcgcaccactgcactccagcctgggccacaaagtgagactcagcctcaaaaaaccgacaaaaaaaaaacttgacacaagttgaacagaaactgattatttttggtgctgatccaagagaaatgtatttttaaatactgtacatcctggatctttgttgagtatttartatattgatatatatttttataaggtgaggtaactcaaaatttaagtcttaaatattgatgcagtcatctgtcttctctacattaccatagccagttactttcattttaaaccagaagaactaacatattagtgacttgaatcttcataagttaaaggaaaaaaaaaaaacactaaaaagcctagatgtttgtcttttagacaatagataatttttaggaaagcagttagctaggtgtttcatccatgaatgttgtatactgcctcccctaccacagttcacacaattctgtggatagtcctccctggtcaacctacatgtgatctttattctaatggtgaatcagtatgaccttttagacatgcatacaactacattgtggtcaaagagatcatagtgtatctgccatccaactgcttttacctgcctaatcctgctgatttgggcactgcttacataatctcttgagttcacaggaaatgttgattttccaaggtctttgttttatagaaaccttacaaagcaaagtgataagggaaaaggaattctaaaagtgaggggatgattattatattgaggctgaaaccacacagtggctcaggcttaaaaacagtatggatagtgacaaaaagcataatataaacattcaagaaaataaagtataagttttaacaacaaaaatgatttctagattacttacaatagctaatacaatgtaaatgccatgtaaatagcatgtactgtattttttatttgttgtactgtattttttgttgttgtattggctttttaaattgtttttttttcttcaaatattttcaatccacagttggtcatatcttcagatgcagaactgtggatttggagagcctgctgtaataggagggcaaatttaagcattcatattttaacaatatttaatagctcacaatatttaatgtgagcttatttacatgtagtttctttaatcagatcaaaaggatgattatccaatgacttgtgcaagctcttagtctccaaagcttaggaaagaactgcaggtgatgtagtccaagtcaatgaaataagcctcagaaaaccgatgcctacaaattgtgacttgttaaaatcagagtcctgtttataatgtctgaacccagaacttgatcctaggtcttctggtcccacgggaaccttttctctcattgtacaaaataattcagccagtgaaataatcatcaacatatctgagatggaacatgctttcatttcaaaccagatcctcttccagccttccgtttttgaacaagttggtaccacaatctaactagttgccaaagccagaaacttagaagttctgaatactttatttttcccaattcccccatatctaattttatcctcaataacttatcaggtaccatcaattttatctcctgtataggtctcaaatctacctgcttctctctatcattctcccacctccctatttcactactatataactcactaattttctcacaggtctatcctgaccattctcccatctgtgttctccatagtgaagccagaatgatctttttagaatgagaatttttccycctccctgcctggtctcttctacaccacttaaagccacctcagtgatttttccattgctgttatattgaggtctatgagcctaaatatgttagcaagccctgcccaccctcttktcttaaacctcccctctcttcctgtatctttgccctccagacacattgggcttattttgattttggaatgcttcttacctactccccctatcccccagtctttgcctaattaatgactaattattctttaagtcctaggtcaggcatctgtcactcagggaagtctctgacatcccagagtactccatgccacccctttattttaatcaacattaagtaaactgtgcttctttcttcagagaattatctcagtttatagccatgtagtcataattgcattcctttgattaatgtcagtcttctccccaaactggaaattccatgagagcaggcatttgttattttttgtcccctggtgtatttttttattttctattwtatttccagtacacagcacagtgaaatggctccataaacgttacctgagtaagtgaagtaattctctgtaaggtctggctgaagaccttcatgtctccarataagtagcctacaagtatctctctattctgattttacttytaggccagttccagcttttctgttgtagtgagtagaatggagatataagctcagtttctgctgggcggatcaaggaagttgcagggtccgtcagtatttaagtgaattttgaacttaatgagattcttcaattcattctggaaggaatgtaattctgggttgactatagccacaatagcatgatgccaggaatcaggacttaaaagacttttcttatggaagtaacttctgactcaaaccctaaagtaaacctatagtgcttactgtcagtccaaggagttcatctcagaaaaaaaaatcattttaccatagtatatgtgaattaaatgagttaatacaagttagagctggctgggcacggtggctcacgcctgtaatcccagcactttgggaggctgaggcagatcccttgaggtcaggagttcgagaccagcctggccaacatggcraaacactgtctctactgaaagtacgaaacttagcgggacgtagtggcatgcgcctgtaatcccagctacttgggaggctgaggcaggagaatggcttgaacccaggaggcggagattgcagtgagccgagactgcrccattgcactccagcctgggtgacagagcgagactccgtctcaaagtaaaaaggaaaaaaaaaaaaagttagttctaagaacagttattaactcgtagtaggatataaaagtgttaggtaatgtgtgtagagccaaagagactttgagtcaacattatgcctaatattaaatgtattaagaacattttaattcaggaaagcatgcatttctttgaacactgcataatgaactgtgttgaaaataattacttagcctgtttctgcttcccttttgtgtttcggacctttctcaattttacctattcttattataatttaaaagcccttttgagatccctagagtaaaataggagatgaatcttggctgattactagaaatagaaagattttagctgattacctcactggcaactttgatagcagcaacttaaacttgagatcccaggcttgggttcctctaaggcttaaagctttcagaagtaaatgtacttattttgttaaggaaattctttggagactcttttcattaaataattttcattatgtctgaacatggctttaacttgccaaatttcccttctttgtttagtataattatttttaaagagcgtgaaaatgtgtattctatttttaaaatttaatattttttcagtgctgacatattcaactrtgatttattttgattttcaggtctttagcaatgttaattcaaacctgagagttttaaactatgttggaataatggataccattgagaatatagtaaaatgttrtgaaccttctttctagaaaaatgtttgcatattcaaaatattgtatacagtgtttcacttttcacaaataatcctgaaactgkttmatatattgtttttatttttatttttttcgagatggagtcttgctctgtcacccaggctggagtgcaatggcacgatcttggctcactgcaacctccacctcctgggttcaagccattctcctgcgtcagcctcccaagtagctgggactacagtcatgggccaccacgcccagctaatttttgtatttttagtagagacagggtttcaccatgttggccaggctggtctcgaactcctgacctcaagtgatctgcccgccgctgcctcccaaagtgctgggattacaggcatgagccaccgcgcccggctgcatgtattttttttaaatgttgctcctctttagatatgtgactagtatattttcatttagttaacatgtccagttgtattcagtttcattaaaattgatttatagtgctatggtgtttaatttgtataacacaaagtttctagatccttcttctggaagcagtaataaaataaaaaagtgcagttgtgctaagtgcatttttgggagaatgcagcattttaagccatggctattcatatggcaattatagcagtttttatcactctgtgttttaaaaatgtaagagattcttaataaaaactgatgtgattttgtgttgggcattttttaaaggatgttttyttttttaaaaaaaattatttttaaatttttatttatttatttattttgagactgggttatgagactggccaatttttgtatttttggtagagatggggtttcaccatgttgcccgggctggtttcgaactccagggctcaagcgatccccccaccttggtctcccaaagtgaggtgtgagccaccgtgcccagcctaaaggatgttttcttgagtgatggctgttgaattattttggtaggacttggaatgcttttgtggaatgtttaagtggaatattggttctaagtttcctatctcagggatcctggacctgccatttgattagctgcatacatttttaaattgaggggaaccagaaaatcttccaagatctttgagtgctgtggactcctttggatgcagttttcttagagaactgctgggtccatccaatcttaggatgactgaggttataagattttctctagtttttttctgccctgtcaggcatcttgtgatttcatagattgctgtcatcatcttctcccttggttatctcatccaatacctcatgccttttttcttttctttttttttttttttttgagacagagtttcgctctgttgcgcaggctggagtttagtggcgctatcttggctcactgcaacctccgcctcccgagttcaagcaattcaccctaccttagcttcctgagtagctgggattacaggcacccgccaccagacccagctaatttttgtgttttttagtagagacggggtttcaccatgttggccaggctgctcttggactcctgacctcaggtggtcgcctgcctcggcctcccaaagtgctgggattacaggcatgagccaccgtgcctgaccctcatgactttaatatgatccaatatcagctctttacaaatgagtcctaaatctacctctctagctcagacctccctcctgaaatccagacttaaatttatctgactgctgtcttaacatctccagttagaattggcatctcaaaatcagtatgttcaaaactggattcctattgtttcctcagaaatgtaatcttccctttgtcagttgacagtgcagtctctcaaaagccttgcacgctttctttattactctctttgtatcatactccgtgtttggtctgttcgtattattgcctcacccttcaaaatatatccagaattcaaatacatctcactatctccgctgctacaccttggtcagagatacttttacctcttaggtagattaaatgtcaggtcgtaatacctggaacctgaatgttacattatttggaaaaaaaatatctttacagatgtgattcaggatcttgagatgcggagattatcctggttggctctaaatgctatcacatgcacccttctagagagaggcaaagggaagtttgacacacgcwggaggaagtgatgtgaagacaggcagagtttggagtgatgcagctgtaagccaaagaatgcgcatagcaaccagaacttggaagaaacaagaaatgaattttcccctagaccgtctggagggagttcggccttgctgacaccttgatttcagaccagtaatactgatttctgacttctggcctccagaactgtgaaagaataagtttcaagccatatcgtttgaggtcatttgttacagcagccattggaaattaatacattctcctgtttaggatttcagtcaaggttgttcattatgttcggttgttatggccttgttaatctaaaataatctccctcaccttttttgtttttcatgacactgactgtttttaatttaaagagtctaggcatattgtcttgcagactatcccacgttgtggaattacctgattgtttcctcataattagattcacattaaacattttttccaagaataccatataggtgatgttgcataaagcctattattaatacaactgtcagagtgatttttttttttccccaaatggagtcttgctctgtcacgcaggctagagtgtagtggcatgatctcagctcactgcaacctccacctcccgggttcaagcagttctcctgcctcagcctcccgagtagctgggrttacaggtgygggccaccatgcctagctaatttttgtatttttagtagagacagggtttcaccatgttggccaggctggtctcgaactcctgacctcatgatccgcccgcctcggcctcccaaagtgctgggattataggcatgagccaccaygcccagcctggagtgattctttcaaagcgcagcattcctctgtttgaaagtctccagtgacttcccatttgttcagaggaaaagccagatccctcatatgatctggccgcccgtaacctctggagctttctctcctcttcactcattatattgcttttgtcttgctcttttccagacaatctgagcatgytcctgtcttatgatctttgctttagctgttctggttgcctggaaagctcttccccccaaggatcttttggctcactgtctcacctccttcatgtctgcctaaatgccctgtgtcagtgagtcctttccagatgactatttttaaaattgtgattctccacctgcttcccagtgctgatccctcaatgctctttactgtcatgtttttccatatcaccctctctcataccgtgtaacttatttattatgtttattgtttattgcctgttttccctactgaactataagcaccatggtggcaggaatctttgttttgttcccagagtcatcccagaatgttatgttcatagcaggcacaaaatagtttgttgaatggatgaatatgaaaatactttagattaatatatccttctttgccttaattcacagtagagtcacaacagtattttgaaataactttggatttgcggaagagttccaaagacagtgtagaattcctgtttacccttcacccagtttctccaaatgttaacgtttcacataaccatggtacattcatcaaaactaagaaattaacattggaataatactrttaactaaactccaggcttcatttggatttcgtgaatttttccactaataccctttttstgttccactgtccaatccaggataccacattgcatttagttatgtctctttagtctcccctaatctctgcagagactacttcttaaaggattcttgtggattatttgctcaagtgaatatttcttttatttatttatgcctcagcattcacatcgtgaatatttctaaaggaaggaaaggttgtaaaayttaggagcactagaatatatagctacagggcattgttgaactttagacaagatcataggatttgacatgttttctgggtcaaatgcagagtttatctagygtcttctcttctgccatcagagcttcccaatcctttcatgttgtcatttgaagaggtgaatcctagcctaaccattaactgtttgtgacattttaatgggtaaatgtaaatatttctgtagtaaagacgtgttaggtacctaccctgtgtaatgaactgtatcgaattcctccttgtgaagggggatgtaaagaaatttgagtaagttttttactagcctgggttctaatataggtaatatataactaacagactgtaataacaactggtttgayagcacagaggaaattattaatgttaactgggtgaggtgagaaatagggagaagatcacatttaaacttgcccttaaagtattaatagaattttttaaaaaatttattcgagacagggtttcacttccactgctcagattggagtgcaatggtgcaatctcagctcactgcagcctctgcctcctgggcttaagcaattctcccacctcagcctctggagtagctgggaccacaggcacttgctaccacacctggccaatttttatatttttctgtagagaaggggtttctccatgctgcccaggctggtcatgagctcctcagctcaagccaatccacccatctcagcctcccaaagtgctgggattatagtgtgagccaccgtgcctgacctcatagaatttttttaaatggctttattgagatattattaacgtatacatatcaaatgcaccatttaaagcaaacaattcaattgctatgcatatattcacagagttgtgcaaccattccacaataaatgttagaacatcttcatcagccacaaaagaaaccccatacctgtgttcactccccattctccccttcactcagctcctggcaacacatattctttatatgtctgtaaatttgcctattctggtatttcatataaatagaattgtacagtatgtgtctgacatctttcactttgcatattttcaagattcatccacattgtagcactcatcagtactacattcctatttatggccagatattctattttatagaagtatattttagtttttcattcatcagttgatggaaatttaggttgtttctacttttgggctattatgaataatgctgctatgaacattcagatttttgcatggacagacatgtttttattaatgttgggtatatactatgtttaaccacttgaagaattagcagactttttcaaagcagttattattttacatttccaccagcaatggatgagggttccaatttctttacatctaagccaacatgtgttaatgtctgtcttttctattttggtcatgcaagtgggtgtgaagtggtatctcattgtggtttcgatttgtatttccctaatgactaatgatgttgcatcttttcatgtgcctattggtcatttgtgtatgttctcatgaggtgtatcattttagtagatgaagaaaggggaatggaagggagcaagagaacagggacaaaggcctgagaaatggtgagagaatcagtaaaagagagtagggctctcagatgataggagttaagagaggactatagaaaactgggtctctaagctgatgtgtcaagtcacactgtcctctgcttatcctaagcttaccttgctcaaatttctttttttttctttttctttgtttttggtttttattttttcttaaatttcaaggatattccttcttttgtaaatgtcacagagtatcatggctctgtcgccgaggctggagtgcaatggtgcagtctcaggtcactgcaacccctgccttccaggttcaagcgattctcctccctcagcctcccaagtagctgggattacaggcacatgccatcatgcccggctaatttttgtatttttggtagagatggggtttcaccatgttggccaggctggtctggaactcctgacctcaggtgatttgcccacctcagcctcccaaagtgctgggattacaggtgtgagccaccgtgcccgtcccaaccaggcttcttaaatgaattctaagatagaaacaacaggagctkccaggactctcttaagggctgaacctaggactgtcacagtgacatttctgccatattctgctggtcacaaggcaagcccaaattcaaaaggagagaaatagacctcttagagtttcctaataaaaggtaatttcattaaaaatacaattcataaattagccctatgtttactactgtcttttcagctctttttttattccatgcattaattgattcgtcaccacttggattgtgccaccaatgtttctatgacatgatctaaaaaaaaaaaaaaaaaaaaaagggctcagtagttttcacttaaaagacaaagaggcccactgagctattacagatgttaattaggattcatttactttaatatggtagaaagratgctatgataccactttagtgatgaacaaaataagcttaatcacatcctaggagctaagtattctgacattataatctcttctctcagagtcccatcacagcagtcttaggattcargatctattcttgggaaacattatagaaccagtgtgtcatgtacatacaaatgagggaaaatataatggctttggtaatcctgtagttatctttcttgtcatatactctttttttcatttttaaaaattggggcaaaatttatataacataaagttaaccattctgaagtgtacaatttaatggcatttaatacattcacagtgttgtacgacttttttttttttgaggaaaagcatatttttaggataatgtcaaaacagattaataagatgctaataagatggccagacattcactcagaagtgttttttgttttgttttggtgaaatggtatgagagatatgttgccttacacttaggccactgcattcccgcttaagtgccaggattgtgtcagcaacaggatggcctaaacaatctcagtcttgtctcctgccagccccctaaatcttccagaattgcaagaataggccaggtgtggtggctcacacctgtaatcccaacactttggaaggccaaggcaggcggatcacttgaggccaggagtttgagaccagcctggccaacatggcaaacccccatctctactaaaaatacaaaaattagccaggcaggtgtggtggtgcatkccggtaatctcagtttcttgggaggttcgggtgggatgatcgcttgaacctgggaggcggaggctgcagtgagccgagatcacgccactgcactccagcctgggcgacagaatgaggctttttctttaaaaaaaaaaaaaaaggaaaaaaaaaggcacatttatctcaccttccctcctattctgggaatgctaacatcctcagggaatctcccatattggtcccctataacccaagacttgggagtttcacagccccactctaggtctgaaaacaacacaaaagttgttctaagggatgaagccaccctcaataaaactggaagtcaaagcctgcatataagccccactccctcctgcctaaaaaaggaaaggtatttagatgtttttgtcatggatactttactgggatcaggtaagaactgaacaaatgcagtaagttattggagagttaaaggttaaaaaaggccgtgtgcagtcgctcacctgtagtcccagggtgaggccagggcaggtgtgtcgcttgagctcacaagtaacgagaccagccrgggtaacgtggtgaaacctcatctcgacaaaaaatacaaaattagccgggcatgrtggtgtgtgcctgtagtcccaactacttgggagcctgaactggggaggatggcttgagcccaggaggcagaggttgcagtgagctagatcgtgccactgctcttcagccagggtaatagagccagaccttgtctcaaaataataatagcaattttaatagttttaaaattttgaactagttagaacctctttgatatttacctcacctaggaaattgggatcagcccagctttcaaagggaggtacatgaatttaggactgcagagtacagcaaattttagttcctgatatggccatgctttyctaagaagtttccaaaggttattgactctcagcttagccttttytactgcacaatgtgatagatgctgtaaatcagcgtttagaggtgtttatctaactctccctagtgggagatggggaaattttcactgagaatgtaactctgcacyatgagcagatgtttgctaagtgggcaaggattgagtgggggatgtcttaaactgagggaaaacatttgtaaaagcagaaaggggtgaggatatgacagcaaatttactatagctaacatgagagagaagaggaagggtagtaaatagaattgaagagggtagccaagggccaaatataaatttgtattacaagctaaggaatttttatccagtcataaagagccactgaaagattttatgcagggrattataatgatcagattagcatattaagaagatgattttggcaatagtatggagtctggttgatagggaggccaggtaggaggctactgaagtrgtctggacaagagatgaagtgtacctaaactaaggcatggggatggaacggaacttagcattacaggcagttacttaaatggctaggggaagcaagaggaagcaagaatcattccttggtttaatggtttggatggatggtggtggtctttgttgacgctagatatacaggagtagaaaagccactaaaaaaacccacacacatttctgttttatgtaggcatcttgtataggacagactaacaaaaatgaaactgtttcttaaatttaattgaaatacaatcagcaattttctcattataattttacttaaccctgtacagttcagtctacaaaaataagtattggtagaatagccaggtgcagtggtgtgtgcctgtattcccaagctgctctggaggctgaggcaggtggatcacttgaacccgggagttcgagtgcagccagagcagcatagtgagacgctgtctctaaatattaaaaaaaaaaaaaagtttttttgtactaaagtgaatgtctgatatctgcacaccccacagaatgtacagtggaattctaatgccttatctctgaacttactatatataacattgatataaccttttctattgtttttgacgcctattttattcagttagcattatttcccttggcatccttatagccaggcaatcccttatgatgaaattaaaaaaaaaaaaaagaccaactttaatgatctaaggctgtgctgcttgatatgggagccacttagccacatgtgacttgagtatttgaaacttgactagttcaaaatgaaatgagctgtagatgtaaaatactcactggatttcaaagatttaatatctcactaacatttttgtatrtttattacatgttggagcaatattttggatacaagaagtaaaatttattgtcatgatgaatttttcctgtttttgttgttgttgttgttgttgttgttaactatttttaaaatgtagctacccctgtaatcccagcactttgggaggccgaggtgtgtggatcatgaggtcaggagatcgagaccatcctggctaacacagtgaaaccctgtctctattaaaaataccaaaaattagccgggcatggtggcacacacctgtagtcccagctagtcgggaggctgaggcaggagaatcgcttgaacccaggaggtggaggttgcagtgagctgagatcacaccactgtactccagcctggatgacagagtgagactctttctcaaaaagaaaaaaaagtagctactagaaaaatttaaattatatatatggttcacattatctttctattaactttctttgcttactaagtttatttcagttccattatctgcctagtttctatgctaggtgtgcctaacttctatactagctagagatttgctgcatatgattaacagctgtttcattttnnnnnnnnnnnnnnnnnnnncaagctgtactgaggaattaagatgatcagaaatttacttaatttacattatcacttctacattgatgttttctcaaactataggataatttcctgtttaaataaatgacagagtatgttgtactagaaaagaggaagagaagggaggggcaagaaatatagtctacaagcaaaaacctggattctccaggcctggacaggaaaaaattaagcaaaattaagtggattttcatcagaagggctcttgggaatctataaaaaaggagttaaccttaaaaatatttaaacttaaaaatatctttaaggccgggcacgggggttaaccccctgtaatcccagcactttgggaggccgaggtgtgtggatcatgaggtcaggagatcgagaccatcctggctaacacagtgaaaccctgtctctattaaaaataccaaaaattagccrggcatggtggcacacacctgtagtcccagctagtcgggaggctgaggcaggagaatcgcttgaacccaggaggtggaggttgcagtgagctgagatcacaccactgtactccagcctggatgacagagtgagactctttctcaaaaagaaaaaaaagtagctactagaaaaatttaaattatatatatggttcacattatctttctattaactttctttgcttactaagtttatttcagttccattatctgcctagtttctatgctaggtgtgcctaacttctatactagctagagatttgctgcatatgattaacagctgtttcattttaattcattataagtgcctggaaactgcaataatgcaaaattgtcttcccatattttggaaacaaggttaaaaagttctatagcaccctatagttgattagtaagaacttcaacgcagaatatctgcaggaaactgatttttgtagatgttatcacaattcattttgatatctgtaagttggatagtgtttattaactcttctgcaaataaattatttcttagaatgaaagtctccaagctggtacatggataggattggactagagaaaaagcttatttgaaacacattttatgagggttttcatttattgcctaaacactataaaatttttttgccatgttccagttgacacaggccaagaaatgcctgaacaggtagcaaacacacctagcaaacagggatggctaccatatcaaaaagtctctctgctaaggtgaggtgcagggtttctttttggggtgatgaaaatgttctaaaattagatagtagtgatgctcacacaactctataaatatactaaaatcactgaattgtatactttaaaagggtgagtgtaagggtatgtgcaatatagctcaataaagctgttataaaaaaattctgaagcatgcttatctgttgcagttactgatttactagtcatttaatgagaattaagtgagcagacacagaaagcaaccatatgttcaagaactacagtgatcagacaaaaatggactgtccttttttgacttctgtgtgagccccacagatctggtggcatttagggaagcctaatggccttcttttgtgagtacttgtgaaagttactaacaatgtattagattgctaatacattcaaattctaatgtaaaatgaatgtgatacactgaaaggtacagactgaatccagcagatgagtagaaagaaaaccactccaatatttaatcatttgttgttaaggaatttatccattaacaaagtttttagacagagttgtttatatctactcaaggtgtcattatgcacatctgtttcttgtacctcaggttcatcctatagaaaatcatgctaactcacaagtcatgcagtgttttcaaaaagacaagtcatgcagtgttttcaagttcagagagtagcaaaggatgcaaatctaatttctttaccatttgctaccatctgaagttagtaacattttttggctaatcaccaagcacccagaaagaaagaaatagagcaaatttggtgcatcgtttgtcttccgtatctcctttcgaagtcatttccacaggataagtgccaaagcacagaaaagaagctaggccccacttttactctcatgaacaaaagtcttcccatagatttttacatagctgctgcatttgtcatccctttcctgaagagctttgttgctgtggtcttgctctagggctgctttcagcaacatttctgacgcaggtttaatgctgattagccctaaaacaattctagggcagggctccctgccaggataaagaatgaacaaaattggtttgcatataggccagctgcagttgctgcagctagagtctgtcaaactaggaccattttcttgtttaccaagatgaggttaaattagcacagcatgaggcaaaaaaaaaagatttaaaaaacccagaaaattagctatgcttttgagtatgatgcagtgagtgtggaattaaggtgattttaagttagtttgagaagggaaggtaatatacagtactaaaagcttgattaaaagctgcttgaagatatttgcttgctaactatcttagtaaaaaaaaaaaaaggtatatttgaatagtgcctcaaagctcacagattacatgtagaaaagtctgttggcccatttttattgagtatgtgcctcatgcttacatgcttagccctggtcctggcacaagggtacagaggtggacatttaatagaggaagacactgtctttgagactgggtttctggagactcttaattcaagcctcagctctgtctttaattctcaccttaggcaaaccatgttagctgagcatctgtgttctcctaatgtaaacaatgagagagrgagagggactgctcaggctcttaaagataattcaagtctaacattttttgaattatttgtttgtgtagtgttatttcctaaaatatttgaatcaagttttatgtgttcatagtctctgatagtgggacatccagtctggttgaggaggaaagatgagctgtgtaatcagagaagctgaatgtgagaggtttctgacttccagagcttcagtttataaagctctttccctgcctctccactttgcactgctcccattgcagagactgcccgcagatctacctttgggaactcaggctttttattccagcaatgcaaggctgagttgagggaaggagcccccactttctcatccacctgcaaaggcaagagtacatagctgcaggtaacaagttataggaagggttagtgtgaggcagaaaggcacagtaaaggataaacttcatagtgtttgatgatccccaaagtgtcatttgacttcttagactcccagaacccctgtgcttcacttcccagcccttcatcaactctggattcaaggacttctgaacttgatctctgtcactttctcctccctgaccttcccagatcccagtcttggatcattaaaagcacccctactagtttagggctgggaaatgaggagacttaatcatcttataacattgttcctatgggaggtgaattcttttacagactaacgtccaaatacaatcgttagtaaaactaaggctacagctgttaatttaactgaagcttgtgtagttatggagagattgtttcttttatcagttcatatttctatgcacttctcattcagtactgtgctatacttttcactgcccttcacctcagctaagatggytttcaccttaagtctcaagacaaaggcagcaaacagccaatacagaattagggcatagagctgggtgtgatacagggtgctaactactcatagtccgctttaagcgcaggatagaggacattctcacagaaaaacaaaacaaaacaaacatttgcctatattagataatcaagtgggtagggcttagagaaaaaaggaatcaccgtgggttgtagtggggtagtttatacatgtaggaaacagtcctgaaagatatggatgtgcagaatggaggctgatgttctgagctccagctgagggaattttcatttatctaaagtttttatttctgtttttttttccccagccgaatttaagattcatatttytgttttaaaaagttgtgmaatgaatatagcaaagtgttaacatttgtkgaattcaggagggaaggtatctacacacagtgttaattatttctgttttacttctctatatgctctaatttcttctttttaatttttttgagatagggtctcactctgttgcccaggctggagtgcagtggcaygatcagggctcactgcagcctcaacatcctggactcaagcagccctcccacttcagtctcccaaagtgctgggattagaaggtgtgagccacagggcccagcctgaaattttttaaaattacagacaggaaaataaattgcattaaagttgagcagcccaagaaacaaaggaaagaacttaaataatatatagatcagatggtcagctcttgaaaaggtaggtgttaatggcagtcagatattatatcagtcttgaaggagcmcataaatcgtatattgttttgcaaccaaagaacagaaaaatgactgctatcatcaatgatgaaagctcaaatgtgatgaagaaatggaaaaaatagataatgggccaaggtttcttcatggcttggggttaacttttttttttttttttttttgagacagggtctcactcttattgtccaggctagagaggagtggcgtgatcacagctcactgcaacctcaccatccctagactcaggtgatccagttcaacctcccaagtagctgtctgggactataggtgtgcaccaccacasctgtctaatttttatattttttgtggagacaaggttttgccatgttgcccaggctggtctcaaactygtgggctcaagtgatctgcccaccttagcctcccaaagagctaacagacgcgagccaccgtgcccacccatgcttaatttgtttaggtgcgagatatactaacacagagaatatgctgtacatcattagagaaaatgaatataaataaatgacatactttagtaattatcaaaaggagcaagttcagcccaataaacaaggggcaacctagttttcatacccatacatctacgtgcaagataagtgtaatcacttttttcggaaagagtagcttttaatgcatatatttaaattattttaagayatgctctaaagcctctccattgtgctataattgtctctaacagttgaatttttgccttttcaagaatttcttctataaatgctgagggaagaaccattactgataaattttctatattcctaatatgcttggctaagcttgtagcaaggctcaatatatttgttggttggcagtacagaattttgagtagtctatttataccagtaatattgtgttactagtgaatagatgagtttaatcttagtgtaaaaagcatatctatgtaacagtttttctactgattaattgtatataattgaacagagttcaagttcattcctttttttgttcattccttcatacaaaatgggaagttgtttagaactcatcctgaaaggaattgacatactgtagtctctcacagaagtacaacttaataaacatttatggcaataaaatttacccaccatgtaagtatatctgcaaaactataagtatgtggaatggtcttacagaagtacaaaattaataatgtagtttccctggttatttctcatctatttctatatcatactgtgaaagaatccaatactgttacaataataataataatgataatttaaacataatttcagtataattataatcgcaattttaaaaaatgtatgtgtatrtatttagagatggggtctcactctgtcacccaagctgaagtgcagtggcacaatcatagctccctgcagccttgaacttatgggctcatgtgatccttccacctcagcatcccaaatagctcggactgcagacatgcaccaccacactcggcttataatcgcaagtcttacgttctgttttctttttagagacagggtctcactctgttgcccaggctgcagtacagtggcactatcagagctgactgcagccttgaacttctgtgctcaartaatcctttcacttcagtcccttgagtagctaggactgcaggtgtgcaccaccatgcctaattaaaaaaaaatttttttttttgtagagaaaaaggtcttgatatgttgcccaggctggtccaaagtgattctcctgcttcagcctcccaaagtgttgggattacaggcgtgagccactgcacccagtgtcacaaatcttawtttttttttttttttgagacggagtctcactttgtcacccagatggagtgcagtggtgcagtctcagctcactgcaacctctgcctccctgaatcagattcaagtgattctcctgccctagcctcccragtagctgggattacaggcacgcgccaccacacytggcaaattttttgtatttttagtagagatgggtttttaccatgttggccaggctggtctcaaactcctaatgtcaagtgatccacccaccttggcctcccacagtgttgtgattacaggcgtgagccactatgcccagccttaaatttttattaaataaccttcatagtcctacaaaaccattattgtagaatttgtacaaacaaggtaaaaatctttacacaaagtcagtagtattcctgtgttctttcaactagcccatgttcataattattcgtttattctcatatgcctaacgatgaggatacattctgagaaaatcactattaagaggttttgttattgtgcaaacatcatagagtgtgcttatataaaactaggtagcatagcctactacaaaccttgactatatgatacagcctgttgctcttattgttataaaagatttaaacattttatttataaamtggtattaccaacyttcccctatttctgaatatttaggtaagaagcaaaaataagttatcctggctttgtgtagtggctcatacctgtaatcacagcactttgtgaggctgaggtgggaggattgcttgagctcaggagtttgagaccagcttgggcaacatagtgacaccctgtctctctctacaaaaaattttaaagaagattagccaggtgtggtggcacattcctataatcctagctacttgggagactgaggcaggaggattgattgagcccaggagttcaaggttaccatgaacaatgattgtgctactgcattccagcctgggtgacagagtgagaccctgtctcttaaaaaaaaaaaaaaaatgttatctgagggacttacaagcaatgacaccccagaggtcttcatttctaataccattttccaattaaaggagcagggggtccttggagaaatgtctgatttctagaaatggggcaagaaatatgagccttatactgctggcaattaaggaagtgctcaaaaacccaaaacagaacaaagaagccacacaacacatagatgggggtgcatcaaatgggcataggagccaaataaaagagttgtaaatggcccaaactggaacacactgagcagaaaaataaaagtctgtcatgacttaaaatataaaataaatatgcatgagtccatactgatgtaaataaatgatcagataaattagtaaatggagaagagacaaatctcccttacagaagaattccaaatgatagaggtagatacgtactttaccctcaagaggtgaagtataactctctatttctaaaatgtgggttgggtagagtgatttccatctgaagattgcaatatagaaaaggagagaaaaaagaacttttctgtggagaagcctgaagaacactatcttagccaagtgatcaaggttaacatcaactgtgatgtcatattgacagtatgaatcattgatattaagtgatgaaaatggcactttacctgtgtggtcttccccaaacctataaactcagtataatcatgagaaaaacatcagacaaatcccagttgagggaccttctacaaaatacctgaccaatactactcaaaactattaaggtcatctaaaacaaggaaaatgtgagaaaccgtcacagccaagaggaacttagggaggcttgactgctctaatgtggtattttgggtgagattcttgaacacaaaaaggatcttaggtaaaaactcagaaaatctagataaagtttagactttcgctaataatgtaccaaatactggtcgttaattttaataaatgtactaatgtaagatgttactattaggagaaactggttttagggtatgtggaaactttactattttccctatttttctgtaaatctaaaaccattctaaaaattaaatttactttttaaaaagtttcttaaaacaatgaaatgagtttgaccaatgcaaagctgaagaaagaagataaccatgaaatctaggattcaaagcaaaggttaataaaattttgattatgtgacaccatgacggatatacagtacaataataatatccctatgtttgaaataaggtaggtatcaaattttaatttacaaaccaacacaaattattaaaggaataaaatattctaaagaaaataggctgagtgcagtggctcatgcctctaatcccagcactttgagaggccatggtgggaggatcccttgagcccaggagtttgagaccagcctgagcaacatagcaagaccttatctctactaaaaattaaaaaaaaaaaaaaaaattagccaggggtgtggtggtgtgtacgtgtagtcccagctactctggaggctgaggtgggagggtcgcttgacaagcccatgaggtccaagctacagtgaaccgtagttgtaccaccacatgccaacccgggtcacagagcaagactctatgtcaaagaaaagtgcagtggaggctggtgcggtgactcacgcctgtaatcccaacactttaggaggccgaggcgggcagatcacaagatcaggagttcgagaccagcctgattaacatggtgaaaccccgtctctactaaaaatacaaaaattagccaggcatggtggcacgtgcctgtaatcccagctactcaggaggctgaggtaggagaatcgcttgaacccaggaggcagaggttgcagtgagctgagcactgcactccaacctaggcaatagagcgagactccgtcamaaaaaaaaaaaaaaaaaaaaaagggcagtggaggggatgtttttatttcttaaattatattttagtttatatatagtcaaggctttgaaatgaatcattttcaaagctaccaatattttaaataagtgwcttaaaaattttrgagtatataattcagacctaagagtacagtttttattcatctatccatttactcaacgaacatttttattgccaggcacaatattaagtaggtgttgaggatgtaagggtgaataatgtgttgaagagcttaatttataaaggggaagatataatttaacagtgttaatgtaatatggtaagcagacaacaatatgccatagcaattatgagaacaaagttccaagaacttcacagtgctatctctgttaaaaaaaaaaaaaagacatcatattcacgtattattaagataaccaagaaaggaagataaatgctttatcttgaaccttactgttgagaaaaaattttattttaacacatcaattaatatttgtttagtacagtgtttgtacgatagtggttcatttaaaaattaagctatggaatttttaaaatattggaccataaaaatctgttctaatttgtagattttgtagygttatggaagaaactcctctcttctggacaggtcaagaaaggtttccccaggaggtctcttctgaatagaatctttgtttttttttgagacagggtctccctctgacacccaggctggagtacagtggtgcagtcacagctcattgcagtctggaactccagggctcaagagatcctcctgcctcagcctcctgagtagctgggactacaggckcatgccaccatgcctggctaattttttaaaaaaaatttttttgcagagatggggtctcactgtgttggccaggctggtctcaaactcctgggctcaagttatttcccccgccttgacctcccaaaatgttaggattacaggcatgagccaccacacccagccctgagtagaattcttaaagatgtgtaggagcctaataggcagacatggaaggaggggtgtggtaggcagaatttttaaaatattcccaaacattgtcttctgggtattcagttaaagagcagtctaggttctgctgttaaggaattttacagatttaattaaggtgactaattagctgaccctaaaatagggagagttgcttgaattatccaggtgtgtcctgtataatcacgagtccttaaaagcagaaaatctcagctgctgcagaagagagaagaaattagagagatttcaagtgcaagatggtttgatttgagatgttgggtgccatatacaaggaccaaagagagatcttaggtgctaagggcagctggctgacagcttgcaaggaaacggggaccttagctctacaaccataaggaactgaattccagcaataaccgcagtgtgcttgaaaatggattctttagccaggtgtggtggcgggcgcctgtggtcctagctacccgggaggctgaggcaggagaattgcttgaaccccggaggcaaaggttgcagtgaactaagattgtgccattgcactccagcctgggtgacagagggagactccatctcaaagaataagaataaagaaagtggattcttcttcagagcctccagaaaggaatgcagccctgtcaacaggatggtttcagtattgtcagacttggagtaaaggaatcagctgagccatgctgtgccagacttctggctcatggaaaatgtgaaataataaatgtgggtgtgttaagctgctaaatttatcataataacttggggcaatagaaaattattacaggggaaaagttgtttcagacacacgaagtctagcaaggacccataagatatcgtacttaaaagggaactgcacgtcatttggcgtggctcaagtgcaggagcctcagaaactaaagtaggtccagctagatcatggtggtcctcaaatgccatctaaggaatctggacttagttggcagggactgaatttgtgacactggtatcttagttcacgttgattttcccaaggaggtaagattaattctctgtctccttcaagtttgctcaaacatcacctcaatgagggccaacttgatcatcctacttaatactgcaacttgtgtactgctggctttcctcactttattcttttttaactttccattgcacctttcatcttccaacatactatataatttattatacttattatctccctcctcttagaatgtaaactgtgagagcaaggattattttggatattttgttcactattttttccagttatttattgttgcataataaactatctcaaaatttagccacttaaaacaaccaaacttttttaaaaattatttttatgtatttattttgagaaagagtcttggctctgcaattcagtggcacaatcatagctcattgtaacctcttaactcctgggctcaagcagtcctcctgctgtagcctcccaagtagctaggcctgtaggcatacaaaactatgggtctctccccttagaatgcctcagcctcccaaagtgttgggattataggcgtgagctgccacacttggccaaattaactcctctttagggatgaataagtggataataatacttagatggctacatgaattgtggcactgtcgacagaggaaaagctttgaggggaaaaatgagcttggttgtgtaaacgttgatgttgaggctgctgagtctgagacagcaagtggagattcttggtggatagtaaaagtcatgaattgaaactcagggctggggatcatcttgaggattttctttttatgtttttctgatggagggaggaaggaagactttgtttttcccatggagaaggggaaaattctgctcccttcacctcactttttttggttttggttgctttgttttatgttaattttgcagacttcaaaaagtggttaaaatggctccacctcgcccctcccccaaaggtgacttgacttttttctatttcaaaaaagtacgttaggtagtagctttgagaatcacagtctctgatagaactgggagggtcttagtcatcttataggtcattgttctcctcctgatatatgtgatgtgtgattttcagtctgtgcagaaccttaatactattttaaaatctgggtcttctaacaccaaacatagtaggggagggccttgaaggcctttagatgaaaggccacacactaacgcagagagactcagataactgcttttgtttagcacaaatcacatcaactgaaccattttaagcttccaacaacttcatttaattgttagaataatgagacttctgtttgattcttacaggaagattctctttcccagtgagtctcgtttctaacatatttagcccagtttgctcatgttaggataatttcatagaccatgaaacaggatagtctatttactaatagactgcattgactaatgtgatattttacattagtagaacaaatgtacccccttctctaccttgtaatttatatctttcttttagagaastttgttgatttctaatgtaggaggaagaaagtggtatttttgtgtaagcttaactgagttccttgtgtttttgacttcttataaaaatttttttggtgatagtatgtattggcagcaaaagtagttaatggaaatggagggaaaggtctactttacctctgaccaaatgactgcttctttgagtcatgcagcaggaaagtttgtttgaatcagcttagcagtgttgctccatagtgttacttgtcagccctaagttttttaatgttgagttactttcttttgttctggaaggcaaagcgtggctctcttggtgtctctttagcaaagaatatgttctttagtaatggggaaagatttgttttatattgaataataaaatgtgacatggataacaatatgctttcccagaaatacattggataaataatttccatagaaggtaaatacttaagaataattaataatgtgtttctaatttagtaataaaataatgtgttttctataagagaaaactcttgctcaaagacattgtgatttgcactaggctactagaccagcatattcagccagaaccagaaccttgttttcgtggctgtatttattatttgaaaatcacttagatgttcttcagaataataaaaattatttactaagcactggcaagcgcatgacatttattaatctaaaaattatggactctttcctcttagagtttcataatagcagttacaatacttaaattacttaaaaaatttttttttctcacttcaaattttattattagtatgacaaacatgggctaggatcaaaaactttgtttattccttattatcagagaactctagatcttgaattcattgctaaggttatttttgcaagtaaataatctgctgttgtgttctttgattggtggtaagctgcacagcacctaaaactgtcgtataataatttggccaggtgcagtggcaaatgattttaatgccagtgctttgggaggcccaggcaggatcacttgaggccaagagtttgaggccaagaaacatttttatttttttgtttccatgaaaaatagaaataaaaactcatctgggcatggtggcgtgcacctgtagtcctagctacaaggaaggctgaggcgggagtttgaggctgctgagctatgatcgcactactgctctgcagcctgtctctaaaaaaaaaaaaggaatttgtctggtctttgtctgtgtttcctgaacttctcaaacccttggaatttcctgagtgacgacgggaatgttatgctaatcaggtaactaatgatgggcctctggatagcttcaggataggcgctgtctctggaaggaccaactatgtggttgggactctgaaccaacctggcctctggagagggaaaggagttggagattcagcttagtcttgtagccaatgatttaatcagttgtgcatatgtagtaaagccagtaaaaactctggacactgagatttagtggaacttcctggttggtgaaaacactgatgtatgcgcaggggaaagtaggtgacatgccctttttccacaagaagaaggcatggaaactctgcattctctccttgatcttaccctatatatctcttcatttgattggtcatcctgatttgtgtcctttgtaagaaaactgtaattgtaaatacatcactttcctgagtcctgcaagctctagtgaatttagtgtacctgagggacttgtggaaactctcaaatttatagccagtctgttagaagtgcaggtagcctgggacttccaaagtgtggctggtgtctgaaataagggcacgcctatttgggagcgtacccttttacttgtggggtctgtgctaactttgggtggctgatgagagaatcggattgcagtacactcagttgagattgaaacagaataactgtgttgtgaaattttggttttcagtgaataaattttagtaattgcaagtgtatttaggcaggwccgagtgcagtggtgttgataactaattcattacaatcagttacagatttctttgttccttctccactcccactgcttcacttgactggcctttaaaaaaataaataaataataaattaaaaagagaaactatatttagtgttaggtaaatataacatggctctttaattttgatrtaatcaagaggaaagatattgtgaatctcttaaaaactcaaagcttactggattgatgttgatgtactcttactaaaatcttaactaagtctaggcaaggtggctcatgcctgtaattccagyactttgggaggctgaggcgggcagatcacttgagcccaggggttcaagaccatgggcagtgtggcgaaaccctgcctctacaaaaatgttttaaaaattagccaggcatgagagtatatgcctgtagtcttagccatgtgggaggctgaggtgagaggatcacttgagcctgggaggtccaggcagcagtaagccatgatcgtgccactgaactccagcctggacaacaacagagtgagactctgtctcaaaaaaacaattaattaattaattaattaaaataaactttaatattacctggatttaagtttctgtgttgttgaatattccttaatggagtcgatgaatttgcagagacccctccaagattcttttgtttgattcctttcatgaccatcaccctagaccttcaagtttgctgactagatttgggggttgtgtgtttagaaaggataacaagcttgtcatgggctagaacctgtggtcttcataaatagcttagtaggatatatggctttttctatgaaaggtggagaacatgcattaaaaatgggcaaattctggcctgggcatggtggcttatgcctgtaatcccagcacttgggaggctgaagcgggcagrtcrtctgaggtcaggagtttgagaccagcctggccaaaataatgaaatcctgtctctactaaaactacaaaaattagctgggcatggtagcacacctgtagtcccagctacttgggaggctgaggcaggagaattgcttgaacccaggaggcagaggttgcagtgagccaagatctcaacgtcacactctagcctgggtgacagagtaagactctgtctcaaaaaaaaaaaaaaaaaggcaaattctgtcttatacttggagaactgtactcgtgtatttaaacatgtaacaagcaatgtagacagttaccaatagaaggtacgatatagtcaggggttagtattatagtcagaaagtcaaaacgaacacaaataaaaactcaggctagtaaacacatgaatagctaactgctgtaataacaaccccataatacttcagtggcatgagacaataaaagtttttctcattcacgtttagtgtaatgtaggccaaggtgggaggcactctacttcacaaagatatttagtgactcaactttcttccactttgagaactgtccatcttttaaggcctcctttgcatttagctgatagatggcagaggaaagatagattgtgtgccttgacccggaaatgacgtcattgctgcccacatatcattggcaagaactaatcgtttgacccccacccagaagcagattttctttaaaacttctaggctcctggggttatctgtcagggcaggaagagagggaaatagtgtgagacttagctttgttttgtggagaaagtctctggtcacaaacaggctatgatggaagtggatagtgcaggaggtaacttactggggccctcctagtgggaaggtttagggaggagagtgagtgaagaaatatttaaccatgatgatcaggctgaaaaacagcccccaaggttcataaatctcaaatattcctcttcatttgcaaccccacaagcatgctatagaaatctctaccagtaactttgagctggggatggggtccctatttccactgccaactgagaggaagcgtgaagcaaccagaaggccagatctcatattcctttggtgaagagagatgtgttcttggcattctaacatcatctacattcatagtagcagaacttttgtgctatatttcatgtattttatggagattgagaaattttaggagttcagtatttccagagctgcccatgtacattctagtatgttaagttaaaaaattagtcacacttctttttaaattatacattatctgtttaaatatatgtcctataaagtagactttaaagtccaaactttatataaatggtgatttacgttatagcgcacttgaatcagatgtacttatttcactggaaattctctgaattatttaaactgaagttaattggactttggtaatctagaggcaaggatgaaatatttgaatatgtaaatctattaaaatgatttttgcttatgtgtagttctctatataactggttaaattgacctggaatagctttcatgtctcattttattaatgattttgtttaaaactaggcttctggggttacctgtcaggacaggaagagagggaaatagtgtgagacttagctttgttttctggagaaagtctctggtcagaaacagactatgattttatcagtgagacatgaaatcaaacatgataaacctctctgataaaaccggaaacgaggactatgtgaagtaattggaactattggtaaatattcctagtgataacctgaacatagccaagagtttctgccttaatcaggggaaaatacaggcttaagataggagctgggcaaaattgttagaccagttaatggatttgtttccctactttgcatctcattttgtggaagtgattttcagtgtcaattgtttgtttagacacagagtttggccctgttgcccaggctggaatggatcacagctcrttgcaacctccacctcctgggttcaagccatcctcccacctcagcctcctgagtagctgggactacaagcacctgccaccacgcccagctaatttttatattttttgtagagacagggttttaccatgttgcctaggctggtctcaagctcctgaactcaagcgatctgcccacctccacctcccaaagtgctaggattacaggcatgagccactgcacccagccttcattgtcaattgtaaagctcatgcttgcttttcctaacggggagatttttgtgtcatagtgtaattcccctctctcctcctctcatgagtagctgttatccctgtaaactaaagggaagagaaatacctgtagtatatatttaattattgaggtctccttcttgaattctttcatgctagtcccatatgtaacaattgtttccctcccagaagtgtgtttctggaggagggtgctgacttctgtgccctctgtggcacccttaaccaaggacttggatgtttgctcagaggtctttcagctatctatccatgaccatggatgtcagttcacagccctggctgttcctcagagatctaagtaaccactttgatgatttcagggttctcttagatatttgtaataaaccgattcctttattacyctagttcagttctgtaggcagctttctcagccctttgttgtttttgttgaggagagagtatgaaaggtttctgtaaaccttgtttgggatattcagttctcacagtatctgtgggtaagtagccccccagcgtagaagcttaatatttgttgctgtccttggatcatcaaacgttgggggtgtggatagcaagctctcttggccattggtaccctacattatcattattgactatttaaaagaaagactctgacatctctttaaagatatctgagttttagacatctgagtaaccaataaaagacattcagaagtttttacactcttcaaagctgctaagttatagcctgtgtcgttacagtagtaaactttcctccaagagttgacactttataattatgcttaggaatattattgacgaaatgggatatcagtataaagcaaatttcagcttatgtttgcattgataaacatgatttataaaaggtagattacttataagattgaatataatgttttttttgtttttgtttttgtttttgagacagctttgctctgtcacccaggctggagtgcagtggcgtgatcttggctcactgcaacctccacctcccgggtttgagggattcttctgcctcagcctcccaagtagctgggactacaggtgtgtgccaccacacccggctaatttttgtatttttagtagagatggggtttcaccatattggccaggctggtctcgaactcctgacctcgtgatccgcccacctccgcctcccaaagtgctaggattacaggcgtgagccactgcgcccggcaagattgaatataatgttgctggtgtttttaccttaaatactggaatgtaatttctaaaataaagttgtttttatatttgcagaaaaattgagaatggagttcccatatacttgcctcaccccacacacacaatttcccctatcattaacctctcgtagtatggtacattagttataattaatgaataaatattgatacattattgctaactaaagtctacactctatttagatttcttttttctttcttttttttttttttgagatggagttttgctcttgttgcccaggctggagtgcartggcgcgttctcagctcactgcagcctccacctcccgggttcaggcaattcttctgcctcagcctcccaagtagctgggactacaggcatgcaccaccatgcctggttaattttgtatttttagtggagacagggttttgccatgttggccaggctggtctcaaactcctgacctcaggtgatccgccttccttggcctcccaaagtattgggattacgggcatgagccactgcgcccggcctctatttagatttctttagtttttacttaatattcttgtattmgtctgttttcatgctgctaataaagatagacttgagaccgggcaatttataaaggaaagaggttgaattgactcacagttccatagggctggggaggcctcaggaaacttacaattgtggcggaaggggaagtaaacacatccttcttcatatggcagcagcaaggagaagtgcagagtgaagtgggggaaagccccttataaaaccatcagattttgtgagaactcactatcccaaggacagcatggaggtaaccaaccccataattcaattacttctcactgggtccctcccacggtgtgtggggattatgggaactacaattcaaggtgagatttgggtgaggacatagccaaaccatatcagtcttttttctgttgaggtatcccatccccataagttgtcatgtctacttaggctccttttggctatgacagaatctcagactttcattgtttttgttgtccttgatagttttgatgagtacttatcagatatactataggttactcctcctggaatttgatgtttttcttatgattagactggagttatggggttctgtgataagactgtttaaccttgtaaggaattgccaaactctcttccaaagtggccgtacaattttgcattctcatcagcagtgaatgagaattactgtcacttcctatccttgtcaatatttggtatagtcagcttttgggacttaagccattctaatcaatatgcagtggttgggatgtaatttttttttttttttttttttttttgtgacagtctcactttgtcatccaggctgaagtgcagtggcatgatctcagatcactacaacctccacctyttgggttcmagtaattctcctgcctggccttcctgagtaactgggattatgggcacccaccaccatgcccagctaatttttgtatttttagtagagatgaggtttcaccatgttgatcaggctggtctcgaactcctgacctcaagcaattcacctgcctcggcctcccgaagtgctgagattacagttgtgagccaacatgcccagccaggatgtaattttttaaagttggtcatttagtcttactgtcatactttttaggttgagcattcctaatccaaaaatctgagatccagaatactccaaaatttgaaactttttgaggccagtattctaattttctaattagggatgctctttaatttttaaagttggtcatttagtcttactgtcatactttttaggttgagcattcctaatccaaaaatccgagatctaaaatgctccaaaatttgaactttttgagtgccagtattccaattttctaattaaggatgctcaacctgtaaatataatgcaaatatttcaaaatctgaaacagtcagaaatccaaaacccttcttggtcctaagcattttggataagggatactcaacttgtatgatatctgactatagaagcattagctttctcctaatattcctctttaagtaagcattaagaagagaatatgtgtgctatttcccatacaaaacctgttagagatatttaatagcatttcacttattttgttaaaattacctattctctttgctttcattactaatcccttatcagctacattccattggtgttaagctacattctaatgttaatgtctcctgtgtgattgcttttggttaattattctcattttccattcttcaaagtcatttttgctttttgtttgtttttatttgttcataaagcttttttgtttctgttacattatgtagttttgtaccaatggctagaagcagatcgtcatggcaagagccaaggtgctgcaaatacgacttcaggtaaaaataaaattaagaacaaggatgggctattataaatcattattttaattgactgcaagcccattataaatgtttctttattcagttttgcttggtcagacttgtagatgttattttatgtttctcttctctcatctgcatcttaattttcataaagacttcatttgcttcaagccttgaaaacatgtattcagtagtctttaagctctcttggcagatatttcctactttcttaggaggaaaggattaattgcagcttcaatttagtaggaggttatttggcagtgttacttggagttaagttgatatgtagttgtagcagtcgtacaaatttatagtccttgtttgtttcaagataatatttaaaaggtaaattttaagtacaggatgcttatgtaatttttcatttcctgggaatccaaattcttagacttggttattttcctgttttttttycccagcagtaaattytaagttagaggtaaaacttgtgtttaaaatgagaagtataggttgttcccccatctctcatccccaaaagtcatcaccaagattctcttcttttggccagtgctagtaggaatagctgcatccagtcatttctaaattctyttttttttttttttttttgagacggagccttactctgtcacccaggctagagtgcggtggtgtgatcttggctcactgcaacccccacctcccgggttcaactgattctcctgcctcagtctcctgagtagctgggattacacgtgcatgccaccatgcttggctaagttttgtatttttagtagagacaggatttcagcacgttcgccaggctggtctcgaactcctgacctcaagtgatccacctgcctcagcctcccaaagtgctaggattacaggcatgagccacagtgcccggcccatttctgaattcttaacagtgatatcagaatttctacatagttagttcttcccctaatatccttccaaatcatatttgccaagacagctgtgtatatatagcaatgatctttcctgttaccccttttttaagcagtctaataagcagtggtggtggtggttttgcttttcttttgttagatttgttactgttttgtggctttttttgtttttgtaaaattatttctttctggaggtggtttccttcttgttgattctttgtgtgtcaagaaggtgcaatgttccttagttaacagaacaattatattgagaatggcactttcatgacctttctgatatatctcctgtcccattaataacttgatacatgaatgaagataatgttattttaactatacacaggcaggactgaattaaaaggtaagtgttgcaaggagttttatgataggttatgtcttgtttcttctgcttctgcagtgtttcatattttatttacatttgtggataataaaagcaagtatttctggtgttagagggtaggtgaaggagagggtttcttgatggctatcatgaagttacgctgttgctgtgtcagtacactatcagcagcttagactataactgggaggaattttgttttttctctaaagtgaaatgaaaagtaacctaaaaaatcaatctatctttcttttcttttcctttctttcctctctttctttcccttccctcccctcccctctcctccccgccccctccccctgcccttgcccctgcccctgcccctacccctccccttgcccctccctgccccctccactgcccctccccctccccttgccccccctgccccctccgctgcccctccccatgcccctccccctccaccctccccatgccgctcccccttactttcctttctttcgagatgaggtttcactatgttgctggtctcaagtgatctgcccacctcagcctcccaaagtgctgggattacaggcatgagccaccacattctggccaagtaacttttttttaaatgaagaagtgaataatttacaattcttagtgttcacaggaaaatctagcatcagcttaaaaacatcatggactcttcctgaaatcagttctgagccctgaatctgttcttcagccacattgactctcatggacagtttcacattcctctgctgactttttgatgcttacatactctagaagcttggtgcaaaaattgataaactctccttaaggatgtctgacaatttctcttctagaaatgaatgctctcaactcttagaagatggaagtatggagtagaaaaatacagagatgamatgtttgcctaaataagtcagaggaatctaaagaaaataatgatcattagccaaggacttcagttagaaatagtagtttagttgcctaagcaaatrtatttaaattatgtgtccttgttcaaaaaaattcctatgtattttatattgttgtctccagcaagatttttgagtgtgactttttcgtccttctgcgatctgttttgcattccaaggtggtttttttttttcatatttttacccaaaatagaaactgagtctaactagaagtcaaatacaattcataaatcaaattgctttgtgatatttttaatagtataaatactggtaaagtgacatttatcttttgctgtaacagctagtattttgcacttaattagaactctaaaagtaggaaaacacacaacacaataaaattgttgcaagatcttctagttccttgatcccaaatttttgacattgggaatttaagatccgtctaccttaaaatatttcatgaaactaaaacatttagggataataggtcttaagggaattactctggttgaggaggttaaaaaaactaatctgatagctattattgaattttcaatgttttactttttaaaaaatttattwaaaaaaaaataggaagaaaagaaacggggtctcaccatgttgcccaggctggtttcaaattcctgggctcaagcaatcctcctacctcagcctcccaaagttctgggattacaggcatgagctactgtgcctggcctgaattttcttagtaattaaaatgtagcctacttttatgtttccagaattttgccagataatgaatttaacttaggatagctcatttattttaaaaggttagtatgtttaatgtgttctgtctactaaacaggatgactcagcaatgatgtttctaattctgttaattttgttactggagaacctggatatgcaatcacatttctcagagatttttgtggaaactcaagcaaaattgcttcctttgagcactgtagcatgggggtctaagtgtgtataaaattttaggatcataagacatatgattagcttaatgtaagacttttcttttctgaagtaaatgttttcatatagtttattattaccacacactgaawtgtggaccataattaggttacarcaatgattatattaccatattttgatttttagtatcagttgagtagccaggattttaaaattcagattctgaagttttaaatgctgctctgttgttaacagttttttagttgtccrtcgggattttacaatacagatggttagaggcagaaattgaatcagatctcaayattatcagtcagtagtaggactataaaataaatagaaaactatgacatgcttttggaaaagttcwagatattaactatgtattatttgttgtaggcgaaaattttgaccagagtcctttgaraagaacattcaaatccaaagttctcgcccactatcctcagaatatagaatggaacccttttgatcaagatgcggtgaacatggtatgtgttttttttcccctcatttactctttagccttgttttcactttattaatatgaaggtagtgactgtattttgaatgtctaccttatttcatttcatttattctttaagtgattttataagaaatgtgaggccgggtgtggtggctcacacctgtaatcccagcactttgggaggccgaggcaggtggatcacctgaggtcagtttaagaccagcctgaccaacatagtgaaaccccgtctctactaaaaatacaaaaattggccaggtgtggtggcacatgcctgtaatcccagctactcrggaggctgaggcaggagaatcacttgaacccaggaggcggaggttgtggtgagccgtgatcacgccactgcactccagcctgggcaacagagcgagactctgtctcaaaaaaagaaaaaaaaagaaatgtgatactctcctcattttaaagatctggaagcagaagctcagagaagcaagttacttgcccagggtttccatagttaataagtttatacaatagatcctaaaagcccattttagtttcctactattaaactgtgttgtgcatttgtattaatatgtagaagctttgataaacagtgatattactttattggcctgagaggagcctgatggaaagagcctgattacagttctcatgtttcaaggaatattgtatggtaggcctataatytgtcatttttacagacartgtaaagatgaaaagcaacttaattgcgttatttaggtacagtagaaatctgaatttgtattattgttaccggtggatggagtccagcttcttggtgtctggaacaaaaaattggacaaaacatacaaacaaagcaaggaaagaatgaagcgacaaaagcagagatttattaaaaatgaaggtacaatccacagggtgggagcaggcccgagcaagcagctcaagagcccattatagaattttctgaggtttaaataccctctagaggttttccattggttacttagtgtacactctatgtaaatgaagtaatggcccacgatcagtctgtttggttgtgggaggatatcaatcagaagctgaagcaaagttacaccctacacaaacatacaaccaatcagaggctgaagtgaagttacaaagttacactcctatgcaaatgaagacttggcccacgaccatcctgattggttgtgggaaggaaacaatcagaggtactttcagtttttagtctgtcatgcagaaaaagggtagggggaaggtacaaagggagtagccactggtccttttgctacttgggcatggaaagttggggttttccttttgatttagttctagaaagtcagcatgaatcggccttaggttccctgcctccagaccctgttctcctgcctcataatgagttaccagtgctgattaaatgtctcttttatccctgcatgatgttgtgcatctataagcccagctactcaggaggttgaggcagtgtgactgcttgagcccaggagtttgagaccagaatgggcaccatagcaagaccctgtctcaaaataggtaggtaggtaggtaggtaggtaggtaggtagaggtaggtaggtrggtrggtggatggatggatggatrgatagatagatagatagatagatagatagatagatagatagatagaagatagagagatagtcaaccttgagagggtcttagaaataaagtaggtcatagttttcagattatttaggaagggctcttcttagaagcctgaataatatttgagatgttcataaactctatgattatataattcagggggccccaaagtaaggaggtagcaggcatgatagatatagaaatgaattgggtatatacgtaagaatgggaaaaaaataaaaaagatacagaaatgattaaaggtgaactgagacacagtgatagccattgctatttttgagttgttttgtttggtttttgtttttgtttttgagatagtctcgctctgtcacccaggctggagtgcagtggcacaatcttggctcactgcaacctccacctcctgggttcaggcaatcctcctgcctcagcctcccgagtagctgagattayaggcgcacaccactatgcccagctaatcttttgtatttttagtagagacagggtttcaccatattggccaggctggtgttgaactcctgacctcaagtgatctgccctccttcagcctcccagaatgctggtattatgagcacatcccaccacacctggctcatttttgcatttttagtagagatggggttttgctatgttggccaggctggtcttgtactcctgacctctagtgatccacccgcctcagcctcccaaagtgctgggattacaggcgttagccactgcacccggcctcttttttagtattttaaagatattgttaaaagactccattataacctgataatctaacagaaggaaattaatattcactagatgcctgctagagtactttatgtatgttattttcacatacatgtttacatgtacccagtgagaattcttatattttcaaaggttaagtaatttgcccaaagttaggcagtaagactcagaaattaaatccagatcatttttactctctagctcactttttttctcawctgccttgctgccttcccaaaagaaaaactgtgtaactgagttttgatctacactggaaatgttatgggtcacactggaccctttgtgatatttttgtatcacagtaaactctttccagcctgggctcgctctagggaggggatagcatggtgctatttgtaaggacaaatgcctaaagcacttggcactttgactttgattccttacagagtacaatgtggttattttcctaaactgttatacaatactaaaataatcagagatgccattttgctggaagttaatattgtagatgcctagcgtcatctttggtgaagactctactatagatattatgtagaacacaactgttagttatctttataagacttggaagagtccagacaagcatctgactaaaatagttgaacagcagtgacaaaaaaataacttatgagctgcttatgcagcaaattaatagaaaggcatttaggaaaagagtgtttaaatcaagcagtggaaaactggataagaatatgaatagatcacaatacttaatcttcttaaattagtaagatatttcaaaatataacttattctgtgagaaatcagaatggtattcaaagtgaggttctagcctaagcaacatagggaggccctgtctctacaaattaaaaaagaaatagctgggtgtggtggcaccatgcctgtggtcccagctactctggaggctgaggtgggaggatcactggggcctgggtacaagtacgttcttactatatgaatccacagtcatttggaacaaaatgccacccttcatgtgttttctttcttttaatcatttgaatgaattaatagtgagatatccatgatagcttttgcctctatctgcaaaacattaatctttaaagtaattatcagcttccttgatctttgatattttctttactccttgcccctgaggttattttatgtaagcagcaaaagtttccccctgaagaataatcgcaaaggctgtgttttgatggttaagcaccacatagcattttttttattgctgcaaatctaaaaggatttgcttgtactcctggaaaatctctgaaaagcatcccattaaagtagtttgcattcgggtcacagatttactgcctttaatttcctctttgatttactagtaagtgcgtttgtatgaagctgtaatttattcccacctaaagatataaagctttgtcttgcctttagcaaaattccaccgcagtgagtcatcaccttctgtaatattagtcattcctctaacaacagtagtgctttgaataaaaggtcattaatttcatacataaattaagtacccaaagcagtgaactttgttaaataaaatgtttaatgtgtatgagtacagtgcaaataaaatagaaaataaatacaagtgacaggtgaaataattcctgaattagttttttttcctcagttgctgatcagagatttttatgaaaaaaagtaaatatcacagaacagaaagaacaatacaataaacagtcaatgtatgtattaatcacctagaactaacatatgtcaacattgacatgtttgcttcagagctctacatttcctttcctttccctttcccttcctccctttctttgctttcttttctttctttcccttgtttccacagtctcactctgtctcccagattggagtgcagtacatttaattaaattaattaatttatttgagacagtctcactctgtcaccctggcagttcagtggtgcaatcttggcttacttacaacctctgcctccggtgttcaagtgattctcatgcttcagcctcttgagtagctgggattatagtcgcgcaccatcacgcctggctaatttttgtatttatggtagagacggggtctccctatgttggccaggctggtctcaaactcctggcctcaagtgatctgcccgcctcgacctctgtgagccactgtgcctggtctgcatttcattttaaatgaaataaagcattgcaaacagagctgaaggtcccccaccccactttcacatctctttgaggtaatctgcttattggcatccatgactatgtaatattctagttgatagatcttatctttaagcctgtgttgtacctaagaattcataggaagaaaacrtggtcaataacttttaagcaaactgtatgaaaatataaggattctattttttatgtctgtcctaatgaaacatcataaatatattttaggtaacaaaagagtaataactattataaagctcttactttataatttgctgttaactttgattacaaagaaggatatagtggaatgaagagcaaagagtaaacggtgaaaggttggctgaagaaacctattcagatgcttatcttgtaagagtaaaaggaaaaagggctatatatactttttgtagacttagcaattacttgaatttgaaatggataatcccaaattacattcataggtttgacattagaatgaagataagccctcattttgagccaagtttaggttcaagctcacaataaaattttttttttttcttgagacaggttctgactctgtcatccagactggagtgcactggtgcaatcttggctcactgcagccttgacctcccatgctctagcgatcctccacctcagccccccaagtagctgagactacaggtgtgcaccaccacgcctggctaatttttgtactttttgaggagacggggtttggctatgttgcttaggctactctcgaactcctggactcaagcaatctgcccacctcggcctctcagagtgctaggattacaggtgtgatccacgatgcctagccatatctcacagtaaaattataggaatggggctttcattgctggaggaccattgctggaagacccttttgcccccgccacccccatcctctcscccgtttccttaacattgcagctagaatatttcactggcatctcaaatgcaacatatccaaaactgaattcattattcrtcccaccagtcttttgtcagtgaatggtacaaccatccacctacttgccaagtccaacaatgtacacatcaccctgaaagttctcacttactcaccctctcccatatataatcagttatctgtctacttctctctgttccgtatactcaccttggtccaaaccatcaagatctcttacctggactcctgcagtaacctgtccatttcattcctcatactatagcttctgcttctgctgttccttctctctggaaggctcttccacctctccttcacctagtgaattcttactattccttcagacttcactgtaaacatttatatagagaagctgctcctgaccatcaccttccaccgtcttcccagcactcaggtcaccttaggttctcttagtaccttgtatacctttttgtagcacctatctcagttgcagttaaccaattacttagctagtagtcaactgtgtatctcgtgcttaatgtaagcaccatgagaacaggagcagtgtctcttattcattgttatatccctagctttgcgcatagtagatgttcaaattgttgaataaatgaagtgatacttgcttacaatacttctcttccctgtccttgactaggtgtgacctccactgcaaaaccatctcttaagcaggagtagttactctgtcttttcttatgatatctcgaacagagtccgtagcaacactgatcacatttttttggtaactgctggtttctgtgtctgtctttcctactagactgtgaactccctaaaggaaaggattatttttatctttgtcttttgagttaccaagatctaatgcaaaacatgggacaaaataagtgtttatggaaggagggagagaagaggggagggagggagggagacattctgagaaatgtgttgttaggtgattttattgtgcaaacatcatagagtgtatatacacatacacagacctaggtgatatagcctactatacttctaagttatatggtataacgtattgctccagccgttgtcctataggcagtccattgttgaccagagtgtggttatacagtatatgattgtatttgcataatgagggagaggccatggaagtcatagaactacaagatgtggaaaaaggaattttaaaattctagccaaactgcctgaaacggtctagagaaatataagaacatttgctgactcaaactgggaaagttacacacttgtcattataagcctgctttggctaaagtaatctggttactagtagtartctgatcatcagtgacacctctaatttttagttgttttattgtgggatggtgagggggtattgttagtagatagcaaagttaagggttaattagaaatgtttaataccgtgataaacaaatcttgatttatatttcaggttttctgagatttcttgtagttcctgacagtttaacaattctgatgaaactcaggttttctgagaaagtatcttgtagttcctgatataaaacartactgtatatcttttaaaaatggaaaaataatagcattttgcagttcatgtttcccgattagatatatagttcttactttttttgatttgttggaagagcatttaggaaaaattcttacatctgttgtctgtagcatagaaagccattcttcactttgagtacaacttttggcaagctttttctgtaaatgtttgaatgtgcgctcaagaaagctacaaacccttaagggaatatttggcagctgttcaacagcagttgagctatgattttgtgatttaggatgacaggaacgcctatcaattaaattaaatctttatgttgactttggtggtcactatgtttctgtattgcctacttgatggaaaaagaattacaagctgaagtccaggcactgtggctcacactgtaatcccagcactttgggargctgaggcgagtggatcacttgagaccagaagttcaagaccagcctggccaacatggtgaaacctcgtctctactaaaagtacaaaaaaaaaaaaaaaatagccgggtatgcacgcctataatcgcacacacttgtaatcccagctacttgggaggctgaggcaggagaattgcttgaactcaggaggtggaggttgcagtaagctgacatcacaccactgcataccagactgggcgacagagtgagattccgtctccaaaaagacaaaaaaagaattacagaccagatcaagaggtgaactaagcctggtgctttacccccagctgtttttgtttgttttcttgttcattcatttattcattcaaccaattgttatatgccatgcactgtgctaaacaagtttgagtttagcctggagcaagaataattcaaattatcccttctacaatctttattgactacaataaatgtgtcaaatgaagtttttgggtttttagggttttttgttgtttttgtttgtttgtttttttgagacagtctcactctgtcttctaggctggagtgcagtggtgcagtcttggctcactgcaacctctgcctcccggattcatgcgattctcgtgcctcagccttccaggtagctggggctacaggtgtgtcccaccacgcccggctaattttttgtatttttagtagaggcagggtttcgtcatgttgcccaggctggtggtcttgaactcctgagctcaggcaatccacccgtctcagcctcccgaagtactgggattatgggtgtgagccactacacccagccaaatgagtttttattcatgctatcagcagagcaactcattaacttgttatgatgaaatcagccttaatgtgaacgtagaattattaaaagattctgccatagcctttccttatacagttattcctaagactaggartaagtggcttttaccccctaccaaatccaggtattcataggttttacctaagtctatatctcattctatccaaatatacatagtaatttaatatgtaaaagaattgagtaaatctgccttagtcctttccacatctcatattcaatgatatgaaatatgaagacattttcactggtgcactaatgctgagcttcacagttttttctttttacccatgttatcagtcaccacctgttatggccccaaatggtatattattccattgcagttcccttgaatgtttaaagttattgaaatgaagtactagcccttgagtagctggcaatgtagagatcaaacagaattatacaatactagtaatgtgtatgtttatataatgtacatatgtttacagtggtgcaagactttaattgcttctccacaataaatactttttagaggagtaacattttatggcatgcaaaagatgaagagaacactattttttatggaaaggtaaaggaagacctctctaaggtagtatttatgtagagacttaagggaagtaaggaagtattttgattatctatcgctgcatgacaatccatccgcctaccagttaatggcttaaaatagggcttggcaatttttttcatgaagaaccaaataataagtagttgaggtattgtgggcatacagtttctgccacagtcacccagctctgctgttgtagtgtgaagrcatccatagacagtgcataagtggatggttgtgactgaatcccagtgaaactatttacagatcaggtggcagattgtatttgacctaagggtttttcttactccattcctcctgctaaaataaaatacttcagactgagtaacttacaaggaataagaatttatttctcacagttctagaggttgaaagtacaagatcaaggtgtctgtaggtttagggtctaatgatggcctagtctctgcttctaagatggtactttgttattgtgtactccagagaggacaaatgttgtatcctcacatggcagaaagcactagggtgctgctcccttcaaccttttataagaaggacgaatcctttcatgagggcagagcctgcatgacttaatcacttcccaaaagtccccaccttttaataccgtcaccctgaagtgatgttccagcatatgaattttggaggcacacatatatttaaacccatagcagggctgttgtttgctgacccttgatttaaagcaacaaaatcattacttagcctacatatctgcaatgtaggtagcttttggttggctgcgcctgtattctacttggtgttagtttggaaggtttgaagtctgaggactgaaatcatctgaaagctcacccactcacaggcctgtctcctggaccaggcatatagctagggctccttctgtctctgtgtggtctttcatttggtctcaccagtcaggcagcttcaggctagctaaactttttatatgttgcctcagggctcccagagtgtgttaccaggttaccagagagagagagagagagagagagaggagatggaagctgtattgccttttttagcctctgctcaaaagtcactctgtcacttgtcactgctgttgcattttacttgactaggccaggggtgggcatacatggcccccaggccaaatctgtccagctgactgtttttataaataaaattgtgttggaacaaarccatacttacgtgtttaaaggttggtacaaaagtaattgtggttttggacagaattttaaatcataactaggctcaagcacatccttattaatcaaaatargaaccattacaatcaacacatttttgccaatgagaaataagtttgtttattcctgtaacgtaaaatatccgtgctttgggatttgatgaactcttggaaagcattttctgcatcctgctggttgtggaagcgttttccctgcaaaaaattgtcsagatgcttgaagaagtggtcagttggcaagaggtcaggtgaacatggtggatgaggcatgactgcatrgcccaattcgttaaacttttgaagtatttgttgtgtgatgtgcggtcaggcattgttgtggaaaakaattgggccctttctgttgaccagtgcccgctgcaggctttgcagtttttgatgcatctcatcgatttgctgagcatacttcttggatgtaatgatttcgccaggattcaggaagctgtagtggatcaaaccagcagcaggccaccaaacagtgaccgtgacctttttttggtgcaagtttggctttgggaagtactttagagcttcttcttrgttcagccactaagctggtcatcgccggttgtctaatgaaatccactttttgttgcacatgacaatttgattgagaaatggttcgttgttgctgtgtagaataagagaagacgacacttgaaaatgatgcttttattttattttgttttgttttgttttgttttgtttgagatggagtctcactctgttgcctaggctggagttcagtggcacaatctcggctcactgcaacctccgcctcccaggttcaagcaattctcctgccccagcctcctgagtagctgggtctacaggtgcatgccaccacgccctgctaattttttgtattttagtagagacaggatttcaccatgttgcccaggctggtttcaaactgagctcaggcaatccgcctgcttcagccttccaaagtgctaggataacaggcatgagccaccgcacctggctccaagatgacgattttttaaaatttccactcagctcatgaggcacccasttaccgagtttttccacctttccaatttgcttcacatgtcaaacggccatagaatggtcgacgttgagttcttcagcaacttttcatgttgctgaagagggtcagcttcagtgattactctcaattgatcattgtcaacttctgatggccagccactatgctyctcatctccaaggctgccatctccttttcaaaacttcttgaaccaccactgcactgtgcgttagttagcagtccctgggccaaatgcattgtcgatgttgtggttgtctccactgctttacgacccattttgaacttgaataagaaaattgctcgaggccgggtcgggtagcttacacctgtaatcccagcactttgggaggccaaggcgggcagatcacttgaggtcaggagtttgagaccagcctggccaaaaatggtgaaaccccgtctctactaaaaacacaaaattagctgggcatggtggtgcaggcctgtagtcccagctactcgggaggctgaggcttgaacctgggaggcggaggttgcagtgagccaagattgcgccaccgcactccagcctgagtgacagagtgagactctatctcaaaaaaaaaaaaaaaaagaaaagaaaagaaaactgctctaatttgcttttttgtctaacattttcagtctaaaatctaaaataaacagcaagtaataagtcattagcaaaaaaacataaagcgagaaatgcccmttaaaatgatggtccaggctcagtggctcaagcctgtaatcccagcactttgagaggacgaagcaggcggatcatgaggtcaggagtttgagaccakcctggccaacatagtgaaacccatctctactaaaaatacagaaattagccaggtgcagtggcagacgcctgtaatcccagctacttgggaggctgaggcaggagaattgcttgaacttgcgaggcagaggttgcagggagccgagatcgcgccactgcactccagcctgggtgacagagcaagactccgtcttggaaaaaaaaaaaaaagatgtatactataaccacatttatttaaaaagtgtattccaatgtcaaatggcaaattccaacaatgcaaaaaccacagttacttttgcactcacctaatacaatgtggagtggagcagttgtgacaaagactgtaatggcctccagagcctaaaatacttatctgtctctttatagaaaaagtttcccagatcctggtataggcactctcagcagcccacccaggttcaaggagagtgagctccacttcttaatggggaagtgtcaaggtttggaagagtgtgtgaaagtagaaatattattggagctatatctgccacaaggaatgagtcatgtggataccaaggggaagaaagctgctggaaaagggaagagcagattttgatgggagcacgcggggtgtgttcatagaacagtaacgtgccattgttgctggagcagagtgggtgagttagagagtataagatgagggcagagaggttgttgggggctgagtcatgcagggcttccctgcaggccattataaggacatcagcttttagtgagataagagtccattggagaatkttggcaagagtgacaagatctaacatattttttaaggattgctttggctcttataagggaaatagattatgggggacaagggcagaaacaggctgttacatccagacaagaaaagagggtgacttagattagagtggtaagcgtaaagatcaaaacaattactttctgactcaggaggctgaggcgggaggattgcttttacycaggagtttgaggctgcagtaaactgtgattgtaccactgcacttcatcctgagtgatagagcaagacctcacctctaaaaaagaaaaaaaaaaagaagcaacagcaattagtttctgcatgtatttttgaagatagaattgataatatttgctgatggattggataatggggtaagtgagaaagagaggaagaagttaaagatgactccaaggtttttgtcctgggcaaattagatggatggaattacagaaaagactgatataagaagaaactgatttggaggaagaaatcagaacttcagtttgggacatggtaagtttgagttgcctattagacatcttgatgggattgtcaagtagttactcagttaagagtcaggttcatgagattgtagatttgggagttgaaagagtatatttaaaatcatggaagaagttgctctggaaatgaacttggatagaaaagaaacccaaaatgtggcacaatcatgacatgagcttcaaagccaatagtttttagggtaaaggaaaggaccacaatctgaaatggctgtgaggagcagtttggacacccacccgccttcatgcttaatgacaattgtgttgcattaatcctatcccaccatcaagattttgtttttaagcagtgggaacccagaaatcttaacactgaaagaattccactctacagaataaatgaaagtggaatgtgcataggggaagaagggacactggccctctcaacttcttcctctagcctctcactcccttccaaggccctgagacattcctgctgcctctttggaacccctttgaaaaccactccccttagtgttccaagatggatgtgctaagaggcacrtctaattctgtccctctyctaaaaacccttcagaggtttcccattgtcctccccacagttctaacatggcctaccaaggcccttcatgggctagcccctgattatttctcttgctttctctcacgtcctcccaccttgcattctctgccccacccacactgacctgttcagttcctcaaactcttctgggcttttgcacatgtcctctctgcctggaatcttctttatccactaagacctatactcgtcctgaggtttcagttgggcttcattttttcctggtagctcctycttttctaatgtgtgtcttcctactattatatgtttttcccatagcaacccttatttaccctatcatagcacttcccttactttatagtttatgatttttaaaacttacctgttaaccttactcgactggaaataccataggaccatgggccatgtctgtccttcccaccattgtatcatagggcccctctcataaaaggcacttaataaatgttttttgacggtttgaatgaagaaataaaggaattgtattttcttggtaatgtggggatgtgggagacagtctaaattttgtaccacatcagttattaaatatagaaaaatagtaataatatatggttaaattatttctatgtaaaaagcatattgcaatacaaaaatagaaatatctaaatatgaataatgagtattaggatggttgaattacaagttctgttttccttagtatatttcaacttttctgtaatttcacttcttttatttaaaatgttttaaagaatcaattctaattttctgtgcattttaagtgtcttaaatatagcatctttagctcctctgggtaattttgttctcaagtttcctcaatcctgggtagttcccaagaactagagcataatctctactagaagtaatctaaaatgccttgtttctgtgcttctgctttagtagatcaaaaagctttcaatttccaaagtttctttttcttggataaaataccatactattcaaaatagcaaagatgacactgttgtttttattattctttgtttaacttttttccacttcctaaatgagccttttcctatttccctgtattaaatacttgagtactatttttgtgaagtgctttttaatatttgtgaaatgcttttgcctactctgtcttcaagtcgttgatacagcaactattgtagataaaggaactgaggctcacagaagttatatggcttgctaaaggccacaagcttggttagaggtttactctgggactaaatcagtgattctcttgttcttagtaaagccccttgcatgtaacatcacacagtaaaagtttttcccttgtatatactccttttaagaataattttatatacatgtgtatgaggaatttataatatatttctaatttaaggctattgcgaatattaaatctggataaaacctgtctttttgaatcctgttatgttaaaaaaacaacatttatttctggcttgaagttatttgtgtactgcattctgatttttttttttctttctttcacagttgtgcatgcctaaagggctatctttcaggacacaaacggacaataaagacccccagtttcactcatttatmattaccagggaagatggttctcgcacctatggttttgttctcactttttatgaagaagttacaagtaagcaaatctgcacagcaatgcagacactttaccagatgcacaacgctgagcattacagcagtgtgtatgcttcatcttcctgcagtatggactcattggcaagtagtcttgatgaaggagatacaacttcccttttgaaactccagcgatacaactcctatgatattagcagagacaccctgtatgtttcaaaaagtatatgcttgatcacaccgttaccattcatgcaggcctgcaagaaattccttatccagctttacaaggctgttacctcacagcagccaccacccttgccacttgaaagctatatccacaatattctttatgaagtaccccttccacctccagggaggtcactgaaattttatggtgtttatgaacctgtcatctgccagaggcctgggcccagtgaactccccctctctgattacccccttcgggaggcatttgagctcctgggattagagaacctggtgcaggtgtttacctgtgttcttttagagatgcaaatccttctctactcacaaggtaggttttccttggattttacattttccaaaaacaagtacttttgctcccaactactgtgtttccatggggtrtattattagaaccgaataatgatcacagtcttttctgttttgtgtaaagggagcaggtatggtgggaccagyggctgagatgagactgctgtttctctttgaggtggcagtcagtgactgcagagagaaataggaaggaacacaagtgttaacttggctgatttgggtrtatttatttattaatggaaatagcccttttttcctgataatatataatcgtcattaagaaaacattttttcttcatcataatgagagtgagagaactctgttactaccagaaacgtgtagacttcccattctttatggattagtaaaggttcacatcaaaactcagcgaacattgaaaagggataaatgaaattgttgactctgcagcttcctgaggcaatcaactttggatctttgcctgtgggagcatttcatctgagtgagagaaaaggtgagcaggcatgagacagatgactttcccaggtctaacagttctgccagagttgtgtgtgtgtgtgtgtggttttttgtttatgttttttaatctcagaaggaagttatctttgtggtatctttcattcaaagttcttccaacacatattaagaaaataacaaactatggattttattttaccagtacrtttgtgaagactaatgctgagcctagactaggatactagttgtcatctgaatatgaatgtgtagagaaaatagagatgctatgtcttaatggatagtgaattgaaggaaattataaaatagtacctgtacactgatagattcttcaaaaaaggttacacaaatatttggattcacttttttttttagacaagttctcactccgtcacccaggctggagtgcagtagtgcaatcatgggtcactgcaaccttgacatcccgtgctcaagctgtcttcccacctcaccctcctgagtagctggtactataggaatgtgccaccgcatcagctaattttttattttttgtagagacggactgtcactgtcttgccctggactctcaaaatcctaggctcaaatgatcctcctgccgtggcctcccaaagtgctggaattacaggcatgaagcattgcacccaactggggttagcattttgctaacttgtatttaagctggcagaattgtagtgcaatcccgactggtgccgtcaagcttattttaccactttcctttttttatttttctattttaaattataagtggggctgagccaagtagactatatttgtacttccccatcttgtgtgtatgttgacactatttgtgtgttgacagccgttcacaaggttgtattttcttcagtttatccaacataatgttctttgataatgtgtttcatgtctcaatttttgttgtcaggaagttattctctaatgaccaatctaaattctttcctttcttctttcacccactttctttttatatgtatatatttaaaatatattttagtgaaacactttctcatcatctttagataaaaaaaaaatccattttttaatctgaagctccttgggcattaggagttaattgctttctgctccacagatttcagatgccactgcactaattccccagtgctcttgaggcagagcttagacatgtcctcctcagttggaaatccttgtggcaacttcaggggcttgattcttactgactgttaaaccactttcagttttgcattcactgaagcaatatgcttgtgaacttgatggatatgtgtgttttctaatctgagcatctttattatgtctttttcccaatatggacacctttttgtacttttttattctggtaacaatatgcagtttctgaggattctgtggatctccgtcatatttttcatgatctgcaagtgaaggctgaaacsctttatatggaattcttgacctggtaaatttgtgatgaatccaatctatgtaaacgagagacttcacaccttttgtcccagtctgtagttcattttgcctcttgagctactgacagcaaagtccctgccataagtgtggtggctgttctctttagagagagcgcctgctaaatattcagcatgaaccttccsaccagcagaagctgaggactcactgcttccattattacttacagatcacctttttgtatctgaaaaattttaccttaagtaattctctcttcctttcttccttttatttccctgaatggagtagggattagagaatggctagaaggggcagaggcttggagcttaataccttatggtgttttagcccattagaaaaaaataacttttttttttttttaagacagagtctcgccctgttgcccaggctggagtgcagtggcatgatcttggctcactgcaaccaccgcctcccgggttcaaacaattctcctgcctcagcctcccgagtagctgggactatgggtgcgcaccaccacacccagctgatttttgtatttttagtagagacagggttttcaccatgttggtcaggctggtcttgaactcctgacctcatgatccactcgcctcagcctcccaaagtgctgggattaccggcgtgagccactgtgcctggccgaaaaaaagaactttgtattctagacttagaagaaatcttaaaggccattttcttgaatcttgaagttcaatttatttatgttctgcctagagaagcaatttgggttagaaagaatattgggggtgggtgggttcttttgttttgcctttaatttttagagatggggtctcactgtgttgcccagaatggagtacagtgtattcacaggcacagtcttagcacactgcagcctcaaactcctcagctcacaccatcctcccatctcagcgtcccgagtagttgagactgcaggcacataccaccatgcctggtttagagtattggtttttgaagtcataacaatcctgggttcaaatgtctactctgtcatttattaactatacccatgggcgagttaggtaatcctcctgtgtgacagttgccacatctctatagggataatagtttgggttttttttttttctcctttctcactgatctattatgacaattaaataagaaaacgtgtataaaatacttagggtataattgacactgactaaatgatagctgatgctattataataattactagttttattagtcccatataatcttctataaattacacttatctctaagttgtgaaggttcaacatattactacatttaacataaaacctttttaaatgatacagtcaagagtttattccagagttgagaacctaataaatgttcttttatattgtataccatgctttttttagaaggcaaaaaaaaamyccaaaagcttccattatcacacttcctcttttattttttatttttatttttttttattgagacggagtcttgctctgtcacccaggctggagtgcagtggcgcaatctcagcatattgcaacctccacctcctgggttcaagcgattctcrtgcctcagcctcccaagtccctgggactacaggcgcgcaccaccatgcctggctaatttctttgtatttttagtagagatgaggttttgccatgctggctaggctggtctcgaactcctgaccctaggtgatctgcctgccttggcctcccaaagtgctgrgattacaggtgtaagccaccgcrcccggcccacacctcctcttttaagtagcaggttatgtctcaccgtttgtggtctgtcctgagctctcctatttctgctctttttttgtttgtttgttttgagacagggtgtcactctggtgcccaggctggaatgcagtgacatgatcgtagctcactgcaacctcaaactccagggctcaagcaaccttcacccctcagcctcctgagtagctgggactacaggcatgcattaccatacctgactaatgttttttatttttagtggagatgaagtctcactacactgcccaggctggtttgaaactcctgggctcaagcgatcgtcctgcctcagcttcccaaagtgtagggtttacaggtgtgagccactgcttagcttgtcctgtttggtttgtggagtctgttcaggagttttagctcattaatatctaccaatttatttcagtttcaaatgaagaagaataagcatttatggatatggttttatactcdatttttttgtaatctgtatgccgagaacaacagagtgaatcctgagattatagagctagatttttaaaaaatttaaagtgacataccccaaaaaattgccatacagtaaatttataaccattcactaaaatcactctatgttaggaattgtgctacaaaaaggcattgtatattttggatcttttccctacatttaatcctctcaacagcagtgrgttagtgctgttgtgcattttttgttgaggaggagattgaggcttggggaaactaagtaatctgcccaagatgatacagctagtaagtaatgtagtactactaagaattgggtttcatcagtcttttttcagatgcttaaccactgtgttaactgtattgggcactgcacttaacctctccttatctgtctcaatatttatttttaaatgattaactcattctgtgggtctattgtaaaggtgtcatgcgaagtaattgtagagtataaaatgaaagcgctgtgtaaatctagattttaatattgacaatgtctcttctattagagaaaaatatttcagttaaatgaatgaaataggtgtccttatgttgatttgtacttgggtgccctcctttactcttcttaactgtgttaagggggttttaataacatgtgatacttcatttcttactcactgataaagctatgccataaatttaaaaacattgcrtgtgctgaagagttaccatgaaaacccaaagtgaatcaaagtaggtggatttcagtgatgaaaatgtccttctagactgatttgaaattctgatccacagcccatttaaaccaattcaatctgttatttaggaaatgcatatatcactgtcactttgcagtggtaactagctagaaattctaagtagagaaaatgtacccaggatgtgaaggctcttttctaggaccccagatcagaaatgggcactttgttctgcaactgggaaatacctggagcagcacagtatgaaaatcagagtatgattcttttttcaaagaactagtggaagaataaaaggggaatttaaacaccattgtctaacttttgataccaataattgaagtctaagaaacatttttgggccttgcttacctcctttggttcttcatagtggaaataaaccactacccacaccacactgcatgcctgtgtgcctttgcagtgcttgtctgccatccctctgttcgtttcattcctctttgagttgtatgtgaattaaccttgtcagaaggtggaagctacttaaagttttcttgaaaaagttgggagctttctcatcacaaattgctaggcatgctcaagtggacatcatagttctccttggaactgccatccataaaccaaacagtactttgctggtcaactgagaggtatttatagggcattgtccaagtgacaattaaatgcagaaggttctcctacagttccaaagtcagtccaagggaaaaagaggctccctatatgtgagaatctcttccttgcattcctctggtaacaagatccagtataaaccatttctttttcaatagggawctcttttgggcactgtcctctcccattagagtgtttttccaaaatcgccttagataccgtggatatttcaagtttcagcattgttttatgtccttcagtcataggggcactttaaatcaatatccaatagcaaacttagtagttgcctctgaaatggaaagtctgtagtccagcaccctgatagttgtcactgggaggcactcgcaggctttcgacataagccctagcccacactccacatacagagaatttgtctgtaccagtgctccagcttctcggttctacactgcgtgagctcaggcaatctaattcattcccatttagcatgtccaattaataatgcttgaagggtagattgacactgtgccctctgttttactgtactaggtaggagaaatggggtgaaacagtcaaacctaagatccactcccataaaacatttagataaagtgtgtttaaacattccaatttcattcaaacttcctccttaatcctatcaaccttaacactttaatatattatcattctaattgtagcctgcgttaaggctgtaagccactgtgttgaggcaatggctcctgcctgtaatcccaacactttgggaggttgaggcaggaggatcacttgagcccaggagtttgagaccagcctgggcaacatagcaaaaccccatctctactaaaatacaaaaattagctaggcatggtagtgtgcacctgtagtctcatctactacaggggctgaggtgggagatcgcttgagcctgggaggtggaggttgcagtaacctgagattgtgccactgcactccagcctgtgtgacacagtgagaccctatctttttttttttaaaaagacttcactagaagattttggtgcaacagcatataaggctctcaaatgagtcccagaaacttctccatcccttgattatttgacccactcctgtgcattaggttttgggtgttcagcaaggtatcttggcccttttgtgagtctttattttgattaatttaccttactatatatccccaagcaattccagatcatgtttctaattgtaatctttcccttcttacattttaaatttctctgtgctggggcaaatagagcagatttgtttgagccctttaattttgggaaaccatctgagggtccttatagtccatgcaacctttggtagtgctatattaagactttcatttcaggctgggtgccgtggctcatgtctgtaatcccaatgctttggaaggccgaggtgggcagatcacctgagttcaggagtttgagaccagcctggccaacatagggaaaccctgtctctactgaaaatacaaaaattaggcaggcatggtggtgtgcccctgtaatcccagctacttgggaggctgaggcaggagaatcgcttgaacccaagaggtggaagttgcaatgagccgaggtcgtgccactgtactgcagcctgggagacagggcaagactccatctcaaaaaagacttttgtttcagtcccatcaaggtctgttttattcaccctatttcttaatagacacttaaaaatttccaccctgctgggttgagtcctttgactcattattaatgtttttattagcatctgtaagatgagagtaagctgagatagcaaattcaataaggcttctcgtaatgttagattttgaagcagtaaagttacatggagtgcccacataaaaggagcctccctaaccgcagcatttgccctgggtaacggatgtattcagcgggtgaatatcccgattatcataaagccagtcctgcgtggcttttgtgcagagcatatcagcttcttcatctggggtgttccacttggaatttatagggggaattgggcagtctcccttctcaaggtaaacagacttcgagtagcttttatccagtccttgagactggctgktccctcaaggattggataaaacagttcaattcatttctgactgaatcatcacctttgtgtctggatcacatatagccatctgtgattgttccatagtgagctgtgggccctgtgtcaacccaagcatgttcttccacgctgcagcatttaaaaataaagatactgcctcgaaattagttcctgtagcagagattcatcaggaagtggatgatacttatctataaaatgagacttcatactatcccctggtttctgttgagggcaggagttcaagaccagcctggccaacatggtgaaactccatctctacctcccttgtggcagattgcttgaggtcaggagtgtgagaccagcctggccaacatcacgaaaccctgtctctacaaaaaaaaaaaaaaaaaaaatacaggcatggtggtgtgcgattgtaatctcagctacttgggaggctgaggcccgagaattgcaggttgcagtgagctgagatcatgccactgcattccagcctaggtgacagagcgagactccttctcaaacacaacaaaattatgtggaaacaacaaagagtgtctctaagatctctggtcaccagaaaggtactccacatgggggaaccacaaaaccaagaaactacagaatacctaagggtgttggtgaggaaatgcccaggcggtttccacataatttttcccgttgggagtggctttgaggctagttgtcacgccctgaccagcagaaatctgagcttggtccagcatcaaggttgacctagcactcttttaaatttcattttagcttttacatagaacaataaccaagggattttatatttaacttttttctgttggtttgcatttccttatatatccagtgaatcccactccctgggaggtggattcatctctaaattccattagttacttttaccttcagtaaatggtctcagcacagstactgctccatcccatgagtggccacccaggaattaaaggttcctaattccccaccctctcattgtccctcttcccaaaccacaggtttccatgagcctgggctgttataacaaatctcagtttttctgacaccaagtgagagagtctttcctccccaacacctgtcaatttgtgataccarctggatgcccaacagttcaattcattcctaactgaatgtcagactccacaggtttaagagttcattctcacaagactgtcctcacttctgatgccagccacaaatgaggtatcaggtgtcttggtttatttgtgttactrtaaaatacctgaggctggttaatttataaagaaaagaagtttggcctggtgcagtggcttacacctgtaatcccagcactctgggaagctgagacaggcagatctcttgagcccaagagttcaagaccagcctgggtaacatggtgaaaccccgtctctacaaaaaaattaaaaataaggccgggcacagtgtatcacgcctgtaatcccagcactttgggaggccgaggtgggyggatcacctgaggttgtgagttcgagaccagcctgaccaacatggagaaacctcatctctactaaaaatacagagttacccaggcgtggtggtgcatgcctgtaatcccagctactcgggaggctgaggcaggagaatcgcttgaaccctggaggcagagactgcagtgagccgagatcgcaccattgcactccagcctgggtaacaagggaaactccatctccaaaraaaaaaaaaaaaaaaaagccagacatggtagtgtatgcctgtagtcccagctacttgggaggctgaggtcgaggatcacctgagcccaggagttagaggctgcagtgagccattattatgtcactgcactacagcctcgtgacagagcgagaccctgtctcaaagaaaaataaaagaggtttatttggctcacagttctgtgcatgtgctagcacctgcttctgatgagggccttgggaagcatctactcatggcaggaggtgaaggggagccagaatcacatggcaagaggaaggaagcaagagagaggagggagatgccagactcttttcaataaccaattttcatggaaagtaagagtgaaaaactactcactcacaaccatgagaatggcacaaagccattcatgagagatccacccccaggacccaaacacctcaccnccaacattggggccaacaaaccatgtccaaaccgtagcaccaggccacatacattttttcttggatgactacaaaatcaggggttccccaacaccatcccccaacccctcaagttctataaattcccagaatgattcacagaactcaagaaagcactttacttattgctaactggtttattataaaggatacaactcagaaacagccaaatggaagagaggtgcaaaaggtgtaggggtgggtgcagaactgctatgctttccttggacttacccagcaccttaatgtatttgccagtccagaagctcctctatatttcttcttcttcttcttcttcttttttttttttttttgagatggagtctgtctctgtcacccaggctggagtgcagtggcgtgatcttggctcactgcaacctttgcctccaggttcaggtgattctcctgcctcagcctcccgagtagctgggattacaggcacatgccaccacagctagctaatttttgtatttttagtagagacaagttacaccrcgttggccaggctggtcttgaactcctgacctccagtgatccacctgcctcggcctcccaagtgctgggattacagacctgaggcaatgcacctggccacctctatttttttcttgaataaatttttgttccttgctattttctctaagaaaatttttattaagctttcaatatattagcaaaaagtcttaatatttycttgttttcttgacccctgttatatctgtagttttgtcctccttttcattcctaatactgtttgtgcattctctttttcccccaattatttttacctgaagtttgtcaattatattacttcyttttgtttgtttggttttttgagacagggcctcaccctgtcgctcatcctggagtgcagtagcacgatctaggctcactgcagtcttgacctccctgggctcaggcaatcctcctgccttagcctcccacgtagctggagctacaggtgtgtgccaccatgcctggctaatttttttttttattttttgaaatgacagggtctcactgtgttgcctagactagtcccaaactcctgggtccaagcgatcctcctgcattggcctcccaaagtgctgggatcacaggtatgagccattgtgcccagccctattactctttaaagaaccagattttactttcattggtatcttctgttgtacctttgttttctgttttattaatttatggttttgtttttattattcacttctttctactactttttttgggcttattaaacctttctttctccccacctgcccaccaaaaccagtatcttaagcacttgagtcctgtgttagctacatcccacaagtcttagtatctgatactttcattatcattgaattctaaaaataaataaataaataaataatttgagacagggtcttgctctgttgcccagactggaatgcagtggtgtgatcacagcttatggcagcctcaacttctcagggtcaggccatcttcccacctcaacctcccttgtagctgggactacaggtgcatgccaccacacctggccaatttttaaattttttttagaggtggggtctctgtatgttgcccaggctggtcttgaactcctgggctcaagcaattctttcacctcggcctctcaaagtgctgggattagaggtgtgagccatcatacctggctagttctaagaatttttaaaatttcatttattttggccatttgtcttgcttttctctctctctctgtttttgatgttttgaattgatttaaatttttttctcattgcagttttttctgtttagatgttatatgctmtttttctkaatgataaattttgagatttcaacatgaacagttactcttatgttatagaatcttcacagataactataaaatgctttaactccatgcccattgtggcttacttgttatgattgttcagttttaataatccctcaaattagacatttttattctatacacttggttttgtttaaatttactcatagtgaccttattttgtttttctttgaaataaggtctcactctrttgcctaggctggagtgcagtgatgcgactgaactcctgggctcaagcaatcctactgcctcagcctcctgatagctgggactacaggcacangccaccatgmtgggmtaatttttttcttactttttttttttctttttgtagagatgggggwctcactgtcttgtccaggctggtcgtgaagtcctgggctcaagcagtcctctgcctcagcctcccaaagtgctgggattataggtgtgagccactgcacccagcctcagttattattttttgaaaattcacattttatttcatatcttagagatttcttttgagatcagtcttcttcctaacatgtgttcttagaagttcctttcctgagatagctttctctattagatcttattttgtccttgtttttgaaaaatagttcattggatgttaaattctatgttaaaagttttttttttttncttagtactctgaggataatattctatcatcttaaatagttcattggatgttaaattatatgttaaaagtttttttctcttagaactctgaggataatattctatcatcttctggtttcctgtattgctgttgagaagtcagccatcacctctaatgtcattctaatgaatgactctcattgttactcattagccagaaatctgtcttttcaactctggttatatttaagattttctgtctttggtgtgtgatattttgactgatttatctgaatgaggctttatttgttctgcttgtggttcattatgtttcctgaaatttaagaattaatgtcctttacccattttggaaaattctcaactatctttgtaaatattgcattcrtgtatctttttttaatcctcctgaaattctagtgaaacttttttttgttgttgttgttgttttgtttttgagacagagtctcactttattgcccaggatggagtacagtggtgcaaactctgctcactgtaacctycgcctcctgggttcaagcaattctcctgtctcagcctcctgagtagctgggactacaggcgcatgccaccatgcccagctaatttttgtatttttagtagagacggggtttcaccatgttggtcaggctggtctcgaactcctaacctcaagtgatccacgcgccgtggcctcccaragtgctgggattacaggcatgagccactgtgtccagccttaaacatgttaatctgtcttgctcaatcttccattatctctcaacccttttttttttggagatggagtctcactctgttgccaggctggagtgcagtgttgcaatcttgtctcactgcaaactctgcctcctgggttcaagtggttctcctacttcagcctcccgagtagctgggaccacaggtgtgcaccaccatgaccaactaatttttgtgtttttagtagagacggggtttcaccatgttggccaggatggtctcgatctcttgaccttgtgatccgcccgccttggcctcccaaagtgcttacaggcgtgagccaccacacccagcctcattccaattttctgtgtgtctctgtgctgcattctgggtaatttctccacatctgtctccwgctttatgaattctctctttacctgtgtttaatctacaattagccctttctttgacattttttggtcacagtgaagcttgttacagacaaacatgtttagrttgggtggcttaggtggtgtggtggctccacattgatgtcatactgaggacaggggtcaagtactccatgattagtctttgctcttacttcaggagctgcsagaggctgtgcctttcattttctagtgccgtaggtcattgttggcaatacctgagatgaatttctgtgaaactagggagataagccaaattatgcatgtgtctgagacctcaaagccaacataattcagataatgctcagtcacattgggccaggcgcatggctcacgcctgtaatccctgcatttagaaggctgagacaggtggattacttgaggtcgggagtttgagactagcctggccaacatagtgaaaccccgtctctacaaaaatacaaaaattagccaggcatggtggtgtgcacctgtaatcccagctgctggggaggctgaggcagragaaccacttgaactcaggaggcggaggttgcagtgagccaagttcatgccactgcactccagcctgggcaacagagcragattccatctcaaaaataaaaaataatcagtcacagcatccaggatcataggtgtataatcctccagctacatcaggaagtccaccagaggcrtgctggataccaccagcagcttcacatctccattggcagtgcttggcagggcataagccttgctagacacagctyctggtctgcaccaccatggctcctgtgccgccagccacaggtccagacctagacccctctgttgcccttgaggrgctgaccttattctccacagtgatgctggtggacagcrtggcaggggctgaggcagcagaggccattgccaccttgggatctgtgccagagccatcactaggcacatttttgacagtatgtttttattgtataatatagtcaagcataattttttaatgtctacttttatttcattttacatgccttagatgttaacatattaatttctcaaagcacgtttactggctactcatcatgtagtaggtcatatgttgaatgttaacaattctgagattagaaatacagatatgtccaggcacagtggctcatgcctgtaatctcagcactttgggaggcggaggcaggcaggcagatcacttgaggtcaggagttcaagaccagcctggccaacatggcraaacccctttctacaaaaaacacaaaaaattagccaggcgtggtggtgcacagctgtaatccaagctactcgggaggctgaggcatgagaatcacttgaacctgggaggcagaggctgcagtgaaccaagatcgcaccactgcactccagcctggacgagagagtgagaccctgtctccaaaaataaataaataaaaagaaaaatacatatattgctctctaggagatgatggggtattgrggaagagagaccatgaagagagaattatgatagaattgtaatgtttcagtgagatgaataattcctgggatggaaataaagatagggtactgttgaagcatgtagatagtactctggtgataataagaagtgttagggaaggctttccaaagaagcaattgcctgaggaaaaagtggaacctagtcaggcagtgcaagaggaagggacattctgggcagaggaaaacaatatacaaggggcacaaggcctgtgaaaacatggactgcaagcaagtggtcttactgcatatggagtgatgataaggaatgaggcagacaagggccaaatcatgaaragcctcatgtgccttgctgaggcctgtcttaaatattaaaataacttcttttatacattcatcactttgagtatcaattataaaaagactttcctaaaatatttaagtttaaaaaaaatgcttaaagaagaaaactctgccttttatttcttgattcagttaaaaagaattgtcttatttctgctgagtaattgcattattaaaaagygtgtgggctgggcacagtggctcacgcctgtaatcttagcactttgggaggcaaaggcgtgtggatcacctgaggtcaggagttcgagaccagcccggccaacrtggtgaaaccccatctctactaaaaatccaaaaaaattagccaggtgtggtggcgtgtgcctgtaatcccagctactcaggaggctgagtgaggcaggagaatcgcttgaacccaggaagtggaggttgcagtgatccaagattgagccattgcgctccagcytgggcagcaagagtgaaaactcgatctcaaaaaaaaaattaataatgtgtgtggtacttcaaccagtcttgaagagaatrcagaactggaaagaagaatagacatagaacactcacaacacatggatggaataaaatctaagcatgtctttttaagttatagatatctagcaaaattatatatattcttatcccatcatcatctattcgttcaaaaatattgttttagcctctattatatgtcagatactgtggtagatactgaggttacaagaatataaaaggccccaatccttggttgaaatgatggccacagagcagaatctaaggagatttctctggatttggtcttcatagtctataactgtaaattactgtctctgcctactcctggtgagtttttgttgttgttgttgggttttttgtttgtttgttttttgtttttttgagacagaatctcactctgtcacccaggcctggagtgcagtggtacgatcgcagctcactgcaacctctgcctcctgggttcaagtgattcttgtacctcagcctcccaagtagctgagattacaggcatgtgccactatgcctaatttttatatttttactagagacagggttttgccatgatgggcgggctagtcttgaactcctggcctcaggtgattctcctgccttggcctcccaaagtgctgggattgcaggtcttgagccactgtgcttggctttttgttttttgtttttttttctgagacggagtctcactgttgcccaggctggagtgcagtagtgcaatcccggctcactgcaacctccgcctcctgggttcaagcaattctcctgccttagcctcccaagtaactgggattacaggtgcctgccaccatgccctgctaatttttgtatttttagtagaaatggggtttcaccatgttggccagactggyctctaacttctgacctcaggtaatccacccacctcggtctcccaaagtactgggatcacaggcataagccactgtgcctgcccggcctttttttgtattttgttaggattctgttgaacttaagaggaaaaaaaacataacatttagtagttatcagtaaattttagtcagcactgggtgtgaagtgggccctatgctttatgggtaaaatcagagaaagtggatgccactctgtccttaggaaacccacagagaggagagacagtacgggggccaagtgccataatggagtcctgtgatagtgcagaacttcarttagttctgattagggcacagtttctacttctaggggccatccagccgacctcaggggtttcaggtcagcttttcatcctcaccccgcccccgcccctgggataaaagacccatattgcctacagttcaaacatctgcctgattatcctagcagagtggtaggaactgattttctgatctcctctactacccgcctcacctgcacagagagtaccagctgtctcagcctagcttcttcagtgggccttggctgtaaaatgtgtgtatccaccccaggtaattaggttagctctttgtgctcgtatgactgacccctaccttttaggccacctggtgtttgttctagaagttattcctataaacagattttcacctaaaatttgaatctttatgaatcaaataaggaaaattttaagtaaacttgggctgtggataactgatgattcattamyaaaaaggtagtcatttaaaattataaaatgacacaaaaaatttaaatggaaaacatcctgtttatgcttggtcaggtctttgagttgatgtgactcaagtaacatctgatcattttcttaacctttttaaaaagactcccctaaattcttcctcccaaagattttactgtgtttgttcacagtgggttctgtgaaaggattattayaagcccacaatccattatcctcaattctacaaatccaaaaaattctgaaaaccaaacattctttttgtaactcattcatcagcaaaaccagacctgaaccaaagtgaccctattcatattctttgattatctgtcctactgggacatatatggtttgctrcagaaatattaatgtatttaattataggatactgccctagatagttcatatatgtggtatatgcaccatactgcttttctaaattaaaaaatctgaattctaaagcatatctacttccaaacatttaaatcggacttgtggacatatgtaagtataaagcagcctttgcagagtggtttaaaaggctgctttactattgtggggagcttttaattttgataaactagtgagttcatgtaaataaaacataacaaaaacactaatccttaattttctgttaactcgagaatacccagatatgatagttttgtggctaggggttagacatagaaagtgtaactatgaatgcatgtatctgtttgacttcttgtacccccaaaataaaggctaaaataaatataatcagctaaccaaagctatagccacagtcatatatactgtgtaagaaaaaagcctctgatggaggttgcagtgagccgagatcatgccactgcactccagcctgggcgacggggccagactgtctcaaaacaaaagaaaaaagaaaaatgggaattgtgtaagcattcatgtataaaaaaatgatcaaaaatgttacactggcctggtgcggtggttcacgcctgtaatcccagcactttgggaggccgaggtaggcggattgcttgaggtcargagttcaagatcaccctggccaacatggagaatccccatctctacgaaaaatacaaaaattagcctggtgtggtggtgggcgcctgtaatctcagctacttgggaggytgaggcaggagaatcgcttgaatccgagatgtggaggttgcagtgygccaagatcgcaccattgcactccagcttgggcaacaaagcgagactccatctcaaaaataataacaatgttacactgtatcttgtacatttttagtgggataaatgccaagagcagttttattagttcttgattcctccacactttaagagaatataagttcgtctacccatgattttaagaagcaaagagtgtgatgtttcccacctacccacacccccttaaaactattcaaatgaaaccatttaattctttaattayagtggaatagaactgacctattttctgtatgatcataaagaaatatttacttttaacgcagaaatttttttcttaagatccacattttccagcttaatgaagtgattgtgtttttacttggactcttccctttcctttttccttgttctgtgcagattatcaacgcctgatgactgtggcagaaggcatcaccacacttttgttcccatttcaatggcaacatgtttatgtgcccattctacctgcttctctgctacattttcttgatgctcctgtcccttatctgatgggccttcagtcaaaagaaggaactgaccgttctaaactagaacttcctcaagaggtaaaactacaatgaatgatgaagcatttgctgtttgctgatttaggtcaaggcgactttcgttagattgcattgtctttgtcaaaattttatctgtctctttgactctcctaaatctccaagtatggctaggggagagcctgagctatagaatgcagactcttgatgatgactactacatagtcattaaacctggtttaaaacaagacagtggctgattttyacaactataaatttctgaagatggagcagtggtagcatgatctcattgctttattctagtaacatattttttttctttattcacgttataaattttgtttttaaacaatacagcccaggttttagcatccttaaatcattgtatcaattgaattttatttttgacctctatcaaatgaaaagtaacatgttgcagcaaactagggataatggaaatatcaaacacttcagtattctctgttttcagatacaaggccagttatttgttctaaatgtcarcttggcttggtggttgagataaaaattctaacacctagtttttatgccaccttaaagttatactttctgtgtgttgtactttcaaatgtttaaaaaaataggccaggmgtggtgggattacaagygcttgtaatcccagcactttgggaggccaaggtgggcggatcacaaggtcaagagatccagaccatcctggctaacatgatgaaacccatctctactaaaaataccaaaaattagccaggcatggtggcacacacctgtagtcccaggtacttggaaggctgaggcaggagaatcgcttgaaccctagaggtataggtttcagtaagccaagatcgtgccactgcactccagggtgacagagcgagattccgtctcaaaaataaataaataaacaagaattattgaaagcatatttctgatctataaagtaagaatartaacacctcctaggtgttgtttttacttttttttttcttttcttttgagatggagtttcgctcttgttgcccaggctggagtgcaatggcgggatcttggctcaccgcctcctgggtttaagtgattctcctgcctcrtcctcccgagtagctgggattacaggcatgcaccaccacgcccagctaattttgtatttttagtagagacgggttttcttcatgttggtcaggctggtstcaaactcccatcttcaggtgatctgcccgccccggcctcccaaaatgctgggattacaggcatgagccaccgtgcctggcctaattgttacttattgttaatggtactgaggattamcatgtaaggtctttgaaatgaaatatggataagagtgtgccacagccttttacaaaacataagatgattaattacattatatcactagctatttaattcacatctttcttaatagaatctcatgctgagattcacctttatttgttcttatttcccatagagattctcattttaataagtgaatttaacacactaagccacagccattatttcctgtaatgattctcataatcatccactgcttacttttattctaatgaatatttccccacaaaaattaaggtttttgctcaaaggaaaatagcatgattcagatcacataagagacatatacagactattgttctttttgggcttgtgcatgtttttcttctctgttttacctcttttctctattccttgaatgttcttgtttttgctttcattaaattagtcaagtatgttatttgctccaagaagttaatcctttaaattttcaaggaaaaagaaatagactagccaaatgcattttgttttgaagacttaatgatattttagtttcttgttgagtgactgatctattttgtatgttaatccatgtaataktttataagataatttatatgtatgttgtctttccatttttcataacaattgttgagagatttttaaatggcagcttgatatatctgtagttgggaaacctttccatctctatgcctgtttgtatccactaaagataaacaaatttaaggattctgaaagctcctacagtaatgtctgtgattttctaatttttcattaatgagatcaacactgcttaataaatacgtatactcatctgttcatagagtagaataatatgaaataacctgaattagctgtgaaaatagcagtgcttcrgctgggcgtggtggctcacgcctgtaatcccagcactttgggaggctgaggcgggcggatcacgaggtgaggagatcgagaccatcctggataacacggtgaaaccctgtctctactaaaaatacaaaaaaaatagccgggcgtggtggcaggcgcctgtagtcccagctactcgggaggctgaggcaggagaatggcatgaacccgggaggcggagtttgcagtgagccaagatcgcatcactgcactccagcctgggcgacagagcgagactccatctcaaaaaaaaaaaaagaaaagaaaatagcagtgcttctgtgtagaaactataaattaggacatcattgttttataagaaaaggctaacagcctctttgttctggtatcattttacaatgaggtgaaataatctgcttcacataattttggagaggaagtagatataaaaatagtcatttaaaaaaatgacttaaatgcactcactagtaatactttcctccacctttccctgaaaagtctaaaataaaataatggctaaaaatagtgacaagacttctaaacatagttacaaaaataacaaatttgcaaaatgattattttaagaaggtatgattttagttgctagctaactaatataactacatagatttataaattaatcaccaattagctatcctcatgatttaagagtgatacccacaagtagccatttgtaatactgttttttagggagtaggatagagagaatgagagtggaaggaaggcactgaagattaattgcatggaatgtacctcactttctactgttcttactcatcttcacagtaactggtagacaaaaagttaagagaaaaactgaaacagagctgcttttgcaactttgttcttgtcatatcttgccctgagattctgaggraataatttattttattttttagacagggtctcactctgtcacccaggcaggaatgtggtggcacagctcactgcagccttgacctcctgagctcaggagatcctcccacctcagcctcatgagtagctgggacgagaggcacacaccaccacacccagctaattttttaaaattattatttgtagagatggagtctcactacattgcccaggctggtcttgaactcttgggctcaagcgatcctctggctttggctttccaaagattaccagcatcatccacagcatctggcccagagggaatattttaaatgctctcctctctctggcttaccctcaagctggcttaacttcagacactgagaagtgagatcacttactaaacatgaagagagctgcattagtctctcatttgtggatacttcctgctccggcctacagttttagggttcccccaaatgaccatctcctcagagcttattctttcatttgccaaacagttgtctcatacactatttgtgtagaatacagtgggagacaccaagtcaaaaagaggtgatttctgcttttcaaaaaagtcatttacaaataccaataacacaagttaaaaagtaagtcagtaagaggaatgaatgaacagagaagatccagaggagatcagaatgcctttagggtaagggtataggaaggtttcatgacagaagagatgattaagctttaagcctttgttttcttacttttgagggaattttttttttttttttttttgagacggagtctcactctgttgcccaggctggagtgcagtggcgccgtctcagctgactgcaacctccacctgccaggttcaagtgattcttttgcctcaacttcccaaatagctgggattacaggtgcaygccaccacacttcgctaatttttgtatttgcactagagatggggtttcaccatgttggccaggctggtcttgaacttctgacctcaagtgatccacccacctcaggctcccaaagtgctgggattacaggcatgagccactgtgcccggccacttttgttgttgttgttgttttgtttttgagacggagtctcactctgtcgcctgggctggagtgcagtggcatgatcttggcacactgcaacctctgcctcctgggttcaagtgattctcctgcctcaacctctcaactagctgggattacaggcgcctgccactacgcccagcttattttttgtgtttagtagagrcgggctttcaccatgttggtcaggctgatctcaaactcctgaccttgtgatttgcccaccttggcctcccaaagtgctgggattacaggcatgagccaccatgcccagcccacttttgttgtttttaataggaagtagttacatatcatgaaggcttgtgagcagtgttgatcagtagaaatatttagtcctaaagcaatgtcagattgaggtgttgagtaaatttttatcatgtaatacttattgagctcttctgaattttttttaatttaatggtgttaaaagtgagaagcaacttatcagaatgccctattatagagttctcgtttgttttggagaaagggctttttggttttcttcaatacattttcataacacagtttgtatttcctgttctactttgagataatcaaagccccagcttgggcccttcttaagcagacataggagacttttgtgggatcatgaagacagaccagtagctatggtgttggaactcctactttgtagtacactcagctcagcagtgatttcatgaccataataagctttaaaatttcagaaaatgtatcattttcccttttcataggaggaggagagggatagaaaaaggtagtaggaaggcattagtgaaggtgatagtacaaaatctaagtggtgggaggttgctggttaacatttagattagcaaattagtaaattttttcttccattttaaagatactgaattggccgggcgcggtggctcacgcctgtaatcccagcactttgggacgccaaggtgggcggatcacaaggtcaggagatcgagaccatcctggctaacacggtgaaaccctgtctctgctaaaaatacaaaaaaaattagccgggcgtggtggcaggcacctgtagtcccagctacttgggaggctgaggcaggagaatggcgtgaacccaggaggcagaggttgcagtgagccaagatcgcaccactgcactccagcctgggcaacagagcaagactccatctcaaaaaaaaaaaaaaaaaaaaaaaagatactgaatcatccattcaaattatgtgaccttcatttaagcctttcagtgtaaagaatggtgtaggccggccaggcrcagtggctcacacctataatcccagcactgtgagaggctgaggcaggtggattacgaggtcaggagttcaagaccagcctggccaagatggtgaaaccccatctctactaagaatataaaaaaattacccaggcatggtggtggacacctgtaatcccagctacgcgggaggctgaggcagacaattgctcgaacccaggaggcagagkttgcagtgagctgagatcgcaccactacactccagcctgggtgacagagcaagactacatctcaaaaaaagaaaagaaaagaatggtgtaggcagtgctactgtcttcagcaagatgcgacatttcagctctttatttatttagagaaaactgctgacattggaggtgaggaaaaatagcagggaaaggccataagccaccaggctgtttgagggtgcacatttggaacaggtgccaggaagtcacctaatttcttgggcctcggtttcttcatctgcaaaattaaaagactggattcaaagattacatcaggctttaggaatcattgttgatcatctggctttgaaaggagggaaaccgaaatttttttttttttttttttggccaaagtctcgctgtgttttgcccaggctggagtgcagtggcacgatcttagctcactgcaacctctgcctcctgaggtcaagtgattatcctgccttagcctcccgagtagctgggattacaggtgcatgccaccatgcccagctaatttttatatttttagtagagacagagtttcaccatgttggccagactggtcttgaactcctgacctcaagtcatcctcccgcctcagcctcccaaagtgctggaattacaggcatgaggcaccatgctaggcctcattttgagtttttattgagcttaatttagagtttcactatgctgcttgctaattggtatctaacatgaagagcaaggatcaaaagagaaaaacaaagacccgactggttgctttcccctttccccttactttgccgtctaggatcagagagcagtgtgaattttccccttggtgcctgggggtgggggagccagggagaaacacatagtgaagcttcctrttttgtttattaacttccaccccatgtcttatgttcaaccattgatgtaatcaatattatttttatgtgatgggctacacttttggcactccaccccccaatctagaarcacaaccttctttttaactaacaaccttgtcstgattaagagagtatggacagtagaggttaaatactgtttgaagtctactacagatacctgagggataatcagaactttatacatatgcttggcctcttgaattttctatatctacttgaaaaatatttaaaatatttattcaaaataaattccaaatgtagagtgtaaacaaactcaaacatttcttctgatttctgtcacctcttctactcaactcaaaaatatcttgtgtgaactcttaattattcaaaggttaatcaagtgcrtagttacatatgcacttgcctctaccacctctctctgcctcctgcattaggtataatgacttctgaaatggttttgctctaggaggtttagtgaattttgagtaaagttaaaatttgtggattatctgtgaattggattgattttgccagtttcatcctattgggagatactacagctgctggtttttggtgattattgtcaattctgcattacagatgttagagcagtggagtggcaaagaaagttcaagtgcatacagtgagcattttacctaatatcatgtatttgtaaggtcttatgagtctgggcacgcttacccacataggaatgcctaaatggatgccaattgttagaaaatcatattcagattataatatattgctgagacccagagaaaattattcatatatattaagtatggtataaaaaactcacatagggaaaaatgatggaaaaagaggttatttttaaagaataagaaattctaaaccttgcaaagattaacataaaaggcaccataatctatgcttttgtttgtaatagttggcaagaatttttttttctttttgtagaaacagaatcttgccgtgtttcccagtcttgtctcgaacccctgggctcaagcgatccttttgctttggcctcccaaagtgctgggattatgtgtgagccactgtggctggctggcaagaatatgttagcacatacaattcctttattttaaacctttgtatttcatttttctctttcaggctaatttgtgttttgtggacattgacaaccattttattgagttgcctgaagaatttccacagttccccaataaagtggattttatccaagaactctctgaggttcttgttcaatttgggatccctcctgagggcagcctrcattgcagtgagagtaccagcaaactgaagaatatggttctgaaagacttggtcaatgacaaaaagaacggcaatgtctgtactaataacatcagcatgtatgagttactgaagggcaatgaaaccatagcccgcttgcaggctctggccaagcgtactggtgtggctgtggaaaraatggacctctctgcttctctgggtgaaaaagacaaggatttaaaactgmattgtgaagaggcagaactaagggactaccagctcaatgtacagctccgagaggtctttgctaaccgttttacacagatgtttgcagattacgaagcatttgtcattcagactgcscaggacatggaatcctggctgaccaaccgggaacagatgcagaactttgacaaagtaaaaagaaccatagttttccttttgtggttattagtggctttattattgattttaacatttttaaattttttattcttctgtgcctatgcttacccatatattattgattttgttaaccttttttaaatgcagactttttgtcttccagccccattaagaacttttctttaccaagtatttttacattagataaaataattttacaagcaaataaaccagctcattgaactggtcattaaattgtgcgttaaattgcctgtaatctcattttcaatttttctttaccttaaagatgcttaaattatagaaactcaggccgggcacggtggctcatgcctgtaatcccagaactttgggaggccgaggcggacggatcacaaggtcaggagtttgagaccagcctggccaatatggtgaaaccccgtctctacgaaaaatacaaaaaattagctgggcgtggtggcgcacacctgtagtcccagctactcaggaggctgaggcaggagaatcgcttgaacccgggaggcagaggttgcagtgagccaagatagcgccactgtactccggcctgggcaacagagagagactccatctcaaaaaaaataaataaataaataaaaawttatagaaactcttacattttgcaggttttccaaatctgttaatactgtttaaccttataacagttttatttactcttactttatgatcaagtatggttaaataagcctactcctttttgaagaaatctmtttatttagtctagaaatcatttatttagtctttatcctatcaggaagtcacaacttgtccatgtaaagttaacagtttggtttcagaagccaaatttctctatctcattttaagataaaaggagaaaaagagtgactaaattaagttttatggctgtaagtgtaaaacarttccaaagaytttggaaagagaagtcagaaaatataccagctttccttgtcctgtgatttctaaggggtactggattcttctgccagttttttttcacctatctcccagattttatttttcagacagatgcacttagggttgtatagtaactcttttaggtcaccagggtacagtttagttctttactgctgtgattgctgaggtataatactgctattagaatgtatcatgggtttcactaagtggcctctttgggtcatgaaaggccttctaaaggggctgatacattccaagaggctaatctacagtactggagaatttttggaaataatgaaaaattttcgtaaaggtacatagtggctgggcatggtggctcacacttgtaatcccaacactaggaggttgaggctggaggatcatttgaggccaggagtgtgagaccagcctaggcaacatagtgagaactcatctctacaaaaaattttaaaattagccgggcatggtggtgtgctcctctggtcccaatgactctggaggctgaggtgagatcacttgagcttcagaagttgaggctgcagtgagccaagatgatgccactgcactccagcttgggctagcgagtgagaccctgtctcaaaaaaacaaataaaagataatttttttacttcatcagatattttttctgttggaggatgatattgtatgttgaacagttacgttctggtgttctttgtttttccccacatcagacaggtaatgttctaacatggtaacaaagtttgaggaaggtacatctcacacatgagcatgaaaagccaattattacatttatgaactacaaaagcatcctgatgcacttacgtttgagaaaacttctttaatattaacaagacttcacttctttaagtgtatgcccttaggttcctttttcgttagtcttaaccattttccatactttttcctatctagcttagaactaatctgtgggctgggcacagtggctcacgcctgtaatcccaacactttgggaggctgaggcgggcgaatcacaaggtcaggagatcgagaccatcctggctaacatggtgaaacctcgtctctactaaaaatacaaaaaaattagccgggcgtggtggcaggcacctatagtcccagctacttgggaggctgaggcagaagaatggcatgaacccgggaggtggagcttggcagtgagctgagatcacgccactggacgccagcctgggcgacagcgagactctgtctcaaaaaaaaaaaaaamaamaaaaaaactaatctgtgtatatccatggtttatccttgggacaattcaaattcttacctaaatcaagccctgatacttccttccttcttaatctttatgtagcctcaaactatataaatggaattctttttacataacccctaaagaaatgaaaattttctgttggattccagaaggcttataagtacctttcactaggaaaatctgcaggacatactagtcgtacaagccaaatcgttgttgacctaaaattttatagtytatgagggtctgaatatcaaaagccagatctttggcccacttttttwaaaaaaaggctatttgatgtatgaaaagtaagatgtttattggtgaaggtgaactgatttctagactactgtgaatctttctgtggttatttggatttatgtatatacacctgaactatggaactacttaaagtgaataagtggatttctataaggaaattttaagaagacctcctaaatttcagaatgaaagtaaatatgctagcaagaagctgatgagtatttttaaaagtcaccttatgtcagaacttatttctctttcctctttcccctttccccttctggcttctgccatgcaaaaataaaaaccaacccagcaaccaaaataggaatttacttccaaatttacttccagattttagtactgcattgaatgtagaatccctgtacacacatgagcatggaagaacaacagaaaaaaaaatgacacttttaattaggaactgattacgatgtactgaaccatcccatgcatcagacaggctagtaacaggaaaggtgtacagcttattgtactcgttctccaaaggcttgcttctgatggtttttcaggcaatgatttgttttttktttgtttgtttttttggaaatgcggtttcactatgtttctttaggctggcctcaaactcctgggctcacaggatcctccggcttcagcctccctagtggctgggactgtaggtggccaccaccatgcccagcttccaggcagtgccttttttagttgttaaggctgagactgttgtgtcagcacaggtgtggaaggaatttttccttggcttaacactcatctattgatttctcacagagttaaagagtctagaaaagcattcacttaaagaagaacaaaagaacttcacccmtaagcataaattccatgtcttttttaagattaatgctgatgtgtttattgtatcagttaatcatctcactaccttgtggcttgaaagtatatttcataggctaggaatagagaacagaaggaattacaacttgtagcygggcgcggtggctcacgcctgtaatcccagcactttgggaggccgaggcgggcggagcatgaggtcaggagatcgagaccatcttggctaacatggtgaaaccccgtctctactaaaaattcaaaaaaattagccgggcgtggtggcaggcgcctgtagtcccagctactcaggaggctgaggcaggagaatggcatgaacccgggaggcgggagcttgcagtgagccgagatcgtgccactgcactccagcctgggcgacagagcgagactccatctcaaagaaaaaaaaaaaacgaaattacaactcattggggaaagggataaaaatttttaactgcaagtgaagtggatgattgacaattgtatagcaacttatctgccatctttcgttactgatgccctctttgctacataatggtcataaggatcagaatgtaaattttgtaaggtaagatcagtgctaaagacctaagtgacgtacattctctaaatttaggaaaatggaaagaaaagtggatttttaaggatttttgaatttcaagtgtcagttttataagatttaaaaaaggaatgtcctgagttaacataattttcaggcttatcatgtagtgttgagatggtctctttgcactaataatttcctaattatctcattacaggcttcctttctgtctgaccagcctgagccttacctgccatttctttcacgcttcattgaaacacagatgtttgccacctttattgataataaaattatgtctcagtgggaagagaaagatcctttgcttcgggtctttgacactcggattgataagataaggctgtataatgtaagggcacccaccttgcggacatctatrtatcagaaatgcagcactttaaaagaagcaggtacatttgccatgccttttaaattaaattaaaatccattatcgcttttttcccacaaattgctggccttaygtacaacaaaattaattttcagttttagacttcatggctaatcctggtactatatcacgaaatgctttgtaaatttttctttctgagtcctactcctacttgacgttcctcttctcttagaagaggaaaaacaataataaattgaatcaagtatgtctggaaggttgctatgatttttgtttttgtttttgtttttgagatggttctcactctgtcacccaggctagagtgcagtggcgcaatcttgactcactgcaacctccgcctcctgggttcaaatgtttctcctgcctctgcctcccaattagctgggattacaggcacgcaccatcacgcctgactaatttttgtatttttatagagttgggatttcaccatgttggccaggctggtcttgaactgctgacctcaggtgatctgccctcctcagcctcccaaagtgctgggattacaggtgtgagccaccaygtccagcctgacttttgttttattctctttattgcctaaatggaaaaaatgttaatttctgtcttgctacttatgtttctttttctttttctttttcttttttttttttttgaggcggagtctcactctgtcgcccaggctggagtgcagtggcgccatcttggctcactgcaagcgccacctcccgggttcacgccattctcctgccccgagtagctgggactataggcgcccaccaccacacccggctaattttttgaattttcagtagagacggggtttcactgtgttagccaggatggtgtcgatctcccgacctcgtgatcgcccacctcggcctcccaaagtgctgggattacaggcgtgagccactgygcccggccttatgtttcatttttacttctcacctcttctctatatccaagaaaggatatttatttaaaacagtaaatcttagattctgcttaatttacatactaaaacagtatctttgctttagtagtgccattaattataatagcttcacttattgaaattaaatctgactcaggctgggcgtgatggttcacacttttaatcccagcactttggaaggccaaggccagcggatcacttgaggtcaggagttcaagaccagcctggccgacatggcgaaaccccatctctactaaaaatacaaaaattagccaggtgtggtgtcatgcgcctgtaatcccagctactagggaggctgacatagaagaatcacttgaacccgggaggcggaggttgcagtgagccaatgtggcaccactgcactcccgcctgggcaacagagcaagactccgtctcaaaaaataaaaagaaagcagttaattctgagtcttagcccagcctgtctaggagtggtatatagtccataaataaataatcatattattagccacatgagtatttactatggcaggcatcatgccaggtggtcccgaattttttttttttttttgaacagggtctcatttgtggcctagcctggaagcaggggggccctagtggtcattgggccctaatttttgggcttagggggatgtcttacccaacctccgtgggaacggtcctttatggcttggccccccctccgggaatttttnnnnnnnnnnnnnnnnnnnntgagccaagatggcaccactgcactcccgcctgggcaacagagcaagactccgtctcaaaaaaataaaaagaaagcagttaaatctgagtcttagccagtcttgtctaggagtgtaatatagtccattaaataaataatcatattaatagccaacatgagtatttactatgtcagtcatcatgccaggtgttcacgaatttttttttttttcttttgagacagggtctcacttgttgcctaggctggagtgcagtggtgccatcatggctcactgcagcctcaacttcctgggctcaggtgatgttcctaccacagcctcctggggaactggtactataggcatgtgccaccaccctcgggtaattttttgtattttttgtagagacagggtttcaccatgttgctcaggttattatcttaccttggttggtcttgaactcctgggcttaagtgatccacctgcttcagtttcctaaagtgctgggattacaggtgtgagcccagcaccctttttttttttgaaacagaatctcgctgtcactcaggctggagtgcagtggtgccatctcggctcactgcaacctctgcctcctgggttgaagtgatcctcccaccacagcctcccaagtagctgggactacagatgcatgccaccatgcctggctaattttttgtatttttggtagagacagggattcacgatgttgctcaggctggtcttgaactcctgagctcaaacaaaacacctgccttggcctcccaaaatgctaggattacaggcatgagccatcatgtctggcctggaatacttatttttattttgttttattactgccctcattttacaattgagaaaactgagaggttaagtaacttgcctgtggttggtggttgcatagctagtgattggtcgagccatggtttgaatccaggtctgatttctggcacaggaagccttaacatcatgttagctgttcattcaagaaagaactatgtaaaatgtactagtccacacttattttatacaattatgcctggtccctaacctgttctttgccagataagcagatacctatcacctgacggccctcccttttatttctttcccttcaaatgttggagttatttgacagcaacttttcctctggagaaaaaggaggcagcaaatgtggagcttccttgatctgtctctcttgattgcttgcctgcctttcccactttacttaaatagatcaaagtcaggaatgatgatgctgaagctttagcgtatgtaagggagaagtatgtaaatgatgtcttttatgtaaccatagaaacatcaccctgttgtattcccacgaatcagggtagatccctggagccccttcaggaagtggcaattacctatgtggttttggaaattgagaaagtagaattaatgaaattgtctatccttgttcagagaataaaatgacttccagtgccttaatagccatgtgaatagcataatgccttgttgcacaaattttatttctcccttcctgatggaattttttagatggaactaagcaccaataccttaattgtgtgcttccagaaagtctttccaattaaaatagattttctttcagcctctcagagagtttggtactcccactgtcatcacagaaattatataatactcttgaaaataccactgtggccaggcacaatggctaacgcctgtaatcccagcactttgggaggccgaggagggcagatcatctggggtcatgggttcgagaccagcctggccaatgtggtgaaaccccatctctactaaaaatacaaaaattagctgggcatggtggcgggtgcctgtaatcccagctactcgggaggctgaggcaggagaatcgcttgaacccaggaggtggaggttgcagtgagctgagattgcgccattgcactccagcctagactccatctgaaaaaaaaggaaaaggggcaacataaactgattctatgaaatatttataaaggcacctggttcttctcttaaatcacaaaattagcagctcccacagtgtgttctgtttatcacacaactaccattactgcttgttctccccttttaagtaatctctaggcagaggatcagagacctaggcttgcttctaaaatatattttctcttgacaattcagttgattaaaatgtttaagatcaggttttatttatttgtttacctgagaaatagatcactgtttctggggactttgagacatcttccaacatccctgactcttagtggttttaaaatagaaatgtttagtaatcctatcttaacattcacctattttattcttcaaaaggccagtttcttatcctctggacattttctaaatgcctgcttatatgactttttgctgtattaccttcttgatctaataaacactccaaaatgactcctactaatgagaacgtgactgttgctaaaagtgaggtaataaacttcacaccgttccttgtttttacagatggagaaccacgaatatttaataggtctttgtataaagaagtaaagttaataaggccattgtgcttgcgtcttctctttaacttgtatttcagctcaagaaaaatattttatttgctatcattttctttaatgttgtacttagaaccatatttttgtgtaagaatattgaatttcttacttaagagaaactgtttcaatacaaaattgtaggcttttcatccccgcggccctgattttgacaaaggcagaaaataccatgaaaattaatcatccaatatttacttaaagttaactttttatacttacattatactaatttctgaagagcccttgtaaaaatctatttcaagaccgggcgtggtggctcacgcttataatcccagcactttgggaggccaaggagggtggatcacctgaggtcaggagttgaagaccagcctgagcaacatgatgaaacgccatctctactaaaaatacaaaactagctggaactggtggtacatgcctgcggtctcagctagttgggaggctgaggcaggaggatcgtttgaacccaggaggtagagattgcagtgagctgagatcgcgccattgcactccagcctgggcaataagagtgaaactctgtctcaaaacatgcatatatgcgtgcgtgcgtgcacacacacacacacacacacaatatctgtttcagagtgtcagagtgattgggttctctgtaggtgcatgagtggaggaagcattatttttgaagggctagcaatgaaatgtctctaatttattataaatttaatttatagcccaatcaattgagcagagactgatgaaaatggatcacactgcaatccacccacatctacttgatatgaaaattggtcaaggcaaatatgagcaggggttctttccaaagttacagtccgatgtcttggcaacaggaccaaccagtaacaagtaagcatgttcttcacttgagtagttggttgaaggaatgaatgaagggtggggtgctctgcaactcaaatggacaatgcttaactattaaacatctatctgattacttttttcatgaccacattaatgcatttgaaatatggattgacacttctgtcagtgcttgacctttaaatccatcatttaaaaaaaaaaagaaaaaaacaaaggctagagatttttttttctttttcaagcaaagtacacttggaaaagccacactttaaatggcgatttaaatataatgataatactatctaatggaatttagaaaggttagacctttatcatctgtgttagtttcctagggctgctataacaaagaaccacaaactcagtggcttaaaacaacagaaattattcttccacagttttggggggtagaaatttgaaatcaaggaattggcagggccacgctcccttcgaggcttctagggaatgatccttccttgccttttccagcttttaggagaacataagagagtttagcaacagcctgtcacaccagtctaatgagatccttccagatgaaagagccttcagatgtctcacctctgccttaaactgggttctgttaagaggagtggttccagagaagacaggatagtactttgggtagcaagatatattcttaggctctatcttccctcttgaagagctaaagagaaaattttttgaaaagaaaatttttagttttagtatccttttaaatatttagaaaaggaacaccaaacagtaaagtgaaagaattgtggccaggcatggtggctcacgcctgtaacctcagcactttgggaggccgaggcaggcagatagcttgagcccaggagttcaggaccagcctagccaatgtggcgaaaccctgtctctacaaaaaagatagaaaaattatctgggcatggtgatgtgcacctgtagtcccatttactcaagtgggagaatcacttgagccccaggaggttgaggctacggtgagccgtgattgcactactgcccttcaacctgggaaacaggccctgtctcaaaaaataaaaatagtattaaaaagaattgtggattaaaaacagcaacaacaacaacttcatttggagctgggtgtggtggcacatgcctgtatccctagctacttgggaggctgagatgggaggatcacttgagcccaggagttggaggttgcagtgacctatgatcaccactattatccagcctgggcaacacagcgaggccctgtctcaaaaaaaaaacttgggccaggcacggtggctcacgcctgtaatcccagcactttaggagtacgaggcaggaaggatcacttgagcccaggagtttgagaccagcctggggaacataggaagaccctgtctctacaaaaaaatacatacattttttttgagacaaggtcttgctctgttgcccaggctggagtgctgtggcccgatcatggttcattatagccttgacctccccaggctcacgtgatcctcctgcctcagcctcccaagtagctggaactaaaggcacatgccaccacacctagctaatttttgtatttttttatagagacaggattttgccttattgcccaagctggtgttgaacttctgggctcaagcaacctgaactccttggcctcccaaagtgctgggattataggtgtgagccaccaggccaagcccctacaaaaatttttttttaaattaggccaggcatggtggctcatgcctgtaatcccagcactttgggaggcctaagcaagtgtatcacttgaggccaggagttaaagaccagcctggccaatgtggcgaaaccccgtctctactaaaaatacaaaaattagctgggtgtggtggtgcatgcctgtcatgccagctacttgggaggctgaggcatgagaatcactggagcctgggaggcagtcaggcatgcaactatagtcccagctactggtgaggcttaggtgggaggatcacttgaacctgagaggtctaggctgcagtgagccatgatgtgatcgcatcactgcattccagcctggtcaaccttgcaaagaccctctttcaaaaaaacaaaaaacccttcgtttgattgacctttcatttaaaaggctgtctcaactttaatgaaggcagtactagaggatggttcactagaaatgtggaaaagttatatattcagaatgaaattttctcctcttgtagaaaatgcacgtttataccaaagtcttggggaggaaaattgttcaagagcatttaatatgctgcttacaagacagaagcaaataactaatgactgaaatttttattgtacttgccttagtttgcagggtttcaccctccagtgaaggggtggccctgcttttatacacactgaacttaaaaaatgtgctaagatgcgaggcctggtggcactccccagtactacctactgggaggctgaggaggaagtattccttgaggccaggagttggaagccacgacgtgcaatgattgtgtctgtgaataacctccagcataggcaacataatgagacctcatctttattttaaaaaaagaaaaaaaatgtgctaatagatactgatggttgtgagggttcaaactttccagataatggtactagatacaatattctatttttcagaagtggatgataattaagagaattttccataagaacagattagccatcagtttattaattttttcttttatttgtgaagtatcctaattgttcgaatcactttgatctggatagactattagtttaacagtttttgtttccttttttttttttttttttttttttttttgagacggagtctccctctgttgcccaggccagagtgcaatggtacgatctcagctcaccgcaacctccacctcccaggttcaagcgattctcctgcctcagcctccctgagtagctgggattacaggcatgcgccactacgccaggctaattttatttttttattagagacagggttttactatgttggttaggctggtctagaaatcctgacctcaggttatccgcccacctcggcctcccaaagtgctgggattacaggcgtgagccactgcacccggtgcttttttttccttttgatggcattagattgttcattcattcatttggcaaatatttatggaactcttactatatgtgaggactgtcctagtcaccacgagtttattaatgaacaaaacaacaaaaatctctgcttccaagtgcaagtaaacaaaaaaaaaaggaacctaatatgtcaagtaacatgtcagatgataagagttatgaagaaaaacaaagtaggaaagaaaagtagagagtgcttaggagggaggagtttaattttgaaatcttatagccttattttcttgcttttgccttatatataatcttatggtttcccatttccacacgaagcctcagtcattacgttttcaggtagatatagtcaagagaaaagatctcagaacaattgcagggtaaatggatttataaccatgcctgtggatcaactgttgagagaacttcatatgctgtttacaagacagaacaaaataagcagtctttagtatttcagcaattgtgattatcattggtaaaattatgcttagtaaataaagtttaataatgcaaagaataaattaattacttaacaagaccaggaatgtgtggacttcatagcaatttgcttaagcgcagtgctcatttccctgttttgaaaataaaattaagtaggccattttgttccacagagtgtatagtaagagctagttatatttaagttaatctttatccttttctgcctgccaaagacacagttttatgccatttatatttttgtgccttccttttcgtttattatataagtccgttagctagtatttatattctgtttcatatttttactatttatttggactaccttgcccattaaccctaatttttaaaatccctgagcaaactttgtgttatactgaccttttttgctacagggctgttttcaaggcctccatatcaaagatctacacccaggtctttgtacattttgtttgttatttatattctattcttcccctttaaagatcttcaggttgtgtttatattctgtttcagaatcttaatgtgttttttgtggttcataattttcaatcacccccgattctttttgtatcctttttacagtcttacattgctcttttgctttggagacatttccagggattccacttcaaagatctgtaactagatctttgcacatttttcccttatataaaccataaacctactcctcttcttaagaaactattttgagaggggctaccttccttgataccattgtaaaaagagtaagtattcttaggataatgaatacatttcatgaggatgataggtaagagctgagaaaattttaaaaaatagatggatacaatatttgctctttaaaaatctggaatattggccaggcgcagtgcctcatgcctgtaatcccagcagtttgggaggccaagacaggtggataacaaggtcaggagttcaaggccagcctggccgagatggtggaaccccatctctactaaaatacaaaaattagccgggcacggtggctggagcctgtaattccagatactcgggaggctgaggcaggagaatcacttgagcggcagaggttgcagtgagctgagatcaagccactgcactccagcttgggtgacagagtgagacttcgtctcaaaaaaagaaaaaatctggaatactagaaagtgatggggttaatttttaaccactcagaatcgcatcaccatggaatgttaaaatgtgatattatgctcttacatagcaaggttgggggagcaggagaacgggagtgcacacatcttgtttttgaaacaaaattaaaatgtttatagaatgttataccttttttattactgtatcattagcattctcatattattagaaatttgaattttttaatgactgcatgagatttcattgtatactaccctctactgttgaacatttcggttgttttgagtatattttcttgattctactgttggttgtacgatctgcaattaactcaaaggcttttaggaaaaagtatatattaaacatgcatatggactgaaagatgcatcctaatttcaggaacatttaaaagccaaaatgtgagtcttggaataaaggaaatacagtttgttattacatatctatatgctgtgatgaacatctgtaaacctacatgttagactgcatctctgtttacttaattgtatttatacaaggggcagatgatggccaggcatggtggttcacgcctgtaatcccagcactttgggaggccgaggccagaggatcacgaggtcaggagatcgagaccatcctggctaacacagtgaaaccccgtctctactaaaaatacaaaaaattagcctggcgggtgcctgtagtcccagctactcgggaggctgaggcaggagaatggcgtgaacccgggaggcagagcttgcagtgagccaagattgtgccactgcattccagcctggacgacagagtgagactccgtctcaaaaaaaaaaaaggggggggcaggtgctatagtagactttgccagtaagatggctgacagacaagatactggcccttctagaggagattttatagaaaatggagataagtaactataatactctgtgatagatactataattgaggcgtacaggatgggtagctaacttagatttgaaagagtcatagaacactttctggaagcagtggcctctaatctatctgaaaggtgaatgaaagttgggagaaaacttcatggacaaaggctcagaggtgacagaacttatttcattggaaacactgaggttgaaaattgcaggagctgggtcgggcgcagtgactcacgtctgtaatcccagcactttgggaggctgaggcgggcggatcacctgagctcaggagttccagaccagcctggccaacatggtgaaaccccatctccactaaaaatacaaaacttagctgggcatgttggcacatgcctgtaatcccagctgcttggaaggctgaggcaggagaattgcttgaacctgggaggcagaggttgccgtgagctgagattgcggcattgcactccagcctgggtgacaagagcaaaactctatctccaaaaaaaaagaaaattgcaggagcttaaaagtagaaagagcgatcagcagtactaaatgtagaagaggttttgagtaagctaaggatcaaataatagccattggatttggcagttaggggtttcagtggcttcatcaagaggatttttagggctgggcacggtagctcatgcctgtaatcccagcactttgggaggccgaggcgggcagatcacttgaggtcaggagttcgagaccagcctggccaacataatgaaaccctgtctctactaaacaatactaaaattagctgggtttggtggcacatacctgtagtcccagctacttgggaggctgaggcaggagaatcacttgaacccgggagacggaggttgcagtgagatcacgccactgcactccagcctgggtggtagcctgagactccgtctcaaaaaaaaaaagtgggggggctttaggcagctgggaacagacacacctgtaatcccggcactttgggaggctgagacaggcagatcgcattaagctcaggagttcaagactgatctaggcaacatggtaaaaccctgtctctacaaaaaatacaaaaattagctgagcattggtggcttgcacctgtaatcccacctacttgggaggccgaggtgggcggatcacatgaaggtcaggagttcgagaccagcctggccaacatggtgaaaccccatctctactaaaaatacaaaaattagccgggtgtggtggtgtgcacctgtgatcccagctattcgggagactgaggcaggagaatcacttgaacccaggaggtggaggttgcagtgagccgaggtcttgccactgtactccagcctgggcgacagaacaagactccgtctcaaacaaacaaacaaactaaaacaaaatttaaaaagcgttttcaagggaagtagatgatttgaaatgaactgaagatccaaacgtaaataagtagaagtcttacatctaaatattttaagaatttttacatcagaggtgtgaagaaacagatgttaacatgactacagagggccacgagggagaccaacatgcttgtcagctgaagagattccactgagaaaaagattggcgatacagcaaaggaggtgactaatggagcgggttgaaaagacgggagaattggtcaaggatgcaagtggaagacacagttttgagccttggctaatatattttatactttgagattagaagaaagatgaggatgtttatgtgtgtgtattgtctaagtagagggcaggaagaaggaggcaagggtacctgagggtgaagagtttgcagtagtctttgaggagaatggggaagagttgataaaaggcaggtgaagtgattcatgggtagtcgtgagagaaattgggaactagtctgtgtgggtacgggaatagggaagtgaggggatagtcttcatccgcggtttggggctctggtgggcaggtaaggagggaagtagaggattattacagaggagagagtgctagaatgggagtagtttaggtggctttccgcagaatttatgttcataacagaaagacgagaaagcaccaggggtcttaagtgagagtcaaggcatggaagagctaatgtaatgggagatgggggtcagtggctaagatggtggagttcaggatttctgaggtagaggagttctggatgaccattggatttggagaggagttctggatgaccatttgatttagtgtgatgtcctggttgcgtctaaagctgagtggaggtgaagttgcatgttagacgaccccagaattttaagacaaagttatctatatagtctttgtacttcccatagcagggaagaaaagaaaactgagccaggttccaaattcttcactgaatgaagatgatagaaaggagtgattaaggataatcgctggatggttgagtcttacacactaagctggagcctgtaggtagctaggctggcgacaaaaggacctttgaataagggaaacattatatatttttaagcccctcatatcatccagggcaggtctgggtctagggcacatgagttgaatcattattaaccaaaaacaaaggtatttgagctggaaggcaacttacatcttcggccataccaccttgaacgcacctgatctcatctgaaaggcagtttcgataccagcagtttagtagcagagaagattattatagaactagcactgattttatcaatcatttagaaacagaatggaggttactatactggaacatagtaattaggggagaagtgatataagatcagagagaatgaagcagaggtctttatatttaagagttttataggccttggaaaagagctcaggttttattttaaactcatttgtcctgcatattttgatactgagtttatattataaatattttctaaaactgataaacacaagctatcacttcagaaacacagtcatgaaattttagagcaaaaaggaatcacagtggtctttgagtacaacccttagactttacagatgaggactcactcttatgagtttgaatctttctatttatcttgagatgggatatcactgtcatccaggctggaatgcaggagtgcagtcgtggcacactgcggccccaaactcctgggctcaaattatcttcccacttcagcctcccaagtagctaaggaggctaattttttaaattttttgtagagacagagtctcactatgttgcctaggctggtctcgaactcctggcctcaagtgatccggccaaagtgctaggattacaggtgtaagccattgcaactagtcaagttggatagaaatctttccttaaaaggttggaagcttcatacatttctattcttttaggacgctagaattaagtaattctaaattatgggttttgagaatattctttgtattaaaaaatattcataatatttactttgagcaagtcaaggcattactattatatgtcaatataatcaaggactaactcggttaagatttgacttattgttatgtatgtaagtatctaaagtgtattgatactgtgcctttttgacctcagtttttaaaaattctgattgtggtgatgacagcacatatctggaaagatactaaaaaccgtttggttgtatgttttaaatgggtgcatagtatggtattttaattatattttaacaaagctgctatatattttttaaataattgattttaaaatgtgtgtgtcagtcttttgtgttgaatggttaatgctttctattttaaagataaggaacacatttttaaataatttgattgtttcagtcgctgggtaagtcggagtgccactgcacagcgcaggaaagaacgccttcgccagcattctgagcatgttgggctggacaacgacttgagggaggtatgtggtctaccttcctggggtgcctcacagcaagcgccatgaactaggcttattccttccagcagatgtcattgtgtagattcttaatgttctttaaaaaaaaaactgtttagttatagtttaaaatattaatccttttgtacggacatatagcagaaaacacccttttttccatttttgtaatttcaagacatctataataaggctctaaaacaagtctttctgtgtattacatcaagtaaagatcaagttgaggataaatttttagttactatgtctcctataggagaaaaattgtctgcatgagaagcctagacatttctaagtttcaagcataattataaggagtagtgtgatgtacttgcctatgctttgttcttggcttgctggcaccagttttttttcttgaatctctaaatctactttatatttttgaaagtgttttaaaactatttttaaattaagatccttacacttttatttgtactctttgaaaataagaccataattatacaacaagtaagttttgatttttttctgtgtgaaatctgcatatatatatagtgtcttgctatgttgcccaggtcttgaactcctgggctcaagcagtgctcctgcctcagcctcccaaagtattgggattacaggtgtgagctgccatgcccagcctgattgtttcgtttcttatgatcaaaagagaaatgcaatcagaagacttgttaactgttttctagtatcaaatttgtaaaaataaagcagaaaacatcatcccaaacatctcttgtttttgttgtgttcatacatatatgattttaaacattttattaagaactgaggcatcacctgtgtagtgcttttttttttccggctactgtattttcttcccttccctctcttttgctgtgattttatcatatgcatgcttgttctgcttgtctctttctccctatccttttcttttttgctttcctgtcattggcatttctccatcctcttagccttccggggaacttttggtctgtcagaactccatggcattctgggagtgggaccagggtccacctcctcctgcacgacttcctaaaaaatccttctctgagtgctgcctggtatgttctttgcttgaaagtgctttaccagatgttcccccaatcttgtctttggtgttacttgaatgttacacatgtgtgagtgcacatagctctagaatgcctcacatgaccttgagatgtgaactcacactccccattttgctctctgcttcttgttatgtttagtccctttctgtgtttgtgtgtgctaatatgagtaattctatgctgctgacatgtaaaactaatcatttgggtctctaatcagtgggattttttttgtgtgctagatagcaaattgccttacttcaaagggggaaatgtattaaatatacaaactcccctttatttaagcgttttccagaagtacagatgtgattgaatttcaaatagcctttcttttgctgggttttatctccacagaattttaatttccccttcctggtctgtattttatgtggtcagaaaattcagtcatcaacatagaatctcagtgccaagaggaatctttaaggtcatcttgtccaatttgacatgattaaattgaagtccaagagattagcccagagttaaaagcacacaaagacagagctggacctatagcccaagactcctgacttctaggccaatattctttccatttaccctgcatgccagcttgcactaaccactgttcacttgaggcaacaagcaacttagaaatcttgcttatagttttcccccattatgtcatactaacttaaatctattttacaatggtcttctcttcacaagttgaacaccaacttgtaaagggctagggcgtttactagaaaattctgggagagcctgtattaaagagcagttagttcagtgtttattgaataataggatatattttcataggtagttcctagtggtttgtttcatttgtcttaagcagaaataaagaagagcacagtagtaatctcagaagaaatctggggttacttctagactgtattataaaagcatttcttgtgaaaagtctctctcctatatttttcatcttgaaatatgttttttcctccagatgttatttttatcatcacttgtttattttaaaggcagttgctctgtttttgcaatttgcagaggcagcctcccttcttgctgtgaagagaggccttttgccgccccctgtatcctttctgtgcatgtccatggaatgttgctatttctatggctccagcagagatgcccagaaggagactttgcacatggccctatggaatccactgttggctaataactgtacctgccccatatgtactgggggctcagtaaattggtcactcataggacagccaccgtctagcttgttttcctttatataaaacaggacataaactttaaacagtgcttaattttttgtttgtttttgagacggagtctccctctgtcgccaggctggaatgcagtggcgtgatcttggctcactgcaacctccacctcctgatcttcctgcctaggcctcccaagtagctgggactacaggcacgtaccacgnnnnnnnnnnnnnnnnnnnnnnnnnnnnnnnnnnnnnnnnnnntggcctcccaaagtgctgggattacaggtgtgagcaaccttgaccagccgacagtggttaatttttaatccagtaattgactttaaaaagtattcaggggccaggcgcagtggcttacacctttaatcccagcactttgggaggacgaggcgggcggatcacttgagaacaagagttcgagaccagcctggccaacatggtgaaaccccgcctctgctaaaaatacaaaaactagccgggtgtggtggcatgtgcctgtaatcccagctactcaggaggctgaggcaggaaaattgcttgaacctgggaggcggaggctgcagtgagctgagatcatgccgctgcactccagcctgggcagcagaccaagactctgtctcaaaaaaacaaaaaccaaacaaacaaaaaagtattcaggctgggcggtggctcacacctataatcccaacagtttgggaggctgaggtggggagatcatttgagatcgggagttcgagaccagcctggccaacatggtgaaaccccatctgtactgaaaatacaaaaattagccaggtgttgtagcacgcgcctataatgccagctacttgggaggctgaggcaggagaatcagttgaacccaggaggtggaggttacagtgagccaagattgcaccactgcattacagcctgggcaacagagtgagactctgttttaaaacaaaaaaaaccaggcagggcgtggtggcttacacctgtaatcccagcactttgggaggccaagttgagtggatcacttgaggtcaggaatttgagaccagcctggccaacatggcgaaaccccgtctctactaaaaatataaaaattagccaggtgtggtggccagcacctgtaatcctagctactcgagaggctgaggcaggagaactgcttgaacccaggaggcggagtttgtggtgagccaagaccgagccactgcactccagcctgggtgacagaacgagacttcgtctcaagaaaaaaaataataataakaaataaataaaaactaaccttcagaccatttatatagaccttgttacatttgacttctctgctggtaatggttgatagattttaaaaatcaaataaactcgctgggcagggtggctcatgcatgtaatcccagcactttgggaggccaaggcgggcagatcacgaggtcaggagtttgagaccagcctgaccaacatagtgaaaccctgtctctactgaaaatacaaaaattacagccgggcgtggtggctcacgcctgtaatctcagcactttgggaggccgaggtgggcggatcacagggtcaggagtttgagaccagcctgaccaacatgatgaaaccccgtctcttaaaaatataaaaattagccgggcgtggccgggtgcggtggctcacacctgtaatcccagcactttgggaggccgaggcgggtggatcacgaggtcaggagattgagaccatcctggctaacacagtgaaaccctgtctctactaaaaatacaaaaaaatagccgggtgtggtggcagacgcctgtagtcccagctacttgggaggctgaggcaggagaatggtgtgaaaccaggaggcggagcttgcagtgagccgagatcgcgccactgcactccagcctgggcgacacagggagactccgtctcaaaaataaataaataattagccgggcatgggatgtgcacctgtaatcccagctactcaggacgctgaggcaggaaaatcacttgaacctggaaggcggaggttgcagtgagccgagatcaagccattgcactccagcctgggtgacagagcgagactccgtctcaaaaaaaaatacaaaaattagctgggcatggtggcgcgtgcctgtaatcccagctactcaggaggctgaggcaggagaattgcttgcacctgggaggcagaggtagcagttagttgagattgcaccactgctgttcagcctgggtgacagatcgagattccgtctcaaaaaataaaaataaactctgcagttctcataacatttatgtatacttctttctgctgcaaacatttttttttttttgagatggagtcttgcttttgtcacctaggctggagtgcgatggcacgatcttggctcattgcaacgtccgcctcccaggttcaagcaattctcctgcctcagcctcccgagtagctgggattacaggcacccgccacatttttgtatttttagtagagatggmgtttcaccatgttggccaggctggtctcgaatgcctggcctctgcttcaaacatttttaagagggtcaaagaaataagagaaaattgagaattagagacaactgttaaaatgattggactggaaaaaaacattattttgttaattttgcctttcgtcacaaaggttgggaggtagcaggtaaacagattagtggaatccctaatcagtgggattttttttatttgtaccagacttagcagattattttcttccaaaggagaaatatattaaatgtacaaactctcttttttaaagaatgcaaaggattttacacatcttcttttataatatcaagctctcctctgaagatagtaaggatagatttcacatatgtgcccgtgggaggatgtgctggcttgccgtctcagtctccatgctgccccccactaccagccaataaactgctacttttactatataatgtagagcagttattctctaaatatggtcctaagtcacttggactttttggaaaattctgccctgtgatcctgatgtaaacataaggtatccagatgattttttttttttttttgagatggagtcttgctcagttgcccaggctggagtgcagtgacgccatctccactcactgcaatctccgcctcccaggttcaagcgattcttctgcctcagcctcccgagtagctgggattacagacgtccaccaccacgcgtggctaatttttgtatttttagtagagatggggtttaaccatgttggccaggctggtcacgtgctcctgacctctggtgatccacccacctcggcttcccaaagtgctgggattacagacgtgagccaccgcctggcctctggatgaacttttatagacagcatagaaagaagagagagagcacatgtcttgcactaaacacatgtagtgatttttttaatagaaattcactaaccaaagctcaagagcatttggttaagtttctgtgataccttagagttaccacaaaccccaaaagtaacactgtaattmactttctcttgattatagaacaaggcaaggtagggctttagcaaaaacatcacagaaagaggccaccttcacttggagcacatcgtgcttttcagagtgatcctatagccttttggggaggtaggggggcatgttttatgcccatttaacaagctgagatgcacamacattagttgataacacctgagtcataaaattagttacaaccagattcgaaagctcctgattttactgttgtgacttgattatagagcaaagggttagattggagagcactgcccaggaggctagaggtatgttaagtcttactgtatggggaaaggagtggaggaaatcagtgatctgagaacagctggrctcctgcagaaccttggatttgtgatctaaacacctaaatttttttgtcccaaccacagtcctgacttcacaaccttttgtattcccaataaaaagactaaatgaaatgaaatgtcmtctcactttgaatgagttttaacgtgatggggtttctgtcactttacttctcacaggagttaacagttgttatggggtggcatatgagtgtcctctgtcttttagtacactaaaacattaattgttgttatatgcacatacacttacggacttttttgcatttcatttgtctctgcacttgtttgtataaggttaagaagattagaagaatagctaatgtttacgcattaaaaatactccttgattttttagaaatatatgcaagaggcacgaagtttaggaaaaaacctgagrcaacccaaactgtcagacctctctcctgcagttattgcacagaccaactgtaaattcgtagaaggcttattaaaagaatgtagaatgaaggtatgtattattcactgatgccagacagtgtgcattcatgtttacaccatgtgtgaggctaagatgaactgagttaacccccatttaagcatgtaattttgctagaagaaaacttttactgtggcattgacctcatgtgctctttactsgggtattgaacctccatgggttcttcattccccacagaatcaatgacatgagagccttctaccatttttctcaccttttcagacattgctctcctcctcaccaacatgaacggatgtcttaagccactcataatttgcgtcaggaatrttgtcatcttatgtgaaaggcaacacttttgtgtctgtgtatgcacctgtgtacaaccttatttgtgcctgtacatggtttttgtccccataaggaaaaataccttagctgtgttgtaggtttgtgtatattgcacaacgttctcctctcagaaacctgtgtttattggaggtagcagtacaaattgacaaaacttaaaacatcattttagctaatgattttatttatttatttgacagtcatttcttgagtaccttctctgcatattcaataaatgtactactattttcagcatcagtatatagtggtgaattaaagttcttgcctaaaagagctagattctctytcattttacattttataaaagctactaagactgatgcaaattaacttacatgaaactgatttccattttctttccattttttggtgcatgcttgatgaacaaagaaaagataaaaaaggagaagtaaagtcctggttcattcacaaattagagttctcaaaaaatttagagctgcccatttgtattctggtttttacctaagtgcaatcaaactaagtgcaagaatctttagtatgctaagatgctggggcagtgatagggcaagttgtggtggcaggatggggttccatattctgacagtacattttctttttttattgtttcttgttttttgagacagagtctcgctctatcacgcagcrggctggagtgcagtggcatgtgatctcagctcactgcaacctctacctcctgggttcaagcaattcttctgcctcagcctcccaaataactgggattacaggcgtgtgccactactgcccggctaacttgtatttttagtggagacagggtttcaccatgttggccaggctggtctcgaactcctgaccccaggtgatccacttgcctgggcctcccaaagtgctgggattacaggtgtgagccaccatgcccagccctgacagtacattttctaagtctgctgtaattccccaatatcacagaagttaataatttgacaactgttgtatataagcatcttttcaacatggggatgccttacaaatattatcttatattctctttagtcacactccatttttctgacaaaatagtgacatataaattatattagtccagttagttgaacatcaagattaagagatttttttcccaaggtgattacaaatctgcaaatagaagtataatgaagggaaaccaagtctcctactttagtaattgacttgttggtttttggtttcactgctggggtgccttatgactacacgtgatattcttagacaaagcgcatgttggtggagaagatgggacatgaagcggtggaacttggccatggagaagcaaacatcaccggcctggaggagaacaccttgatcgccagcctttgtgacctgctggagaggatatggagccatggcttgcaggtcaagcaggtaacagttttaggaggtcctggtgacatggccagttaagagccctgttaagaaatgtaacaaggagacaaatatgtcattaaaaaaaaaataggctcttttgtcacaaggggactagaaaaatgccacaggcattttaatttcagaaaaagaaaatataacccatgagcaggaggtggtttgggctctttcctgctaagcgggaaaggatgaaatagcacatcattgcagaggctgtatccctagtaagttccattaaatgtttgcctttgtcactgtccagaattaacagttccttaccattttaagttatctaataattcagggtgaaatcattcaaatggtctctttgcttttgtctctctagtctccctttctgatttttttctgatgtgtgcatgtttctttcttcttccctttttctctttctcctctcacctcgatttttttctcttatcgccactccatatatccaaacatattttacatgtagatgtacacaagtacattctgtgctgctagagcattttaattccatggttactaatgtagcccatgtagacagccctaattacatacaaccaagtaacaacctagcagacatcagaaatcttctgcctgccatgctggccctttgcttagctgcttccttttcccaggctcttggtagtcttgtcagtgaggtacaggatgacctttatgatacatgcagaagatgctcagaatgtcatacaactaggaatgagtgagcttgggtcaccagacttctaaatggctattggaatatgaatgatttggatgagaaattattttttgatgaattatttcttatgaaatttttacacatcttgtactttcaggggaagtcggctttgtggtcacatttaattcaatttcaggacagagaagagaaacaagagcaccttgcagaatcaccaggtatgacatcattggtaaagaactagcagcactggactctgagaagactcaatactatttggccttgtcttgatctctttctctctcaagctaaaatttactcattttgccaataatgggataaagtagaaggagcaatattacttactaactgtgagacctgggaaaagttacttgccctttctgaagtcctgcttcgtcatctataaaataggaaaaatgagattacctaggctagaacggtcatgctgatcaaataaggtatcatgtgaaaacccccaatgaattgtaaatggccatacaaggatacattactctcactagcattagaatttttttttttcttacaagttttatgctaggcacggtggctcacacctgtaatcccaccactttaggaggccaaggtgggcagatcacctgaggttaggagtttgagaccagcctggccaacacggtgaaaccccatctctacaaaaaatgcaaaaattacctgggcgtggtggcaggtgcctgtagtcccagctactggggaggctgaggcaggagaatcgcttgaacccgggaggcaaaggttgcagtgagccgagaaggcgccactgcactacagcctgggtgacagagcaagactccatctcaaaaaaaaaaaaaaaagtttttataaccatcattaatgatctttcagggagaaaatatgtacatatgtctcaaaaatttcaggagttgaatctctcttcaatttatagaaaatataacatgttagaagtgtcataattttttagctaattatgtaggattttttaagctaagtgttctacctactgtgtatttttcacaacaacacatgcttttctttatgtaaaataaccatttatttcacaaaaaagtagaagtaactatgggaagctaattgagataaaattgctttatactgaatcagccatttcggaaccttttcaaaaagtatggatgactttggacattcagaaatgttttagatggagtctcgatcttgtcacccaggttggagtacagtggtacgatctcggctcactgcaacctctgcctcccaggttcaagtgattctcctgcctcagcctcctgagtagctgggattacaggtgcatatcccatgcccggctatttttttttttaatttttatttttgagacacagtctcgctgtgtcgcccaggctggaatgcagtggcgcgatctcggctcactgcaagctccacctcccgggttcatgccattctcctgcctcagcctcccgagtagctgggactacaggtgcccgtgagcacgcccagctattttttttttttttttttggatttttagtagagacggggtttcactgtgttagccaggatggtctcgatttcctaacctcgtgatccacccgcctcggcctcccaaagtgctgggattacaggagtgagccaccgtgcctgaccttaaagacccttttattcatcctaatttcttttccctcactgcccctagagggcaacactatcctaaatgtagtatttattgttagaaacctagtgtttaaatgtatttaatcagacagctaggaatataagctgactacattgccctggagctcctgtaatcagaatgccaaggttctgttgtccttggctgtaactatatttataaagattcagatcaagtttaaaagcattctctagtgtccatcttctctgccagtttttctgttaaaaaaatagtaatgaggccaggcatgttgactcaacgcctgtaatcccaacactttgggagggcaaggcaggyggatcacctgagatcaggagttcaagaccagcctggtcaatatggtgaaaccctgtttctactaaaaattaaaaaaaattagccgggcatggtggtgggcatctgtaatcccagctactcaggagactgagtcaggagaatcgcttgaacctgggaggcagaggttgcagtgagccaagattgcrccactgcatgccagcctgggcaacagagcaagactccttctcagaaaagatgtatatttataggaatatgaaatatgtattaaaacatcagtttaaattgaaatctctcattcttaagtaataagttgtaattatgcaaaaattaagtttttaaaatctggttttccaccaaatactttttttgccaattattaagcttcctaatgaatggcaataaacagtctgcattgtcatatttaggaaagatccttaaagatttatgatgggctgggcayggtggctcatgcctgtaatcctagcactttgggaggcctaggtggatgggtcacttgagatcaagagttggagaccagcctggccaacatgatgaaacccactctctactaaaaatacaaaaattagccaggcatgggtggcaggtgtctgtaatcccagctactcaggagggtgaagcaggtgaatcgcttgaacctggaagatggaggttgcattgagccaagactgctccgctgtactccagcctgggcaatgaagtgagactccatgtcaaaaacaaaaaaaaattttgatgggtttgaacattattcttactagcattgaatcatgatgagactagatgctggattattatcatgagtcttcagaagcagcactaaacaggagtcagagacattttaagagttgcagaggaatggaaagatagggaccatagtgggtaggcagtattaattttgatctagtgatcactgcacctagtagtttgaaatcctatttcagagaaagaagttcagaatacaattggtcctagaacaaagactgttcttgacatatcactcaaaagttttaacctttaaatttgttgggaggactgagtgtggtggctcatgcctgtaattccagcactgtgggagctcaaggaggacaaattacttgaggccagaagttcaacaccagcctggccaacatggtgaaaccccgtctctactaaaaatataaaagtcagccaggtatggtggtgcacacctgtaatcccaactactcaggaggctgaggcatgagtatctcttgaacccaggaggcagaggttgcagtgagccaagatcacgccattgcactccagcttgggcaacagagcaagatgctgtctcaaaaaaaaaaaaaaattgttgggaggctggatatggtgacccagttctgtaatcccaacactttgggaggccaaggtggaaggatcacttgagcccaggagtttgagaccagctgaggtaacatagtgagacccagtctctacaaaaaaaatttatttttcttaattagccaggtatagtgacacatgcttgtggtcccagatgcttgggaggctgaggtgggaggatcacttgagcccagggggttgaggctacagtgagtgctgtgatcccaccactgcactctagcttgggtgacagagcaagaccctgtctccaaaaaataataataataaataaaaacgttgagccagttcttaaactttgcaccttcagacaaggttctactaaactggaaatggattttggcagggggtaggtgtagagcccttccactgaagggagtggaaatgctgccttttttcctttttttttttttttttttttctgagatggagtttcgctcttgttgcccaggctagagtgcaatggcgcagtcttggctcactgcaacctccacttcctgggttcaagcgattctcctgcctcagcctcctgaatagctgggattacaggcgtgtgccaccacacctggtgaatttttctatttttagtagaaacagagttcaccatgttggccaggctggtctcaaactcctgacctcaggtgatccacccgcctcagcctcccaaagtgctgggattacaggtgtaagccactgtgcctggccagaaatgctgcttttaagtggttattctggatctaacccaggaattttgagtcactcttcatcttatcttcatcagaaattatctattaattacttacctacctatagactgtacatggtactgtagaaacatacagtccctgccctctacaaacgtgctgtctgtgctacatttataaaattcaccactccaaatagaaaataaataaaatgtttaacttgtgttcattctttttttttttttggagatggagtttcgctcgctcttgttgccaagactggatgcaatggcatgatttcggcccactgcaacctcccgagttcaagagattctcctgcctctgcctcccaagtaactggaattacaggcatgcgccaccacatctggctatttttgtagtttgattcaggcagatgagcaaattctcgtagccaagaattaaatccatgaatctttattttraaggagaaagtggcctattgtttgagtattttcaattaagaaatagtaatggaagtatacatttacatagtttataaaattctcttctagctggagtaggattcatggaaaccttcttagattttaggtctctagataaaagaagtggttccatttcctaacccctaatttgccctctgctcacaggcttttaaactcttctctccagagtcactaataaattactgcattcatttcctagggctgccataatagagtaccacaaactgtgtggtttaaacaacaggaattgccaggcacactggctcgcacatgtaattccagcactttaggaggccaaggtgggaggattccttgagccaggcgtttgagaccagcctgggcaacatagtgagacccccatctctattatttaaaatgaagtttctcacttgttctctagtttaagaggcatgattacttctggttgtcgtgtctccctctagccaacttgttaattatggtttcaactccccttttttcctctgtcaacctatttcttaccgcctgtgtggccatctttcattctgtctaatcatctggagtgtagaggccttctctgagccatctcactttgtcctcaaaaagaaagctgtggccgggtgtgatggctcatgcctataatcccagcactttgggaggccgaggcaggcagatcgcttgagtccaagagtttgagtccagcctgggcaacataaacatagagacaaaaccccgtctctacaaaaaaaaaacacacaaaaattagccaggtgtggtggcatgcacctgtaatcccagctatcaagaagctgaggttggaggatcgcttagcccggaggtggaggctgcagtgagccgagatcatgccactgcactccagcctgggcgacaagagtgagaccctatctcaaaaaaaaaaaaaaaaagaaaagaaaaaaagatatgctttctttaataacatgtaacacattccctgcaagtctggaacaatttcttcagcatttattacctcttgggtgtcaagatgaatgggtctagtgccccattgaaactccctcccaaaatcgccacaacaaatgtcctatttatcatccacatggtatggaaggcccttgaaagtagtgcttttagattggactggccacaacctcttccttctggcaaccccatcagtactcatttatacctgctagtgtcaaaagcatagggatccgaatacaccaaaatgttccctatcttcctttagtgccaacttcatatatatttatgtgttttggtattgtatcccagccccccaaagtagaatgaatctaaaacctgagaaaatggcaggtttaatatacagcaaaaattcacattctaagttctacttatataggtgtatttgctgagtatgatgttggaatttcatttttatttatagatgggaagatagaaatgaaaggcctaaactccatggcatctcattgagcacgagaccaaacactgcaactacaatatattagccaatagatgtttgcttagccgttgctatatgagaataatctttcttctttcatacataagagacaaaaccccgtctctacaaaaaatacaaaaattagccaggtgtggtggcacgcacctgtaatcccataattgttagctttcataaatgttagctattcttaaataaatgttagctattcaggcttcataagagaatactcatggacattatacttagtgtctatttagattactcactttgcatgctgtaattactgtagtttggactctgaactttaaggtagaaacttatcagattgaagagtccgaaatcttagatttttttttttttttttttttttttgagacagagtcttgctctgtcacccaggctggagtgcagtggcatgatcttggctcactgcaaactctgcatcccgggttcatgccattgtcttgcctcagcctcccgagtagctgggactacaggcgcccaccaccacgcccagctaattttttgtattttttagtagagatggggtttcaccgtgttagccagggtggtctcgatctcctgacctcatgatccgcccgcctcggcctcccaaagtgctgggattacaggtgtgagccacagcgcctggcctttttttttttttttcagagacagtctcattctgttgcccaggctggagtgcagtggtgggctcagrtgatcctcccaacctcagcctcccaagcaactggtgctacaggtgaacaccaccatgctcagctgatttaaaaaaaaaaaaaaaagctaattaaaaaaaaaaagacatatatatatttagcttcccattgtccaaacccatataattatttgcaaaaacggggtctttctgtgtagtccaggctggtctccctatgtttcccaggctggtcttgaactcctgggctcaagtaatcctcctgccttggcctcccaaagtgttgggattacaggagtgagccaccgtacacagcttagattttttttcaaacactcaagagtttaattgtgtgacttcagttcatgagcccagagatgtttcacattttttagtagcttaatttatatacattgctttcatgtgtaattatctagagctattagaacaagtaactagaaagtaactggccaggcatggtggctaacacctgtaatcccagcactttgggaggccaaggcgggcagatcacttgagttaaggagttcgagaccagctggccaacatggtgaaaccccgtctctactaaaaaatacaaaaattagctgggcgtggtggcgcactcctgtagtcccagctactcgggaggctgaggcatgagaattgcttgaactcaggaggcggaggttgcagtgagccaagatcacgccactgcacttcagcctggcaacagagcaacagagcaagactatgtttaaaaaaaaaaatacaaaaaaaagtgcctggtccttatggccaaaatttgtacacattgcattgtttgctaggtagtcttttgtgattcatttaaaatttccaaaagcagttccagattacatagaaagaaaatagctgggtctgggcacggtggctcacgcttgtaattccagcactttgggaggccgaggcaggcggatcacctcagatcgggagttcaagaccagcctgaccaacatggagaaaccctgtctctcctaaaaatacaaaaaattagccaggtgtggtggtgcatgcctgtaatcccagctactcgggagactgaggcgggagaatggcttggacctgggaggtggaggttgcggtgagctgagatcgtgccattgcactccagcctagasaacaagagcgaaactccatctcaaaaaaaaaagaaaagaaaatagctgatttactgtgttaataatatagcccagcctgggcaacatagggagaccccgtctctacaaaaaattttaaaaatgagccatgtgtggtggtgcacacctgtaatcccagttactctggacagggctaagttgggaggatcgcttgagcccaggaggttgaggctgcagtgagccacgatcatgccactgcaaactgcactccaagctcagtgacagagcaagaccctattttctttaaaatttgttttttgacattttgggctagatgatatatattgttaaaatttgttcttatcgaagcagtttcaaagtatttaatatgaaccatgtatattttttattacttttctaatattttgttgatatttttctacatagttgccctcggaccagaaagaagaaaatctgactcaggagttatgttgccaacgctcagggtctctcttattcaggacatgaggtatttgttattaatacatgtgttagcatgtggtgataactttgaagtattttgtggcttttaactaaattgctcaaatrattatggctgtgtttatttttggcttatgtattctgaagaaagcattttttatgatttcatttatcttatttttataccattgtagtgtttcctgacattaaatccaaatggaagatgcagctgagaagagttttaaagcatctctaaatttttttattttattttacttttgcgacagggtcttgctttgtcacccaggctggaattcggtggtrcaatcaycactccctgcagcctcaacttcccaggctcaagcaatccttctgcctcagcctcccaagtcgctagaattacaggcacctgccaccayacccagctaatttttttgatttttagtagagacaggggcttttttttttttttttgagatggcgtctcattctgttgcccaggctggagtgcagtgtcgtgatctcagctcactgcaacctctgtctcccgggttcaagcaattcttctgcctcagcctcctgagtagcacaggcatgcgccaccattcctggcgaattttttgtatttttagtagcgacagggttttaccatgttagccaggatggtctcgatctgacctcatgatccacctgcctcagccgtccaaagtgctgggattacaggcgygagccactgtgcccggccgagatggggtcttaaattgcccaggctggcctcaaactcctgggctcaagtgattctcccgcctcggcctcccaaagggctgggattacagacgtgagccattgtgcccgtcctaaactattttatagcttcttttgttcagtttttaaaactcccttaaacacctctgcccaccgaagaaggtacagaagaaaaattctgcaaataatggcaggatatgtggcagaacaattgcaatcaggtagatttagtttgaagcaaatacatatctgagaatcatcacttggaattactgttaagaaatctttagaagacttcaagatatctaacacagatttattgaatgaggaaggcagaggcttttatcttttaaatattttaggtacaatacttagtcaactcttacaatgtatgggtttaaagcagtgtcataagatccaagtgcagtgggtcatgcactttgggaggctgagggaagaggatcatttgagaccaagagattgagaccagcctgggcaacatagcaagaccctgtattttaaaatatttaaaataattaaacaattaaagattatcaatgcagtctggcttattttctctaatgccatagaaagtaagatttcatattttccatatgttgtccagtgcaacttgaaaagtaattcagtggattaaagttgtgactgatatttaattatgctatagaacagttattttgaaaagaaacttgagtattcaccctgtttcattamtttttttggagcatcaggaataaccaaattcttatttacagatatctatgagtctgccacaaggacataataaagcctgaaagagtgaataagtgttaaatgctttatcttaccacattgtccgtgtgcttgtgttgtaatggcaattatgatgtgagactaacttcatgattcagatggaaccttcaaagatttaatcaacatcaattgtatattatccattgctccctttaagtataaacctttctgtgcccagtactgttcactctttacttcttttctagtcagggttatccttaaaatctacatctttgctgttgccactattctttaggcatattcaaaacatgagtgagatcaagactgatgttggacgagctcgggcgtggataagactgtctctagaaaagaagctcttgtcccagcatcttaagcagttgctttctaaccaaccactcaccaagtaagataccatctttgatacatttctgtttctataatccatgtgcatacaaaacaagttgcataaactgacaaactggcttcttcagtatgaagtgctgtatcctgtgcacatgcattcttctttatctaacaggcgtgtgctttgaaaactgttttgatgtaatacttgatcgttttggggggacacaccaaatttaacagccaaaggccagattgcagttgggcatggtggccattgcctgtaatcctaacattttgggaggccaaggtgggaggatcacttgagtccaggaattcaagaccagcctgggtaacatggtgaaaccccgtctctacaaaaaataagttagcagggcatggtgccrcacacctgtagtcatggctattcaggaggctgaggcaggagaatcacttgaacttgggaggtggaggttgcagtgagctgagatcatgtcactgcgctccagtctgggcgacagtgcaagaccatctcaaaaaaaaaaggccggattgctctgccagaatcaggcaaaaagctggctagttcacacaagctgacagtaacatccaaaagatcggatgaatttatataaaccttatattattttgtataaaccttatattgtaaaacctgtatacaggttgtatacagataaaacctggagtaaaaaaagaaagaaataataaagttctgtgaggaggtcccagtaaagggcttcttctgagagccttgcattcactagtttagggcaagggttcccagcccttgggccatggaccagtactggtctgtggtctgttaggaaccagggctgcacagcaggagatgagccgagggcaagcaagcattaccgcctaagctccgcctcctgtcagatcagcagcattagattctcaaaggagcataaaccctattgtgaactgcgcatgtgagggatctaggttatgtgctccttatgagactctaatgactgatgatatgaggtgcaacaattttattctgaatccacctccccctccccagcccctgcgacagccatgggaacattatcttccatgaaacaggtccctggcgccaaaaaggttgggaaccactggtttagagcygggaaaccagtcaagtacatgtcaattaattgttaacttttaatttcttctgtttactctatcaagaaaccctcttcgaggtcaggtgcagtggctcacrcctgtaatcccaacactttgggaggccaaggtgggcagatcacttgaggtcaggagttcgagaccagcctggccaacatggcacaaccctgtctctacaaaaaataaaaaaattaaccgggcatggtggcaggcacctgtaatcccagctacttggaggctgaatcaggagaatcatttgagccagtattgggccactgcactccagcttgggcaacagagcgagaccctgtctcaaaaaacaaaaacaaaaaaaagaagctgtcttggatgaaatatattgcccttatatttacattagtgctaatttgaaggctaaggactttgacttctaaggagcaaagttaggcagagaattcaacaaagacctcaaacaagatagcctattagagttccagtgctttttgtagttttgtatttgtatatatcacacttggattacataccccctggagcattttcagatgagttttaatgtccaaacagtaggtttgataaagcatgaagtgttgcatatagcctgtgaatctgaccttgttttcttaaaactggcgtggtttttttttccaattacaaaaagttattggctgggcgcagtggctcacacctgtaatcccagcactttgggaggccgaggcaggcagatcatgaggtcaggagatcgagaccatcctggctaacatggtgaaaccccgtctctactaaaaatacaaaaattagctgggtgtcgtggcgcatgcctataatcccagctacttgggaggcagaggcaggagaatcacttgaacccaggaggcggaagttgcagtgagccgagatcgcgccactgcactccatccagcctggtaacaaagcgagactctgtctcaaaaaaaaaaaaaaaaaaaaaaaggccgggcgtgttggctcatggctgtaatcctacagtttgggaggccgaggcgggtggatcaccagagatcaggagttcgagactagcctgaccaacgtagagaaaccccatctctactaaaaatacaaaattagccaggcgtggtggcacatgcctgtaatcccagctacttggaggctgaggcaggagaatcgcttgagcctgggagacgagaggttgcggtgagccaagatcgtgccattgcactctagcctgggcaataagagcraaactgtctcaaaaaaaaaaaaaaagtgatttatgctcatagtggccaaagtacaaagaggaaaatgataatcacttacaatcctgctatataaagaacactaagtatttcacattttcttctgtacttttcttctatgcatgttctcttattaagatacactatatgtgcgattcaatatcatcctttttwttagcttaacagtgtaccataaacatttcaccgtatcagaagagtttaaaatctgaagtctgaatgcttgtgttcaaatattgccttctctagttagtgtttgaatgacctcggacaaaatatttaactttcctgtatctctcttttccccatctgtaaaatgacactaggctgggtgtggtggctcactcctgtaatcccagcactttgagaggccaaagtgggaggattgcttgagcctgggagttcaagaccagcctgggcaatatagtgagaccccatctctactaaaaataaaaaattagttgagtgtggtagcgtgcacctgtggtcccagcagcttgggaggctgaggtgggaggcacactcaagcccaggaggtcaaggctgcagcgagctgttactgcatcgctgcactccagcaacctgggttatagaacgagacctcatctcaagaaaaataaataaataaataaataataaaaaggcactaatagacttacctcatagagtgagaattaaatgtaytaatacctataaaacacttgggaaagtgcttaaatgtaagtgtttaatgaaatctttgccccatttcatctgtttctttaggactgaatcctaaaagtaaaattgatgagtcaaggggtatgattggtttaaagtaattgttacctgaattgctttcctgaaattttcagtctcaccaactgtgagaatggcattcatttcttcctygtcaacactggtcatcacttttaagtctttattagtttgatagataaaatagatgcattttttccttaattattaggttaaaagtgttttattaactgtttatatatccatttttatgaattgaaatagaatgaatctattttttcaagattaaaggtgtttgtctaagaggagctatttatttttagtcaaggcttaatgagggccagccccagtggctcatgcctataatcccaacattttgggagactgaggcaggaggatttcttgagtccaagagttcaagaccagcctgggcaatatagcgagaccccatcctggaaaaaagacataatgggaaagaaacaaaagaaaaaaaatggccgggcatggtggctcatgcctgtaatcccagcactttgggaggccgaggcagatggatcacctgaggtcaggagttcgagaccagcctggccaacatggtgaaaccccatccctactaaaaatacaaaaattagcctggcgtggtggcacatgcctgtaatcccagctactcatgaggctgaggcaggagaatcacttgaacccaggaggcagagtttgcagtgagctgagattgcaccattgcactccagcctgggcaacaagagagaaactctgtttaaaaaaaaaaaaaaaaaaaaaagmcataatgaaaagtacatgatactactgtcttggttttttttttttttctttgatactactgtcttgtgcttgtcttaccctttcctaggaagctttataagcgatatgcttttctacgttgcgaagaagaaagagagcagtttctttaccaccttctttctctcaatgctgtggactatttctgcttcaccagtgtgttcaccactatcagtaagtctagagaattgaccgttaagggttactgaggtgaccaatgcaataaaagcatttatattttttaaagcaagatatgccatagtacatgtgacattgtgacatacgcccaggtctctgtttaggagtaaaggatattccccaaatgctaagagtgctacaggaaacccttggctgtcaggctttagagaacgccttactgaagaaaagtacctcactggagatgataccttctgtcagttccagccagcatcccatgactgaacaaagggctgtcccggagctcaccatgggggttagatagatgaggatttcattgagactgcatcgaagcttaacatcttgcttaaccaatcctgctttccttctcacatgttggtcccaggagcagcattgtccatgctaatttctgactcagagatttcttcccaagaaacccagtctttgataggaaatgttacctacaatagatgagaaaaggaatgttttattaagtaaatatttcaatatcttaacgaaaacacataaaatcaaagtatctgtgtgttaataataaacttatgcaattggacatcattcaactttggaaggaaatgctgattggagaattttttttttttttttttttttttttgatagagtctcactccatcacccaggctggagtgcagtggcacgatctcagctcaccgcagcctccacctcctgggttcaaggaattcttgtgcctcagcctcctgagtagctggaattacaggcacgccccaccacacccggctaatttttgtatttttagtagagatggggtttcaccatgttggccaggctggtctcgaactcctgacctcaagtracccacctgcctcagcctcccaaagtgctgggattacaggcatgagccaccacgctggacctggagattttgttgtttttgttgttgttattgtttttggtttttttgagatggtgtctggctctgtcacctaggctggagtgcagtggtggaatctcagctcactgcaacctccrtcccctgggaatcaagcgattctcctgccttagcctcccaaatcacacatctgtatataggcatatgtcaccatgcccggctaatttttgtgtttttagtggagacagggtttcaccatgttggccaggctggtctcaaactcctgacctcaggtgatccatccgcctcaacctcccaatgtgctaggattacaggtgtgagccactgagcctgtccaagagatgtattttttatagaaagccgaatgatagcatttattctttccttcattgctaattcttatttgcagtgggtcctcttccttactttggagaatttttacttgtatcaattaggaattgcatttagctgcaagtatcagaaacttgaaaaccagtggtttacagcatagtaatttcacttacataataaaggtctcaaagtaggcagtgggcagtgctgtcacggacccaggctcattgtctttttcctgttagacatgctctgtgtgtgctagttacctcatggtttcaacatggctgttctcagcataccttccagcaggaaggagagagtgccaaggaggggcaggatctgtgctagaaagacataattttccaaaaaatctcaataaatatcactaacatttcactggccagaattgtgtaggttttggctttccagtctctggtaacggaagacaaaggaaaagggaattggaatggggattaggccatcctgtaatgcctgtcaagttactattcgttgattaggttactgcaggtgtaagaaactaaaaagttatatacagttttaaaattgggccgggcgcggtggctcaagcctgtaatcccagcgctttgggaggccaaggcagttggatcacaagggcaggggttagagaccagcctgaccaacatggtgaaaccccgtctctactaaaaatacaaaaattagctgggtgtggtggtgggcgcctgtaatcccagctactcaggaggctgaggtaggagaattgcttgaacccgggaggcggaggttgcagtcagccgagattgcgccactgcactccagcctgggcgacagagcgagactccgtctcaaaataaataaataaatwaatwaattaattaatttaattaaatcgaagaggccaggcacagtggctcacacctgtaatgccagcaccttgggaggccaaggcgggtggatcacatgaggtcaggagttcgagactgacgtggccaacatggtgaaacctcatctctaccaaaaaatacaaaaattagccggacgtggtggcgcttgctttagtcccasctactcaggaggctgatgtgggagaatcacttgaacccgggaggcagaggttgcagtgagccaagatcacaccactgccctccagcctgggtgacaggttgagactgtctctaaataartaagaagtagtagcagtagaggattcctaaaatcctccttatatctgtagatttctcttcatctgagtaactctttcaatttgaggaattcttcatgaaagaaatttttaaatttaatcatattgctttttcatacttaaactatgaaatcactgttgtgcatctgtgggccttttgcagccacagaactgctgaccctaaacatgcctttttctgcagattttcttagcagtgcaagaaatgagaaaagcctctggcacctaaaataaagtcttaacactaacctcttctgctttcagtttcaaaacccatttgattctgatgattactaaaccgtgaatatatggccttttctctgacattttcctatcctaaagccaaaataaaaggacacaaagggagactcttcacctaacataaagaaagtcttttatgtaaaattagggaaatgaaccatttatctcatttgttttcctcatctaagagtgcactgaaccatgagctcatattgtgaggctatatctaggcaccttctttagtaaatgtttttcatcctacttgtagatctttcacggagggcttctaacaccccctcttatgatcaaatgggcagaaatcccaaggataacaacaaatattgattctaccctacttaaaaaaaaaaatggctgggcatggtggctcacacctgtaatcctagcacttttggaggccgaggtggcggatcacctgaggtcaggaggtcaagaccagcctggccaacatggggaaaccctgtctctactaaaagtacaaaaattagctgggcatggtgggcgcacacctgtaatcccagctactccagagactgaggtaggagaatcgcttgaacccgggaggcggaggttgcagtgagctgaaatcgccccactgcactcgagcctgggcatcagaacaagacttcttctcaaaaaataaataaatagtggccaggtgcgatggctcacacctgtaatcccagcactttgggaggccttggtgggtgaatcacgtggtcaggagttcaagaccagcctggccaagatgataaaaccccgtctctgctaaaagtacaaaaattagcygggcacggtggcaagcccccgtaatcccaactacttgggaggctaaggcaggagaatcacttgaacccgggcggcagaggttgcagtgagctgagattgcaccactgcactccagcctgggagatagagtgaaactctgcctcaaaaatachtacatacatacatacatacatacatacatacatacatacatacatggcaggtggctcatgccggtagtcttaacactttgggaggccaaggcaggcagatctcttgagcttaggagtttgagaccagcctgggcaacatggcaaaaccctgcctctactaaaactacaaaaaaatagctgggcgtagtggtgcacacctctggtcccagctactggggaggccgaggtgggaggatcacttgagcccaggaggtggagattgcagtaagcttgagatcgtgccactgcactctaccctgggtgacagagcgagaccgtgtctcaaaaaaaaaaaactttaaaattttacaatcaggccaggtgcagtggctcatgcctggagttccagcactttgagaggccaaggcaaaaagatcgcttgagtccagttcaagactagcctgggcaaaatagtgacatsctgtctcaacaaaagaacaattaaaaagttagctaggggccgggcacggtggctcatgcctgtaatcccagcactttgggakgccgaggtgagcagatcacctgaggtcaggagttcgagaccatcctggtcaacatggtgaaaccscatctctactaaaaatacaaaaaatagctggccgtggtggtgtgcagttgtaatcccagctactcaggaggctgaggcaggagaatcgcttgagcccgggaggcagaggttgcagtgagccgagatcatgccattgcactycagcctgggccacaagagcaaaactctgtctcaaaaaaaaaaaaaaaaaagctagaggtcggacgcggtggcttatgcctggaatcccaacactttgggaggttgaggccggtggatcacctgagttcaggagttcgagaccagcctggccaatatgtcaaaaccccttctctactaaaagtacaaaaattagctgggcgaggtggcagacgcctgtaatcycagctacttgggaggccgaggctggagaatcacttgaatccaggaggcagaggttgcagtgagccaagaatgtgccactacactccagcctgagcgacaagagtgaaactctaaataaataaagttagccaggtgtggtagcgtgcacctgtagtcccaactgctggggaggctgagatgggaggattgcttgagccccagagatcagggctgcagtgaacactgattgggctgctgcacttcagactgggcgacagagctacatcctgtctctagaaaaccaacaaacaaaaaaccagaaatgtatggctgtgatggacaaaaatgcttatgtgcttaaaccatctgccccctttttgttttgagatagggtctcgctgtgttgcccaggctggagtgcagtggtgggatcagagttcactgcatccttgacctccctggctcaagggatcccccctcctcatcctcctgagtagctgggactacaagtgtgtaccaccagacctggctaattatgttttttattttgtatagagacaaggtctcactttgttgcccaggctggtcrtgaactcctgagcgcaagtgatctgcccacctcagccttccaaggtgctaggtaggattacagacatgagcccccgtgcctggccctgtctgcactttttttttttttttttttttttttttggagatggagtttcactcctgttgcccaggctggagtgcaatggcacaatctcggctcgctgcaacctctgcctcccgggttcaagcgattctcctgcctcagcctcctgagtagctgggattacaggtgtgtgccaccacacctggctaatttttgtatttttagtagagacggggtttcaccgtgttggtcagcctggtctcaagctcctgaccttgtgatccacccacctcggcctcccaaagtgctaggattacaggccaccacatccagccgttttcttttttcttttyttttttttttctgaggcagagtctcactctgttgcccaggctggaatgcagtggtgcaatctcagctcactgcaacctctgcctcccgggttcaagtgattctcctgcctgagcttcccaagtagctgggatttcaggcgcctgccaccacacccggctaatttttgtactgttagtagagacggggttttgccatgttggcaaaaaaaaaaaaraaaaaaaaagaagggaggacatgcataacatctaacctctcgtgcttccacatttgagcaaaggacagtgatagggcagtgacatctagtggtctgtctgtggaagagcctccctgggctcctcttgcgtgtgagtcaccttaatagctttcaaagttgtggtttatagacttcacgatatgtccagagtggaggtkccattgtttattatttgtggtttttgcatattgttctgtaaacttgggacaggaaagttctgaaatgcagtgctttaaagcattgcccaagaaactcaatactgtccaagaagtcatccacccctctttttatataaaaccatatcagtaatcatgttcatttctattcaattttgttacaaaattaatttttaagaaaatttaagcaatgaaaacacaatatacacagtcagtgttcacatctttaggtattctcgtgctaatgcttgagattgttcatacgtttaatrttgatatatgcatcatacatacatgatgatatacatgctgtgaaaaccactgctacgagtattgagacttctggtttgcaaactagatctcatctttctagactgaaaggttatgatctcaacttttcgtataagtacatcttgatagmtcataaaaagcaaattatcaatgaaaaccaacaagagttcttaatatatgttttgttataaggagaattttattcccgctttttaattaatttctgcatttttctttcagtgattccgtataggtcagtgatcatcccaatcaaaaagctgagcaatgcaataatcacatcaaacccttggatctgtgtatcaggagagctgggagacacaggagtaatgcagattcccaaaaacctcctcgaaatgacctttgaggtaggttcagctaatacctttcctagaagaatgtatcacgtgtagttttacagatgattctgtctggctttttcatttttccttgaatcaaataaaatagaggaacactcaaagcgtgcaggatcatttttgtgattatatgtctaaagttgtcttaagcagcttatatactaatttgttttgcattttcattgttaagctctatttttcacttgtaatgatgtgctttggggctttctaggtcttctcctactattttcagggtctagcacagattctagcaagcaggaaatattcaaataaatgttttccccgcggtggttctcctccctactgtaaaatgttttctgcccaaacctggtcatcctttggcaaaaggacaggagagctgatattcatgcttatggatttttttttttttttttttgagacggaatcttgctctttcgcccaggctgtgcagtggtgtgatcttcactcgttgcaacctccacctcctgggttcaagcatctgcttactggttttagaccacatggtgacatttatagaatgattctataaaaatgccttttggccaggcgcagtgactcatgcctataatctcaacactttgggagaccaaggtgagcagattgcttgagcccaggagtttgagacgaccagcctgggcaacatggtgagactccatctctacaaaaaatacaaaaattagctgggcatggtggcatgcacctgtagtctgggtacttgcaaggctgaggtcacttgagcccaggagacagaggttgcagtgagccaggattgtgccactgcactccagcctgggtgacagagtgagactgtgtctcaaaaaacaaaacaaaacaaacagccaccttttaatattgtagtcaattttcagtcttacttggtgaaatagttccatggggttaagcctgtacacaggttgatcttggtggaggaagaggacaaataattgttgtgtttgaggaaggaaatggtacgaactgaatgtcccattctcatgttccttggggtctcgaaatagcagtttccacttagagtcatgatgccctcccgcccccaggagcccagtttggccttatccatgcagtagactcaaagccacctgtatataaaatattaaaacccttggcttttcttcatctaacaataatgaaagtacattaaaacccccatcattgccatttctaagctgtctctctcatgtctacctacttctttccatctctgctgcacaactaattcaagatgccatcatccctaagttagagcatggtgatgccttctcactgagatacaaagaataaagtgctttaagaactcgyagctctggccgggccagtggctcacrcctgtaatcccagcactttgggaggccgaggcaggcggatcacctgaggtcgggagtctgaggccagcctgaccaaaatgaagaaaccccstctctactaaaaacacaaaaattagccgggcatggtggcacatgcctgtaatcccagcttctcgggaggctgaggcaggagaatcgcttgaatccgggaggcggaggttgtggtgagcggagattgcaccattgcactccagcctgggcaacgagagcgaaactctgtctaaaaaaaaaaacaaaaaaaaaaaactcgtagctctaatgggtacaaaaaaatagagtgaataagacctagtatttgctagcacagcagggtgactatagtcaacaataatttaactgtacattttaaaataactaaaagtataattggattgtcacacaaatgataaatgtttgaggtgacagacaccccatttaccctgatacagttattaggcattgcatgcctatatcaaaatatctcaattaatccataaatatacacatctactaggtacccataaaaattaaaaattaaaattaaccaaaaaaaagaacttacaattctgatgttgtcatccagcacatwgttggggtcagtgatcttttcattatcagattttagaagtcagaatttaattagtattcatttttgctattcctattatcattgctttattttgtacttgtccacaaaggaccagtgaagataacttattgataactatgccttttaaaaaatagcttcaaagacttctagtatatgaggtctgaggtcagttctgccttagtatcttattggaacagaaaaatatcaacatctcatgtaccctataaatatatatacctactgtgtacccacaaaaaattttctaaaaaagaaaagaatatcagtgtcagtgatttttaaaatctataattgttttcttgacctctttgtaacaaaatctaaatagcatctttttcctgtttttagaaattattcttacccttcaaggcayaagtcactgtctgtgttgtttgtgggttccccaagtagaagtaactgttccttccccagcgttcttctagcactttttacatctctaatctagcactgtgtgcagtgcccctcatttggtagttaatgtccatatgtctcctatctcattatgtgggagctccctgagagcaaggaatatatgtgaatatatttctctagtgcatagctgaatacattatgcagggtttgtctctgcagttgttaaattagacggaaccaaagtacctgtaaagctgagatgtaacaggatgggattgggtactaaataacctaaggtcctgtccctacagtgccagaacttggggaagctgaccactgttcagattggtcacgataactcaggactgttagccaaatggctagtggattgtgtcatggtcagaaatgaaatcacaggacatacatacaggtaagtaaatggccttgggaactcagaattctttgttttaagactcttcaggtaagaaaaggtttaagaattgtaggccaggcacagtggctcacacctataatcccagcactttgagaggccaaggcgggkggatcacytgaggtcaggagtttgagaccagcctgaccaacatggtgaaaccccatctctactaaataaaaaaaaattagcagggcatggtggtgtacgcttgtaatcccagctacttgggaggctgaggcaggagaatcgcttgaacccgggagggggagatttcagtgaaccgagattgcaccgttgcactccagcctgggcaacaaggtgaaactccatctcaaaaaaaaaaaaaaaaaaaaagaattgtttgaactcttccactgccttctgaattttagggtttttttttccaggtgaggggggcaattttttttttgtttatgtcatacaaaattgccccccaaaaaacttttttttttctttctctcttttttttttttttttttttggtctgagacagagtttcactcttgttgcccaggctggagtgcaatggcgcaatctcggctcactgcaacctctgcctcccaggttcaagcagttctcgtgcttcagcctcccgagtagctgggattacaggtacctgccaccacgcccggctaatttctgtatttttagtagagatggggttttgctatgttggccaggctggtctcaaactcctaacctcaagtgttccacccaccttggcctcccaaagtgctgggattacaggcatgagccaccatgcccagcctcaaaaaactttttaaaacaacagatgtttgctgctattgcttagtccacaagtgttggaaagattaatataactctcagaaaaaaaagaaaataaaaaagaagcctaaaataatttcagtgggaggaaaagatctcttggattccactagtcacagccaacactactctatggaaacattgtcctcttttcttctgtgcctgaactcccaaattaatttctagtttgaaaatattctgaccgggtgcagtggctcacacctgtaatccacacactttgagagactgagatggggggatcacttgaggccaagagttcaagaccagcctgggcaatgtaatgagacctctctataaaaaacacaaaaattagccaggtgtggtggtgcacacctgtagtctcaactactcagggggctgagcgrgaaccctgtctcaaaaaaataaaaaataaaaaacttgttttctgtcctaccagattcccatgtgggcggtggctggggaaaggcattgatgatgggagcctggagagaattcttattggagagttgatgacatcagcatcagatgaagatctagtaaagcagtgtcggactccaccccagcagaagtcacccaccacggctaggagattgagcatcacttcactgacaggaaaaaacaacagtaaatttatttaaatttttcttatgtgctcctatgatgtaggcttcatgtgaccatttgatagaaaacagttgtgttaatgaatgtagtgaggagattttaaaaagaagaaagttgaggaaaattcataaatattcaaaagccggaagagtttagatgttaaaatctaattttttaaaaaacttgcatgctctgtttttattaagctgtggaaatatgagtaaatattttacctgaaacttttattttttgagacaaggtttcactctgttacccaggctagaatgcagtggcacagtctcagctcactgcagcctctgcttcccgggttcaaatgatcctcccacctcagctttccaagtagctgggactacaggcacacaacatcacacctggctaatttttgtattttttatagactgcctttcgccatgttgcccaggctggtcttgaacttctgagctcaagcgatctgcctgcctcagcctcccaaagtgctggcattacaggygtgtgccaccagacctggccttgcctgaaacttaaaagagaaataataatagttatatattacagtactcccagatagccatatctagcctttttttttttttttttttttttttttgtgagatggaatctcactctgtcacccaggctggagtgcagtggtgcgatctcagctcactgcaacccccgcctcccgggttcaaacgattctcctgcctcagcctcccaagtagctgggattacaggtgcccgccaccacatctggctaattttttatatttttggtagagacaaggtttccccatgttggccaggctggtctcaatctcttgaccttgagatccacccgccttagcttctgaaagtgctgggattagaggcatgagccaccacgcccgccccagtgtctcttattctaagagattmaaatttccttctaccccttctgtcccaactttcttcctatagtaaggatgaaacaaaatactataaaggagtgaattttatgaatattatactatgttcatgtgtcatttttagtaatatagtaaacttctaatttatactaatgtaggctttaatagactaaattactaatgtaggctttaatagactaaatartgtctcccaaaaatataaaattctaacctctagaatctgtaaatattgccttatttggaaaaaggatttttgcagatgtgatagggatcttgaaataggagattgtcctggatcacatctacgtggaccctaaatgcmatcatatgtattctttcccaacactttgggaggccgaagtgggcagatcacttgagatcaggagtttgaggccaacctggccaacatagcaaaaccccgtctctactaaaaaaacaaaaattaaccaggcatgtggtgcatgcctgtaatcccagctcctcaggaggctgaggcatgaggattgcttgaacccaggaggtagaggtgaggttgcagtgagccgagctcatgccactgtattccagcttgagtgacagagtgacactctgtcttttttgggggggtttttggtgccaattttaaatagttttatttaaaacattgcattttccacttacaatacagtgtttataaagtgcaatgttatttccttcccctgtgcatatgttccacattcaagtattgagaaaaatatggaatgcttcaccaatttgcttgccatcctcgtgcaggggccatgctaataatcttctctgtattgttccagttttttagtatatgtgctgccraaacaagcatgactctgtctttaaaaaaaaaaamaamarcaacaacaacaacaacaaatgctggccaggcattatgctgaggtgggtggatcacctgaggtcaggagttcaagaccagcctgaccaacatggcgaaaccccgtctctactaaaaatacaaaaattagctgggcatggtagtgtgcacctgtaatcctagctacttgggaggctgagrcaggagaattgcttgaacctgagaggtggaggttgcagtaagccaatatcgtgccactgcactacatgcactacagcctgggcracagagtgagactccgtctcaaaaaaaaaaaaaaaaaaaaaaaacrggaatgccaacagccaccagaagctaaaagaggcaaggaagggattttcccctagaatttcaagggaatacagccctgctgacaccttgctttttttttttttttttttttggcccagtgataactaaattttgacttctggcctgcaacaaaatgtatttctgtcactcaagccaccaagttttgtgagtctattacagcagccacagaaggcagccacagaacatgaatatagaggcggtatttagggaaaaatyacagaagtttatcagtgaaggggctttttatctatagattataaccacaagtagaataacaaaggtacctaataggtccttagtttattaacaaagcagtttccctagattcttctattagtctctatccatttgctagcacatgattgtgtattaactatgagtgcagtttttttgtttttttgttttgttttgttttgttttgactgagttttcgctcttgttggccatgctggagtgcagtggtgcggtctcatctcactgcaacctccgcttcccaggttcaagcgattctcctgcctcagcctcccaaatagctgggattacgggcatgcactgccacgtgaggctaattttgtattttgggtagagacggggtttcaccatgttggccaggctggtgttgaactcctgacctcaggtgatcctcccaccttgacctcccagagtgctgggattgcaggcgtgagccactgtgcccaaccaatttaaagcacttatagcaacaaatattggtgaggatgtggagtaacagaaagctcatgcattgctagtaggaatacaaaataacatcttggcatttataaagatacatgcacacttaccgtacgcttggcccagcaatcttactcctagatatgtacacaaaagaaatgaatacatatatctacacagacttgtacccagatrttttgagagatttattcataatagccaaaaatggaaacaaccccaatatacatcaactggtgaaaggataaacagatagtgatatatatctgtttatatatcagatctctataaaagcaatataataatagaaagtagatcattggttgccaggagttaggagctaaggaaggtaactgaaaagagcacaggataggccgggcacggtggctcacgcctgtaatacagcactttgggaggccaagacgggcggatcacaaggtcagcagatcgagaccatcctggctaacatggtgaaaccccgtctctactaaaaatacaaaaaattagccgggcatggtggcaggtgtcaatagtcccagctactygggaggctgaggcaggagaatggcgtgaacccgggaggcggaacttgcagtgacctgagatcgctccactgcactccagcctgggygacagagcgagactccgtctcaaaaaaaaaaaaaaaaagakcacagggtaacttttggggatgatggaaatgttctgtatcatgattgtggtggtggttacatgactatccatttgtcaaagctcatcaaaattggtgacttttattacatggtgaattttaattatgctgatttaaaatttaaaagtaggtttcagctcaatccatcctaattattataacatctgagtcagtccaatttcatgggggtattatctgagaggcttttatcccccatttttttttaatcgtactttcttttctcatgctataarcagaaaagtctaaatgacccaagactcagaaatggataacrgtattttctcacagtatgttatatgtaaaatggtattcagagaactgaaaatttttaaaatcagttttataataatactgatcaaagctcttttggaatgggtgacagttttcaaaatagacttcatgtctaaaagaaaaaatagagaaaggtaaaggtaaaaaaaacaaacaaaaactactgggtaaagaaaccactaggaacaagaggccatggtatcagtacttcaattataagaggttttcattttaacaatttttatgcattagtgtagaaaaaacctacttgaattttactgaaagaaacgttagccgggcatggtggcttaygcctgtaatcccagcactttgggaggctgaggtgggcggatcacctgaggtcaggagttcgagaccagcgtgaccaatatggtaaaaccctatttctactaaaaatacaaaaraattagccatgcatggtggccggcacctgtagtcccagctacacgggaggctgaggcaggagaattgcttgaacctgggaggcggagggtgcagtgagcygacattgcaccactgcactccagcctaggagacagagcgagactccatctcaaaaaagaaaaaagaaatgttcatgcaagaaatccttgagcagtatgaattcagagattcttaaacatgaggatgtatgggttttcctttatagtgtgttaagtaaattagaactacaagaaaatctgaactatataccttttctgttgttacctacttctgaaatgtttaccacctttttaaaaaaacaaaccattccttgggtttggtggacaaaagtgatttaggtcgcattcaagcagcccaccaacctgtccctcaggaaagtggcctagaagagcaagtactggctggcagaaggaagcagtgctgagacagattgactagccaggaagggagggagttctgggcttcaggcccagatgccacagggtacctggcatcttccccttattttaaacacaacagcaaatcttcaaactccaggttaactatccagagcgcctgaagccttaatctatgcccactgacaggcttgtaggtaggtagcataagggaacattccactaacaggctcgtaggtagatagcataagggaacatttcactaacaggctcgtaggtgggtagcataagggaacatttgaggagtgatgttgggacttctcaaccttgcttctcatatttgggggcttgctagcattttgtgacaggcgccatgctagttatttactcctataacttaccagttttcccagtgaggcrtgtatttttcctattttcagttgaggaaactgaaagctcagaggaagttagacactaggctagggttatagattgcagatggtaatgctgggatttgaatctagggatcgcttggattattttccattttgccaggatgcttcccacttggccaaacaggccagaggcaagttctatggagcccctggcaaagccagcctgctctgatgacgtatttcctgcctaggtggacacagttgatgtcccatagtacyttggtttatttctctcccatgagaatgcagccactgtttattattttacagaacccaatgctgggcagatacaagaaggaattggagaagctgtgaacaatattgtgaaacattttcataaacctgaaaaagaggtatttatgggctataaaacttagtatagtgggacttttaaagatgcttttatatgtgatacacgaggcaatatggggtgcttgaattttcatttgtaagctttctggtagctgtaaaaacatgcttcatatagctaccttcagcacttgcttctctagtgtttttyttagacatagatgcaggagatttttctttggcactgtgtgttatgccccacagagaggaagcctcaccgtgttgctgtgtggagaaaatggcctggttgcagcccttgagcaagttttccaccatgggttcaaatctgcccgcatctttcacaagaatgtcttcatctgggacttcataggtaaataaagtagatgtgtattacattaaggtcactgaagcctttcttaggaactcaaagacccaggaatctgagtgaataagggttagtgataaggrtatatatattttttttctttttttttttttgagacggaatcttactctgttgcccaagctggagtgcagtggtgcggtcttggctcactgtaacctccgcctcccaggttcaaatgattctcctgcctcagcctcccaagcagctgggactacaggtgtgcaccaccatgcccaactaatttttgtatttttaatagagaaggggtttcaccatattggccaggctggtcttgaactcctgaccttgtgatccacccgcctcagcctcccaaagtgctgggattacaggagtgagccrtcgtgcccggcaaggatatatatattttaaaataaatattaaattagctgggtgtggtagcacatacctgtggtcccagctacctgggaggctgaggcaagagaatcgcttgagcccaggagcctaggaggtgaaggctgcagtcagccatgatcaagctactgcactccagcctgggcgacagagtgagaccgtgtctcaaaaagtgtatataataatgataaataaatatcaagtattgtctttgtttttcatttactcaacaaattgtaatatgcacaatattccaaatagtatttgagttgctcaagatatacattagtaaacaaaacagaaatcctatggttgacaaacttatactcaggtcggtgtgggaaacaaacaatacacaaaaacataacaaatatgtaattcatatggtatgtcagaaatgtgaccattgatctggaaagaaatagagcagtataaaaggaaataaagtggggagtggtctttcaaatggggtggttttagattctgctgaatgtcaaggtacattggagcacagacttcatgtaggtgaggaagtgagccatgtagatatctgggaggagggactccaggttgacagcactgccagtgctaagccccaaggcggaagtgtttccatggaactccaagcccagtgtgactggagcacagcaagagagagaaagtaggagattgggggagggggtgtttagtgccagtgccaggttgtgtagggccttctaggtcattggaatgatttcagcctttatcctgaatgaaactggaagctgttggaaggttttgagctaagtagtgacatgatagaacgtttttgtttgtttgtttgagacagagactcactctactgcccaggctggagtgcagtggccccatctcagctcactgcaacctctgcctcctgggttcaagcggttctcctgccccagccactgattagctgggattacacctgccaccacacccctaatttttgtatttttagtagagatggggttttgccatgttggccacgctggtcccaaattccgtcctcaagtgatccacttgccttggcctcccaaggtgctgggattacaggtgtgagccactgtgcctggccaatttttgtaaaaggattcctctagctctgtgttgtccagtatagtaaccattagccacatatagccatttaaaatttaaatctatttaattttttttgtttgttttagatggagtctcgctctgttgcccaggctggagtacartggtgtgatcttgggtcaccgcagcctctgcctcctgggttcaagcaattctcctgcctcagcctgagtagctgggattacaggtgcctgccaccacgcccagctaatttttgtatttttagtagagatggggtttcaccatgctggctaggctggtctcgaactcccgaactcaggtgatctgcccgccttggcctcccaaagtgctgggattacaggcgtgagccaccatgcctggccaaatctatttaatttaaatcaaatgtaaatgtaaatttcattttcttaataacactggccacatttcaagtgctcaggagccacttgtggctaccaaattggaccttgtagatagagaacattttcatcatcacaggaagctmttttggagtgtttctgttctagcttgctaagctttgtgatctttcttttggtatgcagctcttctagaattcctagtttctttaaatgggcaattaatcattttgtgttttctaaataaggcctagatgaagtagtttatttcatctaacttagaatagacaaaaaaaggaaagttgtcagagataggcccccaggagtgattttttttttttcttctggaatgcctagaatcttattgcttctgcttctcatgtgtatatacatatatctctctttgtcaggtacttattcaggtacatttcaaggatcttgttgcaaagtgttagcaagtcattctgtaactagaacatggggtattatttcaatggctaccgtgtcattgctggttactcctagaaggttccagtcttaacagaagatgctatttttgttttcttttttgccagtttctgtttcctgaaggtattttaaagggagtaaactttccagtcttctggaatgcagtctaaattagaaaataaattcctgggagcatatttattgttctaccatgaaacatcgacccctaaaatcaatgataaagtaatgatattggcttcaggactgactgtatgcaaagcatcgttagtgtttccataataaattaagtgatgaatctttctatatatgaagtgttgacacatattgtgacataattctgacttttttcctcagagaaagtggttgcttattttgaaacaactgaccagattctagataatgaagatgatgtccttattcagaaatcatcctgcaaaaccttctgccactacgtaaatgctattaatactgcacccaggaacattgggaaggatggcaaattccagattttagtttgccttggaacaaggtacaaaaccagttttttattttccctatctttgtcacatgttgaactagagtccagaaaaggttataccagatcataccccttccagagctctcctttgggtttctttccttttactttttcttttgaaacagagtctcactccatcgcctaggctggagtaccgtggcataatcktggctcwctgcaacctctgcctcctcccttgggtttctttaattcaccaccaccactacatgaggtagcaaccgattttttcattttaaagatgagaaagtagaaaatagatgaggcacacgtaagttagcagactttcccaagatcacacagaaaaatgagacagagccaggttcacaccctgtcccacttcagagcccaagctctccaccatgactgtatactggctcgacagatagataggtaataaggaagttgttagataactagacacatacactgtacatatttactaagtaaaccttatatagtgtatatataccactatatttacatttaataacattatgggattcttgctatataaatatcatcttctctttaagactatttcctacccctttattttttgaaagtggcacataggagcgatacaatccattacttttaaaacagatctcagaaytgtaagaaatgaaacatacagacctttagatttctttttttaagttacccatgtagtatttgttttttcctgaaccttaagagccccaacttgagactgaagatggcctgattggggatgctcaataaggatgtcttaggaacttagcaatgggttactaatgtcaggtttgatcaggaaacattgaagatgtgaggttttatcttcctgaaacagctggtttacagaactaagttctgtatttcttcttcataaaaggagcccagttttagctgtgcttttaaagtttcttttgagcatgatctttatctccttttatctctatactcttctgatttattagaccattgcaaactctcatctggtttataaaatctacttaatgtttttctgctttgattttgttcctcaccctgttatgttatataagttaaaaaaaaaaaaaaaaaaaaaagcaagtccctacagtttagtgtagtctttcttccaaaaggtcagtatactgtggcatgccttgccacagagtaacactcctattaaaaaaaaaagacatagaaaatgacattctgcctctttctaaaggtggtaaaatcagaatagagaatgtctttaatgtgcatagactttctaatgtactttaaactcttaaagtacattaaattgggtttaaaataatgggttttccctttagctwtctttacactgtctcatcactgtctttttaccagaaaatattcaacttcttggctttgatttcctctctcctgacctcttagcttggatacattttgtaccatcaagtcccacaccttcccattcatacagactccactgtgtgccttgttctgcagcgaggccagcaatgctcaggaattgtttctgtttgggtctgtagggatcgcctgctcccacagtggattccattgttagctgagtgtcctgccatcactcgaatgtatgaagagagcgctctcctgcgagaccgcatgactgtcaactcccttatccgaattctgcagaccattcaggacttcaccatagtcctagaaggatcactcatcaaaggagtggatgtgtaacccaactggctagaaactctcagtccaaaccttgctccttccccaactaggggaccgatttggacttgtctgacagtagtgagtcactgcaggggcagccaaacatatgccccatttggaacaatcctcactctacagacaaggcaaaatgttgtattgtagttcatttgaacctggaatttagtataaaatagagtattttcatgtgttagatgtgtgtaaatatgctatcttctttaagaaattatattactctaataagatgcttttcttagattgaatattcctgtgacttaaaataagtagcttaaaaatgttgggggttggggggaagagtggtgctagccaggaagaagccagtaaacatgtaaatatagtgcaacccagtcgggcttttttttttctccaggtatcacaaagaaacccagaatgcattgttatgtagtagccatccatcttggagtctgatcctttgtattgtggatgcacacagctttacctactgtactggtagtcttcacttctatcttttaagttacaaactgttttatatatttgaatcgctagtcacttttccagtcttttggaaaaaaatttcagtccgcacaagatgatataattggagtattttaaacactagaccccaggagcttggctgaactggaaagagaacatacaaagctctgagaaatgtgttcaattgtgggattataacttctttacacttcggaaagattagcctagactaacttcattcttggcatttttattcttgttatttgaggtactttgggaagatgtgaatttcagtgttagattcatagtgataagaactgcaaacagcaatttgattctgtacttttaatttggccatctaaactgtgcagtggtctacctcttaaggataaccatgagccctgtctttgttagggtctaatcacccacctctccagggcccatcccccctcgggaaatggaaggaatgtctaaggaggaggagggctgtgtgtggcttggaatgtttttgtgaaagcatttgttgaccatgataatgcaaataacagaaggagagagagaatgaaccctttctgggtgtttcagggcaagctttacgttcctttgtaggaaggggagtaataatgtaaaacaactgacccagagaagctaaaagccactggcagcacaggctgacaaaatggaagcaaagcaagaggtggcaacaattttgaaagamcaaaagttgtgagtaactttccagtttgatagtttataaagaagttaagtaaatgtagtattggctagttactgtaagtcctcatcttctggtaggtcctgtaactctaattaggcatttgtacatttttagcagcaaaattgcctcagcagagctcccagttttattcccagttgtggcygaaaagcaaagccatggcatcagtatccttgtgcaatcggaggttgctgggctttcaccacctgtgttgttaaccttatttcctggaggaagaaacagatgaaacaagtgcctaactccctttatcaaacacagccaaggacagcctcttttaacatgtgacttcatacttgaggaaaaggagagttgacagctgtatttaaaaacccatggagccgggtgcggtggctcacgcctatgatcccagcactttgggaggccgaggcaggcggatcacaaggtcaggagattgagaccctcctggctaacaccgtgaaaccccgtctctactaaaaatacaaaaaattagccgggcgtggtggcgggtgcctgtacaggaggctgaggcaggagaatggcgtgaacccgcgaggcggagcttgcagtaagctgagatcgcgccactgccctccagcctgggcaacagagcaagactccatctcaaaaaataaatagataaaaataaaaacccatggaaatggtttaagaaaatggttctgggtacaccagaaatttgtttgcctgaagctaaagtgtgtctacaatggtacagctcttccagggacatgggaagtttatcgtgggagatatccagaacctgttttacactgggctcctactgtgtttggtgatcagaaactatagaggggtccaacccaggatttcatgtttgtatcttcataaggccatgctcctgacaggtctaggcaacctgggggatgamttaggttartgtgctaggattgacacacctcatccagccttcttactttgtggatgggaacacttaaggaatagagagattaaatcttacacttaccccacagctggttactgacaacacaagctctagaattcatgtttgtttgtttgttttatttcaccaggctgcatgagactgaccttccggcattcttactaatagtctttctattatactattggatctttattcatccacctatacaagtaggaaataaggatgaatattcatttagaagaattaatattcatattmacacattgctctcagattattgggaattaacatcttgtaaaaactgggagcaggccaggtacggtggctaacgcctgtaatcctgacactttgggagtctgaggcgggtggttcatctgaggtcagtcrggagttcaagaccagactrgccaacatggtgaaaccccgtctctactaaaaaaaaaaaatagacaaaaattagcgggggggtggtggcagggcctgtaattccagctactcaggaggctgaagcaggagaatcgtttaaacrcaggaggtggaggttgcagtgagccgagattgtgccactgcactccaacctgggtgacaagagcgagactccgtctcaaaaaaaaaaaaagaaaaaaactgcagscaaagttggatttgcggcctatgaataaaaccattactttaaaaagtaatacccccaaaaaagttacacctgaagtttcatcttcatgcctttgtgtaatattactataatggtgaaatgatgatttaaaaaaaacacatcagaactgacacatcctcttggatgatgggtccttcagtcaccttgtgagcccatgtacttattccgttgatacagcctgtgctataaacatgtggggccctccttgtgtgagctgcttgaatggccagtacccccattcttttgaatattcccaatggcagtcaatcttggcctttaagaataaatttaaatatttggaaatagtccttaggatccaagtttgatcaatgaaaaggatgcttaagctgagtttggggtcacataagaagtgcagttataaagaaataagacatgttgggcatggcagtacacacctgtagtcccagctgcttgggaagccaaggcaggaggatcacttcaacccaggagtttgagtccagcctgggtaacatagggaaaccccatctcaaaaaaacaaaacaaaggacttagtttttatgtggctcataagtgtctctaagttataccaaaagtttgagcacaacagtagtagcagaatgcttagaataaatgcttgacttttaagctgacttttggaaggaccatacccacatagaggcatcttttctgctgtggtaattttttaaattaatacattgctttaggattacatctcaaagtaaataaaaaaatcaatatttaatttgtttttttcctgcaaataaattaaatgctgggaccataatgattatttttgcatagtaatagctggtgaagaagttgttttaaaattaaattgccaaaagtattacctcttgaaaaatttattttcccaawgtttttcatatgtcatgaaacccctaatcttgacctttatgacacagtggcattacactgatgttggaagcatgtgtgagatctgtgccctggtcgggagtcatatgccttaaaaatgactgcgagtcagtgtgaagtagtataaagtggagtcctacgtgggaaaaagcaggctactgaggacaaaaacctcccaaccctccccaccttgttttccactgggaatgagaakttgatatgagaaacttcaaccttgcagaagtgtggatttccctctgaaatttaaatgtttcacacatttttgtaccttttgtaaccttgtggtatttactttcacatggctttttaaaaaattattttaatgaacttctatcacactatatgaatgatatgggggaaatactgaactgctcatatttccttttttggcaataaagcactgttatatgtaaatgtaagtgaaaaagaggttcaagactatacaacagcttatgtgtagtatatgttgacatccctaaggtattttgaaacatgaggtgacagacaaggacctcaaatttccagggaaatatttatttcacaacattaggagtgtagctcttcataatgaaatatcttctttctgctaaagattacaatttttcatttagggaactgtgaatattttctgtgaggtttacagaaactagtgtatccttttcactatgttgaaaagacaatctgaactttagctatttatatttcagtattaacacaccttcactgattgagagtcttgagcccttctctacttttataaagtgaatcctatttccaagtcatccatgtcttttgaagtctgtttcttatataagtatttattactttactgtttagcataaataggagacagaaaaggataataaactactaggtcctttattcctattaaaataaatttataaatcccttgaatcaactgaattctaagctttttgaagaggttgctgatgtagtgtgatcaaaagaatctaaggagaacctcmtctccaaaatctgattggagctgttcaccctctcaaggacaagataaagattgacttcagagatayatcacatcaagctagaggaaaaaaaaaaaacctcaaataaaatttttcctcattcgaagggatccagggtatccttgggttatgtaggagggaatcatatttgttctaatttacctgaatgtacttgtgtgtgaatccaatcttgattctaaacaccaaatcttgtcaacagtagagaagtatagtaaggagttcctgttgtcaatcaaatgagggtgtgaaacatttagaatgctctgtgttacacttgaaccatgtataaatgtaacctgtgtatcttttttttaattagcttttctgaatttaaattatattgtttttctttgtattgttagcaaaatgcatcagaactggattttttttctcatctgaacataatataaaatttgaaagagtattgtgatattaagcactttaacatacatatcagacaaactgacgtgggtttttcaggtttgggagtacatttaaatatgacttttcatgctttgttctttacaaataaaactgtgggattgatactttgttttgcttcattgttgtagaatcttgatagtgtttcataggataagagacttcagaaagcagagagatcaaaccaaaaccattatgtagaaaaaaagagccttctgagtaaggggtgaaaatttgaaccctacctcacaccatacagaaaaatcaattcttggtggcttagcaacctaaatgtgaaagatgaaacataatttttaggagaaaatacaaaatgtacttattaacttgggaaagggaagttttcttaagacatttaaattataaaggataagtgataaatttgactatgttcacaggtgttttgctataaaaaaattgactatataaaaattaagaatttctggtcatcaaaatatatcattaaaaaggagaaggcctgtaatcccagcattttgggaggccaaggcgagtgcatcacttgaggtcaggagttcaagaccagcctggccaacatggcaaaaccctgtctctcctaaaaatacaaaaattagctgggtgtggtgacaggtgcctgtaatcccagctactcgggaggctgaggcaggagaatcgcttgaacccgggaggcggaggttgcagtagctgagatcatgccactgcactacagcgtgggggacaggagtgagacttcatctcaaaaaaacaaaacaaaaaccatgaaattcttttttttttttttttttttttttgagacagagtctcactctgtnnnnnnnnnnnnnnnnnnnnnnnnnnnnnnnnnnnnnnnnnnnnnnnnnnnnnnnnnnnnnnnnnnnnnnnnnnnnnnnnnnnnnnnnnnnnnnnnnnnnnnnnnnnnnnnnnnnnnnnnnnnnnnnnnnnnnnnnnnnnnnnnnnnnnnnnnnnnnnnnnnnnnnnnnnnnnnnnnnnnnnnnnnnnnnnnnnnnnnnnnnnnnnnnnnnnnnnnnnnnnnnnnnnnnnnnnnnnnnnnnnnnnnnnnnnnnnnnnnnnnnnnnnnnnnnnnnnnnnnnnnnnnnnnnnnnnnnnnnnnnnnnnnnnnnnnnnnnnnnnnnnnnnnnnnnnnnnnnnnnnnnnnnnnnnnnnnnnnnnnnnnnnnnnnnnnnnnnnnnnnnnnnnnnnnnnnnnnnnnnnnnnnnnnnnnnnnnnnnnnnnnnnnnnnnnnnnnnnnnnnnnnnnnnnnnnnnnnnnnnnnnnnnnnnnnnnnnnnnnnnnnnnnnnnnnnnnnnnnnnnnnnnnnnnnnnnnnnnnnnnnnnnnnnnnnnnnnnnnnnnnnnnnnnnnnnnnnnnnnnnnnnnnnnnnnnnnnnnnnnnnnnnnnnnnnnnnnnnnnnnnnnnnnnnnnnnnnnnnnnnnnnnnnnnnnnnnnnnnnnnnnnngaacctgggaggcggaggttgcagtgagccaagattgtgccactgcactccagcctgggtgacagagcaagactgtctcaaaaaaaaataaataataatagcaaatggccgggtgtggtggctcatgcctgtaatcccaacagtttgggaggctgaggcaggcagatctcttgaggccaggagttcaagaccagcctgaccaacatggtgaaacctcatctctactaaaaatacaaatattagccaggtttagtggtgggcgcctgtaattccagctactggggagactgaggcagaagaattgcttgaacatgggaggcagaggctacagtgagccgagatcatgcaactgcactccagcctggacaatagagtgagaatctgctcaaaaaaataaaaataaaaaataaaataacagcagagaagagggattgaaagtatagttggggctgctgactacaattaatgggttgctagggaaggccttactgaaaaatggagttgcctttaactgagattggaaaagctgtaaaagaaaacaagtttggctgggcgcagtggctcatgcctgtaatcccagcactctgggaggccaaggcaggcggatcacctgaagtcaggagttcaggacyagcctggccaacatggtgaaaccccgtctctactaaaaatacaaaaaactagctgggcgtggtggtacacacttgtaatcccagctactcgagaggctgaggctggagaatcacttgaacccgggaggtggaggttgcagtaagccaagatcgcaccattgcacttcagactgggggacaagagcgagacttcatctcaaaaaaaaaaaaggaaaaaaagaaaagaaaagtttgtgggaggagcatcaagagctacttttggggataacaaatttgcgatgcttttgagacaccttttagacatccagatagagatgctgggtaagcatctgcacatatggattgggagttcaggagagaataatagtgtattcatcacggtccaatcaggagacagaaaccacacagcaatttgaactggggtagttgaatgtaaagaataatgtaggctgggcgtggtgggtcacgcctgtaatcccagcactttgggaggccaaggtgggtagatcatgaggtcaggagtttgagaccagcctgaacaacatggtgaaaccctatctctactaaaaatacaaaaagtagccaggcgtggtggcgcgtgcctgtaaccccagctactytggaggctgagggaggagaattgcttgaagccgggaggcggaggttgcagtgagccgagatcgcaccactgcactccagcctgggcaacagagagggactgtctcaaaaaaaaaaaaaaaagtataatgtattagggttctccagagaaacagaactaataggatatgttatagatagagaaacattttaaggaattggctyacacaattgtggaggcctggggagtctaaatctttattgtgggccatcaggttggagactcagggaagagacagttcaagccaaaaggcagtctgctggcagaatttcttcttgctcaggaggaagtcagtcttttttatattaactccttaaactggatgaggcccacccatattacggatagtaatttgctttactcgaagtccaccaattaaaatgttaatctcgccaggcactgtaatcccagcactttgggaggccgaggtgggtggatcacagggtcaggagttcgagaccagcctcaccaacatggtgaaacgtcgcctctactaaaaatacaaaaattagatgggcatgatggcacacgcctgtaatcccagctactcaggaggctgaggcaggagaatcgcttgaacccaggaggcaaaggttgcagtgagccgagatcatgccacagcactccagcctgggtgacagagcaaggctccatcacaaaaaaaaacaaaaaacaaaaccattaatctcatccaaaaacaccttcatagtagtatccagaataatgtttgaccaagtttctgggcaccctggcccagttaagttgaactaagattacctatcacaaacaataacaagaaattggaataatggaggatctgatgccaggtgatgaaaacaaaactcttaatataagaaaaacatttatagggaacagccattaactatagggctgagttggctgggcgccgtggctcacatctgtaatcccagcactttgggaggctgaggcgggcggatcacgaggtcaggagatcgagatcatcatggctaacatggtgaaaccccatctctactaaaaattaaaaaacttagccaggcatagtggcgcatgcctgtagtcccagctactctggaggctgaggcaggggaatcgcttgaacccaggaggcagaggttgctgtgagcagagatcacaccactacactccagcctgggcaacagagtgagactccgtccccccccaaaacaaaaacaaaaacaaaaaacaaaaaaaaccgataggcctgagtcaaggcaaatctaaatgagccccctctgcctgaggttgaaccagaccctgacagagggtacaaccttctctctgggtggcaaagaagtttactgaggctgggcacagcggctcacacctgtaatctcaacactgtgggaggctgaggcagtcggattgcttgagcctaggagttcgagactagcctgggcaacatagcaaaaccccgtctctactaaaaatacaaaatattagcctggcgtggtggcacgtgcctgtgttcccagctacctgcagggctgaggtgagaggattgcttgagccccagaggtgaaggttgcagtgagccgagatcgtgccactgcactcctgtctgggcaatagagtgagacccagtctcaaaaaaataaaaatgagtttactgagacatttaaaataagtggacttgtttggaatctgcccccaggtgccaaggacacatccatgaggaggtgccatactccagaacttgctgggacaccacagaggaaattcaatgtcttggtctggatttggggagctatagctggactttagatataaatttgggagtttccagcatgtataaatggaacttaatgtcatgaaaccaatattaaatcatgtgttcatgagaacacaaagggattgagttattaaatctaaaacattgattttaattttgtgatatggatgtggcatgatttgtttgacatttagattactctcatttttttcactattctgaacaatgttacgatgaaaaacgttacaggcacggtgactcaacccgtaatcccagcactttgggaagatgaggcaggaggatcactggagcccaggagttcaagaccagcctggggaacatactaagaccctgtctctctactaaataaataaataaatagaaaagaaagacatctaaatagctcccaatgtttctctattccaaaaaaactataatgaacaaacatccttattttgtaagaaattacctcttttatttatttatttatttatttatttatttaaagatggagtttcgctcttgttgcccaggctggagtgcaatggcatgatctcggctcatcgcaacctctgcctcccaggttcaagcgattctcctgtctcagcccccctagtagctgggattatggcatgygccaccacgcccggctaattttgtatttttagtagagacggggtttctccatgttggtcaggctggtctcaaactcccgacctcaggtgatccgcccacctcggcctcccaaagtgctgggattacaggcatgagccaccgcgcccggcctagaaattacctcttttaaaggtcaaaggcaaatgttaacaactccataggattcaacctaatatttttgataattcttttgattctttatcctgacatgtactgtactttgattcaaatatatacgattttagaacatgttgaaaaaaggaaaaaaaaagagcaattaatgtgggttgcaaagcctaaaaataagtcactcaaatgagggctggtgcgtgggccagatgctccctgttctctagaataatataagcttgaggtctatcatttgcttaacccatagcctgtgttctttttttttttttttttttgagacggagtcgccctgtcgcccaggctagagtgcagtggcatgatctcagctcactgcaacctctgcctcccaggttcaagcaattctcctgcctcagcatcccaagtagctgggattacaggcatacaccaccacacccagctaattttctttgtatttttagcagagacagggtttcaccatgttggccaggctggtttcaaactcctgacctcaggtgatccacccacctcagcataatgcctggccagcatttgttgttgttgttgttgtttttttttttttttttaaagacagagtcatgcttgtttcggcagcacatatactaaaaaactggaacaatacagagaagattattagcatggcccctgcacgaggatggcaagcaaattggtgaagcattccatatttttctcaatacttgaatgtggaacatatgcacaggggaaggaaataacattgcactttataaacactgtattgtaagtggaaaatgcaatgttttaaataaaactatttaaaattggcaccaaaaacccccccaaaaaagacagagtgtcactctgtcactcaagctggaatacagtggcatgagctcggctcactgcaacctcacctctacctcctgggttcaagcaatcctcatgcctcagcctcctgaggagctgggattacaggcatgcnnnnnnnnnnnnnnnnnnnnnnnnnnnnnnnnnnnnnnnnnnnnnnnnnnnnnnnnnnnnnnnnnnnnnnnnnnnnnnnnnnnnnnnnnnnnnnnnnnnnnnnnnnnnnnnnnnnnnnnnnnnnnnnnnnnnnnnnnnnnnnnnnnnnnnnnnnnnnnnnnnnnnnnnnnnnnnnnnnnnnnnnnnnnnnnnnnnnnnnnnnnnnnnnnnnnnnnnnnnnnnnnnnnnnnnnnnnnnnnnnnnnnnnnnnnnnnnnnnnnnnnnnnnnnnnnnnnnnnnnnnnnnnnnnnnnnnnnnnnnnnnnnnnnnnnnnnnnnnnnnnnnnnnnnnnnnnnnnnnnnnnnnnnnnnnnnnnnnnnnnnnnnnnnnnnnnnnnnnnnnnnnnnnnnnnnnnnnnnnnnnnnnnnnnnnnnnnnnnnnnnnnnnnnnnnnnnnnnnnnnnnnnnnnnnnnnnnnnnnnnnnnnnnnnnnnnnnnnnnnnnnnnnnnnnnnnnnnnnnnnnnnnnnnnnnnnnnnnnnnnnnnnnnnnnnnnnnnnnnnnnnnnnnnnnnnnnnnnnnnnnnnnnnnnnnnnnnnnnnnnnnnnnnnnnnnnnnnnnnnnnnnnnnnnnnnnnnnnnnnnnnnnnnnnnnnnnnnnnnnnnnnnnnnnnnnnnnnnnnnnnnnnnnnnnnnnnnnnnnnnnnnnnnnnnnnnnnnnnnnnnnnnnnnnnnnnnnnnnnnnnnnnnnnnnnnnnnnnnnnnnnnnnnnnnnnnnnnnnnnnnnnnnnnnnnnnnnnnnnnnnnnnnnnnnnnnnnnnnnnnnnnnnnnnnnnnnnnnnnnnnnnnnnnnnnnnnnnnnnnnnnnnnnnnnnnnnnnnnnnnnnnnnnnnnnnnnnnnnnnnnnnnnnnnnnnnnnnnnnnnnnnnnnnnnnnnnnnnnnnnnnnnnnnnnnnnnnnnnnnnnnnnnnnnnnnnnnnnnnnnnnnnnnnnnnnnnnnnnnnnnnnnnnnnnnnnnnnnnnnnnnnnnnnnnnnnnnnnnnnnnnnnnnnnnnnnnnnnnnnnnnnnnnnnnnnnnnnnnnnnnnnnnnnnnnnnnnnnnnnnnnnnnnnnnnnnnttgagacggagttttgctcttgttttctgttttgttttgtttttgagatggagtctcgctctgtcacccaggctagagtgcagtggtgcgatctcagctcactgcaacctccgcctcccgggttcaagcaattttcctgcctcagcctcccaagtagctgggattacaggcatgtgccaccatgaccggctaattttgtatttttagtagagatggggtttcaccgtgtgttggcaaggctaggtctcgaactcctgacctcagttgatccacctgccttggcctccaaaagtgctgagattacaagtgtgaggatgtcataaaattaagaatggccaggcatggtgtttcatgcctgtaattccaggcatgggattatatcctttgggaggccaaggtgggaggatcacttgaggccaggagtttgagatcagcctgagcaacacggcaaaactctgtctstctctctctctctacaaaaagaaaagaaaaaaaaaaaagatgggccaggcgcagtggctcacacctgtaatcccagcactttgagaggccaaggcaggtggatcacctgaggtcaggagttcaagaccagcctggccaacatggcgaaatccagtctctactaaaaatacagaaattagccgtgtgtggtggcgcttgcctgcaatcccagctacttgggtcgctgaggcaggagaatcgcttgaacccaggaggcggaggttgcagtgagccaagactgcaccactgcactccagcctgggtgacagagcaagactctgtctcaaaaaaaaaaaagaaaaaagaaaaagatggacagtgtctttgttcattcaggcttctataagaaaataccagcctgggcaacatagggagaccccatttctacaaatatcaaaaaattggccaggcatggtgtcatgcacctgttgtcccagatacttggaaagctgaggtgggagcattgtttgaactcaggaggttgaagctgcaatgagccatgatcatgccactgtactccagcctgggtaacagagcaagaccctgtctcaaaaaaagaaaagaaaaaaataccatatgcgggatgacttataaagaataaacaacaggtcgggtgtggtggctcatgcctgtaatcccagcactttgggaggcwgaggtgggcggatcacatgaagtcaggagtttgagaccagcctgaccaatatgatgaaaccccatctctactaaaaatacaaaaattagttgggcttggtgacgggtggctgtaatcccagctactcsggaggctgagactggagaattgcttgaacctgggaggaagaggttgctgtgagctgagattgtgccactgcactctagcctgggcaacaagagcaaactctgtctcaaaaacaaaacaaaacaaaacaaaaaacagacataattgtggaggctgggaagtccaagagccaaggtgctagtatctggtgagagcctattcctcacagacggtgccttacagctgtgcactcacatggtggaaggggtaaacaatctcctttggccctcttataagggcgtgargcccattcatcacctctcaaatgaccccaactcttaatactatcacattggagattaggtttcaatgtacgaattttgaggggatacaaaagttgtgaccataacaatgatcaagctcatatgcttcttattctgaccaaagatctggyggaacatgtttgcagcagaggccttgggtcctgaaagaaataaatctgccaggcccaggactaagtactcttctaccagaatgtatgctctctgaaagaaatttaggagaatgcaaagataagccacagactggtagagaatattagcaacacacatatctggcaaagggcttgtatccagagtatataatgaaccctcaaaatgcaataataagataaacagcccaacaacaaaaaaagggcaaatggccgggcgcagtggctcactcatgcctgtaatcccagcactttgggaggccgagatgggcagatcacgaggtcagcagatcaagaccatcctggctaacacggtgaaaccctgtctctactaaaaatacaaaaaaaaaaattagccgggcgtggtgaccggcgcctgtagtcccagctactcgggaggctgaggcaggagaatggcgtgaacccaggaggcggagcttgcagtgagccgagatcgcatcactgcactccagcctgggggacagagcaagactccatctcaaaaaaaaaaaaaagcgtgcaaatgatttgaataggcacttcaccaaagaaaaacataaaaggatgtcaaaaagcccacaaaaggctggacacagtgggtcatgcctttaatcccagcacttcaggaggccaaggcaggaggattgcttgagctcaggagtttgagaacattctgagcaacatagcgagaccctgtctctacaaatagtttaaaatttaggccaggctcagtggctcacacctgtaatccaagcactttgggaggccgaggcgggcagatcacgacgtcaagagatggagaccatcctggccaacatggtgaaaccccatctttactaaaaatacaaattagctgggcgtggtggcgccagccagtagtcccagctacttgggaggctgaggcaggagaatcacttaaacccaggaggtggagcttgcagtgagccgagatcgcrccactgcactccagcctggcaacagagtgagactccatctctwaaaaaaaaaaaattaggctgggcacggtggctcactcctgtcatcccagaaatttgggaggccaaggcaggtggatcacctgaggtcaggagttcaagaccagtctggccaacatggtgtaaccccgtctctactaaaaaaatacaaaaatcagccagacctagtggtgcgcacctgtaattccagctacttgggaggctgaggcaggagaatcacttgaacctgggaggtggagcttgcagtgagccaagatggcgccactgcactccagcctggcaacagagcaagtctccgtctcttaaaaaaaaaaaaaaaaaattaggccgggcgcggtggctcacttctgtcatcccagaaatttgggaggccaaggcaggtggatcacctgagttcaggagttcaagaccagcctggccaacatggtgtaaccccgtctctactaaaaaaatacaaaaatcagccgggcctagtggtgcgcacctgtaattccagctacttgggaggctgaggcaggagaatcacttgaacccgggaggcggaggttgcggtaagccaagatcacaccactgcactccagcctgggcgacaagagcaaaactctggcaaaaaaaaaaaaaaagagagaattacctaattctcatagattttagtttacgtatttgtcttttttttttttttttttttttttggagacagagtcttctcagttgcctaggctggagtgcagtggtgcaatctcagctcactgcaacatcctcctccggggttcaagagattctcctctctcagcctcccgagcagctgggactacaggcacgagccacctggttaatttttctatttttagtagagccggggtttcactatgttgaccagactggtctcgaactcctgacctcaagtgacccacccacctcggcttcccaaagtgctgggattacaggagtgagccactgcgcctggccttgtatatttagtttagaacaatgcctggcacacagtaagaaaacaaaaaatgttacctacaaaaaagaaaaargaatcctacctctgagtgcagtctcacctgaattctttccctcccacccccacctctgggtttgttaagtcattctcccctcccacaggatctgcaccactgttcctcctttatcacactcacttgtcacacaagtttttaacctttgggcagctataaattcctttgacaatctaaggaaagctacaccatccccaggaaaacacacatatgcacgcacacacacactcttaggtacaattctggggtgcctatagaaytctaacactaacctgcctttttagatccctgagttaaatggacattaatgtcaaagactccttattcctttggagcagcaaacctcaacaggtcacaggagattcccagagcagatccttactgcaaggatcagagtccaaacgaggcttcaccaatctgagctcatctgagatgcaaattgcatttctcccaggcggggagaggactctcattgttccttcctgactgcatttttagagctgacccttcaccctcatgggggaagggcgctacagggatgagggcagggaggaggccggttaccaaatgaaagaayggggctgctggagattctaagatcatttatttataaacttctgcagccctgctaacatccatgcttgtgatttacctcacctctgtctcccagttggtaatcaacaaacccgtactaccaaaatgacctatgcttctgtcttctgccgcaggagagggtgataacacgggaggctgctctcccaccccaccctttgagaaaaagaggaagactggccagtataaacgtggcaaatagccctgtcacttcccataagttctgtaatctccgtgagcttccattttgcctttagagtgggaataataaaacagacctcatacttttgtgtgaaagcgagggaactgcaaatctcctgcccctagtagcactaataattgytagctgctgcttcttaatattacatagcacctggaaggatgacgggcctgcttgctaaagctggctgtgagtttggggtcggcttgrggagaagagcagagtgcagggagcttcctggaacagggcctgtctgtcttatactttcactctagacagccctttcccgttttggtgttcaggaaatatgccccagatcttcaagggcttcaccgtcccttccctttaactaggattcagatgccctcatctacagacggttccgtcataaggccaaaaatgattggattcaaaggatctgaaagattggtccagccctttctttattctgattagaaacagtcccagaggtgacgtgatttgcccaaagtagcgcaacttcctggaacgagaaaccaatcctaagayttccatgtcggcgttctttccgcggtgatcgggttacctcccagacataggatttacttttgaaagaaaaggagcggtcacacgggagaggcattgaaggaaaaattatttgaatttggcaactgcttgtggtgggggratgagaggtggagggtgataaagcgccccctcacactcacacacaaataatgtgaacaattttaaattgctttactttaggagatcatggattttccaggggggctgagaacttacctgtttacccagccaagttaacaatactctgcattgtttacctaacgcagagtaggtactgaagaactatttgtcgcacggatgactgcatgaccggatgcatcccattccatcatagagtcagatgaggatttgcagagccaagccccacctgggaggcatgttaagtcctttccagttcttctcaattatggctctgcagtgagtatcttttgttcataaattcttgactgcacatcttgattatctcctcaggatattttcctagaagtgggattactggattgaaggggatgcacatatttaagattcttgattccgaacccctccagcagtataaaaatgagtccgcttcccagcaagctggcccaaacaggctattatcaggcttaatttttattttttatttktgtgccctcctaatagaacaaaaatcgcatctcgtttggtttgcatctctttggggactaattagatcgagattgaactagttttgaagaaacactctaaggagtccagagaaatcctgtgtggggcaggagatccatgaaaggaggcacatcccgcccactgaggtgaaaccaaagggcttctattgtttggtgtgatttaaccttaagatggaaacatctgagccttgctagagaggcttccccggaacaacggctgggggtggggagctgtgacttatcagcttccctatgtttattttcatttcctgatggagagtaaatcttataaacaaatgaaaaacctgtggacttatctttaaagactacaaggaaaaggggaactgggcaaactattgcaactcaaagtcgtggaaaggcaggagggggagtggggaatttagaaagatatttccaagagatggcagataggtccctgggggcctgtggccagcctggagagggagagaccaagccagaggctgtggaaagctctagagactttgtactagaaaggctgctgttggtggcagagcttacatggccagggatcccggaggacctggaaggggttttaatggacttttgagaatcaaagtgaactgccagggacaaacaagagtggcgaggaaatggaagcagtcataccactcaggctggaaaatcgctctaggaatggcaagaaggtaggtgtggcgttttccaagagaagagggtgatggtcagctgggagctttccttgactatgaaacaaggaagacttctcccccatccagagccaggagctgtccctgctcttcacttaagcactgggttcttttacaaaccgtacccaggaggatgactgatttacaaatgtttatagacaattttatttactaatctagctctcactctcaactaaatttatartcctaattatagtcatcagcattttcttgataacaaacctacaggattttttttttttttttttgagacagaatttcgctcttgttgcccaggctggaatgcagtggtacaatctcagctcaccgcaacctccatctcctgggttcaagtgattctcctgcctcagcttcccgagtagctgggattacaggcatgcrccaccacacctggctaattttgtatttttagtagagaagggatttctccatattggtcaagctggtctcgaactcctgacctcaggtgatccgcctgcctcggtctcccaaagtgctgggattgagccactgtacccggcctacaggatgtattttatagttgttttttaaaactttgtggagagtttattttcttgattgctttaagttccctattaaagtcttaaatttaacaattggcttctaacagtttagtaatctatgaatattttgtaccgctttatttattctaaaagggcttaaagtcaaagaaaaatgagtatttctttttttttttttgagacggagttttgctcttgttttctgttttgttttgtttttgagatggagtctcgctctgtcacccaggctagagtgcagtggtgcgatctcagctcactgcaacctccgcctcccgggttcaagcaattttcctgcctcagcctcccaagtagctgggattacaggcatgtgccaccatgaccggctaattttgtatttttagtagagatggggtttcaccgtgtkggtcaggctggtctcgaactcctgacctcaggtgatccgcccgcctcggtctcccaaagtgctgggattacaggcgtgagccaccgcacccggccaaggagttttgctcttgttgcccaggctggagtgcaatggcgcaatctcggctcaccgcaacctctgcctcccgggttcaagtgattctcctgcctcagcctttcgagtagctgggcttacaggcatgtgccaccatgcctggctaattttgtatttttagtagagatggggtttctccatgttggtcaggctggtttcgaactcctgacctcaggtsatccacccgcctcggcctcccaaagtgctggggttacaggcgtgagctactgcgcccagctgaaaagtatttcttagaggtttaaatgagtgatgtcaaaactctttgaggtgatggatatgttaattaccctgattagatcattacacattgtatgcctatatcaaaatctcacatggtaccgcataaatatatacaattattatgtgtcaattaaaaataataaaagcagaaaactccaaataaaatgtttaaaaagcttgtcacacttcaaagtcacttggcacattaaaaaatagtttctcctgcttcacccttgagaggttaattttatggaattggggcaaacccagaatctggtttttttttgttttgttttgtttttttgagacagagtctcacttgtcgcccaggctggagtgcagtggctcgatctccgctcactgcaagctctgcctcctggattcatgacattctcctgcctcagtctcccgagtagctgggattacaggcgcccgccaccatgcccggctaatttttttgtatttttagtagagatggggtttcaccgtgttggccaggatggtctcgatctcctgacctcatgatccgcccgcctcggcctcccaaagtgagccaccgtgccyggcagaatatgtatttttaaaaaccacccaggtgattcctaaattgctgctacaaagaccagtttggggaacttgtgatctaaatgcttatctatattttgtatgtttggtttttttcaaaatgaatataaaaagtatgaggctgggcacagtggctcgcgcctgtaatcccagcactttaggagactgaggcgggtggatcgcttgagctcagtagtttgaaaccagcctgggtaacatagtgaaaccccgtctctaccaaaaatacaaaaattagccgggcacagtggtgcatgcctatagtcccagctactccagaggctgaggcagaagaatccattgagcccgggaggtggaggttgcagtgagctgagatcacgccactgtagtccagccttggtgataggagtgaaacactgtctccaaaaaaaaaaaaaaaaggaatgcttgatgaatttgygtgtcatctttgtgcaggagccatgctaatcttctctgttaccgttccagtgttccaattttagtacatgtacggccgaatcaggcactttgttttttaatggtgtttggaagtgacagttttaattttttttttttttgaggcggagtttcactctgttgcccaggctggagtgcaatggcatgatctccactcattgcaacctctgcctcccaggttcaaacaattctccagactcagcctcccaagtagctgggtttacaggcacccaccaccacgcccagctaatttttgtattttttagtagagacggggtttcaccatgctggccaggctgctctcaaactcctgactgcaggtgatcctcctgcctcagcctcccaaagtgctgggattagaggcgtgagccactgtgtccagcctttaaaacatttttaagtaatggaggccaggtgtggtggctcacacctgtaatctcagcactctgggaggctggggtgggaggattgcttgagamtcaggaggtggaggctgtagtgagccatgattgtaccactgcacttcggcctgagcaacagagcaaaaaatataaaataaaataaatataatataaaataggccgggtatggtggctcacgcctgtaatcccagcactttgggaggctgaggcaggtggatcacaaggtcaggagttcgagaccagcctggctaatacggtgaaaccccatctctactaaaaatacaaaaattagccagccatgttggtgggcgcctgtaatcccagctactctggaggctgaggcaggagaatcacttgaacccgggaggcagaggttgcagtgagcagagatcgtgccactgcactccagcctgggcaacagagccagactccatctcaaaaaaataaaataaaataaatattaagtaatgctttgcatttctggaaaacattccttttctccttcctccccacccacagtgggcttcaactcaccggcctcctttcagtccttacctaacctactgtgctgttctcatagtactcgaagctctcttctggcttcccgtgattcctggctttctcctgtcctctctggcaacatatttttgactttcttttgtgaatgacaattggcaagactttcttcctttactatctttcaaagcaagcactgttgctgcgtaaggtgtcctagaaactctgggaaagggtcccagggccatgttaactactcccatcacgggcgtctaggtgcttggattttcaagtctccatctctcaccatttctttaagaggctttccagatccccrcatgtcaactgcctacgaggcatttattctcagatggcctacaaagcacctcaaactcagtatttctcaaatattaagtttctgtccatgtttgccctctgtgcctcacagcttagagaatagctccacccagttactcaagccagaaaccttggggtgtcctagtcattcatctagtgccactgtcctaaacgctggggataccagagactacaaacaagaatccctgtcctcattgagcttatgttccagaggaggaagacggacataagcagtcagttcctacacccagggacgccagctctgcagcagcgctgctgccagccattcagcctctccagcacctcagttcaatccccccacctgccgcacccgccagctggccttcctctgctcttttactctcttcaatccattctccccacagcagtgataaccttccttcttttcttttcttttttttttctttcttttttttccctttcctttctttcagatacagtctcactctgtcacccaggctggagtgcagcggtgccatcttggctcactgcarcctcctccacctcccgggttcaggcgattctcctgcctcagcctcccgcatagctgggattacaagcacccaccaccatgcccagctaatttttttgtatttttaggagaaccagggtttcaccatgttggccaggctggtctcgaactcctgacctcaggtgatccgcccacctcagcctcccaaaatgctgggattacaggcgtgagccactgagctgggccagcagtgtaatctttctaaagccaaatcttaaccgttagcctcaagctttaggatcttcatgcttgcaggataaagtccacccttacaaacctgggttaaaagatggtacaagttctgggccctgctggcctctccacagcactgctcaccctcaggcagtgctctctgtgcagccatactgagttacaaccatggttcactgcacctgccgtcccccaactccctcctgcctccctgcctggtgaactcctgtcattctgtaggtctcagcttggatgctgtgacagggagcctctagaatggcccccagtgacccctatctcctagtaatccctttcccttgagtgagctggatttacagatgcaattttgaataatagaaccttgtagaagggatgagttgtcacttctgagattaggttatataaagactgtcacttctttctaagggctctttctcacttggatggtcyccagaaagtcagctgccatgtcacgaagtgccctgtgagaaggacctgtaaggagggayggagggaggcctctaaatgacagccttcgaggaactgaatcctgctggtgaccatgtgagggagcttggactccggtccccctgtgttgagccttcagatgagttggcagccccagctggtggcatgactgtaacgtcctgaaacaccttcagccagaaagcattcagctaaaccacacctgtatttctgacccaaagaaattgtgagataataaacatttcttctcttgaactgctataccttaagctaattcgttacacagcaatagataacaaatactacctctggacccctgcctgccaccataccaaattccatgctctgagttctagagtcagtggtgtttccacctgtcatgcccagcccttcactgctagtattataatgagggcttgcccatatctctgcccccagatggcagactctgtacaggaaagaaggaaggaggagtgggaagtcaccactttctttctcaagactctgagtctctattctgctgctggccacatgtttatacccacagtgtcaacagcgcctggccccaaagtgcagctgcaacttcaggaagagactcaggccagccagagccaaagctctatggcagccaccttcctccacctccttctattacacttycctccacctccctccatctcctcagtcttctcagccagcttcccctgacccttgagcaccaggcaagcatgcacacacacaggcacatgcaggcatgcacgcacgacaccaggcccacagcctctctttactccagaggagctaggtggagtcactcctccctcctttcacacacaccctggggccacgcttttgtggcttttctgaatgaaaggggaggtgaggtgggggtgggggaagccgtctctgcctttgaactgcccagttcctccacctttatttccagctaaccaccgagtgcctgcaaaaaaacaaaacaaaacaaaccagaaaaactaaaaaaggagcccaagtgtctcttgctgctttcagtttctggagagccagcacacaggtcacccactatccctgccgaaaccctgaggtctgaggaaggcctcttcacactgcctctgggcgctgcctttggcttccgggagccccccatgcacttccctggaracaggtggagctctgtcctgtggctctgattcactctcctgtccctcggtacaccattgcrscgtgtcctcctgctggcccttctgttaccctgtacttgctgtacactaccacggtggccggggkcctcagcaccaggaaagcaacttcccccgtgtcctccccaactcctgagtccaatccttcaagtctatggtgccgaagcaggggaaatgaatgttggagagacatgcctgggtctgaactcacctctattgaaggaaaacaaagctcactaagattgcaccctacggtgtgtgcttctgttctctccacctaccgtcagcactctcagcrgttttcctcttggctctgcctcctgcaattactttctgctcagctgcttgctgttgctaagaagggttatgcccatcaactgtgctgtagacatgcagtattgtgacgatgggagggacatggcttggaaggtggctttaatttgaattctgccatttatgatatttggccctgggtgtgttacctgatcgtcctgtgccttatcctctgcgtctgctaatagaccgtttcccagggttgggcagagatgaaattaaataaaaccacacacactacagtgcatggaatgtactaggtgttcaataaatgtttccyttttttttttttttgagactgagtttcgctctgttgcccaggctggcgtgcaatggcgcgatcttggctcaccgcaacctccgcctcccgggttcaagcgattcgcctgccccagcctcctgagtaggtgggatgacaggcacgtgccactatgcccagctaatttttgtatttttatttttaattttttcgagacagagtcttgctctgttgcccaggctggagtgcagtggcgagatcttggctcactgcaacctccacctcctgggttttaagcaattctctgcctcagccttctgagtagttgggattacagtcacgtgccaccatgcccagctaattttttgtatttttagtagagatggggtttcaccatcttggccaggctggtcttgaactcctgacctcatgatctacctgccttggcctcccaaagtgctgggattacaggcatgagccactgtgcgcggccaaatgtttcttgtcttgtgtttcaaaaggactttaaggccaggcacagtggttcatgcctgtaataccaaccctttgggaggctgagggaggaggactgcttgaagctaggaatttgagaccagcctgggcaacatagcaagaccctgactcaacaaaactcttaaaaaaccaaaagcattagcctggcgtggtagcatgcacctgtagtcccaacttctctggaggctgaagtgggaggatcacttgagctcaggagttggaggctgcactgagctatgactgcaccactgaactccagcctgggcaacagagtgagaccctggttctaaaaataaataaataaataaataaataaataaataaataaataaggacttttaacaayccttgtacttttttattggaaatacgcatagaaagcaaagaagattttgaggtctagctgataaagggccacattcagtcttttattggttttttggtgaagcaggaagacgttgagggtggtatgaggatactactcttttattggtttttaatctgacttaccctgccgtgctgagttaatgctgtggaaaacagctgctcaaatgccagaggaatggatgtgcctgaacctgcccctgactcccaggtggtaaggtgtttttcatgtttgtgttcagstctctgtgcctttgctttggcctcaccacgatggaagggaagtgcccacatcrcagggagcacacagaatatgayggctaacatgctacatccagcctgccattatccgcaggggtatggcgtcattggattcacatttatcattcaacttccagatcaacaaagcttgtcttcataaattaagtgcatccaagtttctttatattggccacagcagacacagaggatccgcagcaaatcatggatttcagtggtcttttcaaatcagtcaagtttaggtctagtatgtgctagtgcctaactctaagcataataagaagaggagccaaacacattatgttgagatttttagaaatttaactcaaggttgggcgtggtggctcacrcctrtaatcccagcactttgggaggccgaggagggtagatcayttgaggtcaggagttggacaccagccttgggcaacatggtgaaaccccatctctactaaaaactacaaaaattagtgtggtggcgggtgcctgtaattccagctacttgggaggctgaggcaggagaattgcttgaatccaggaggtggaggttgcagtgagccgagatcactccagcctgggygacaaagcaagaatctgtctcaaaaaaaaaaaaaatttaaatcaattgtaggagtttctatacacacagaaaatccattattaaaatagttcaactttttctctacaatgtgaaaaactaccgtagttctgtaaaccaaggtttaatcaagagcagatcaaaattgagttctgaagtctacatactaacttcttgataacataaacaggaagaggtataaaaggctattttgggctgggcacagtggctcacgcctgtaatcccagcactttgggaggctgaggcgggcggatcacgaggtcaggagatcaagaccatcctggctaacatggwgaaaccctgtctctactaaaaatacaaaaaaaaaaaaaaaaattagccaggcgtggtgacgggcgcctgtagtcccagctacttgggaggctgaggcaggagaatggtgtgaacttgggaagyggagcttgctgtgagccaagatggtgccactgcactccagcctgggggacagagcgagtctccgtctcaaaaataaataaataaataaataaataaataaaaggctattctgacagtgggagaggcaatttagcattttatataactaaaatcagcacttcaaagaacactgcagaggggcttctactctcagccagtctccaggacaatgtctgaacttgccctccaccaagccatttagggttgtttgccatttaaaatgataaatactagtcatcacttataataattggtatggcacttaaagaaagcaaaataaagttgtcagagaaggaggctggttgggtttgactagttgctcagacagtattgtgttgctttatttaggtcataatgcccaaattctcagctttggagggccccaactctcctattttgctaggatagttgaggtgatcactcaggctcacagagctaacagtaaccaaactcctaagagacagatgtgcaagccaggtgccaatgtgtagttttatagtaagaaatataatgccaagaggagcagatggtcagtgtggtctcccttatgggagtagatgtgagacagtgggaagacagaagtaaaactagaataatggaagtcagagaccagcaattctaagtttaggacctcagaaggggagaagaccttcattactgtggtgaagtgaaaattcaggttacaatataggatgtacagtgtaaccccagctttatttaaaggtgataatacagcctggccaacatggcaaagcctgtctctattaaaaatacaaaaattaggccgggcgtggtggctcatgcctgtaatcccagcactttgggaggccgaggtgggcgatcacgaggtcaggagtttgagaccagcctgaccaacatggtcaaaccccatctctactaaaaatacaaaaattagccatgcatggtgacacatgcctataatcccagctactcaggaggctgaggcaggagaattgcttgaaccccagaggtggaggttgtagtgagccaagatcatgccactgcactacagcctgggcgacagagcgagactccgtcaaaaaaaaaaaaaaacaaaaacaaacacacacacacacacacacacaaaaccaaaaattagctaggtattgtggcacgtgcctataatgtgagctactcgggaggcggaggcaggagaatcacttgaacctgggaggtggaggttgcagtgagctgagatcgcaccactgcactccagcatgggtgatgacagagcaagactctgtctaaaaaatataaataaataaataaataataaaggtaatcataagcctgaaaagcatatataataatgaggagggcagttataatctctgaataaatggtctatgagcaatttttctttttcttatccccactttcttttttctttttttttttttctcatcccgactttaaaaataatttctataggctgggcatggtggctcacccctgtaatcccagcactttgggtggccgaggygggcagatcacaaggtcaggagttcaagaccagcctgaccaatatggkgaaaccccatctctactaaaaatacaaaaattagctgggcgtggtggcgggcacctgtagtcccagctgttcaggaggctgaggcaggagaatcgcttgtacccgggaggcggaggttccagtgagctgagatctcgccaatgcactccagcctgggtgacagagcgagattccgtctaaaaaaagaaattgttacaaaataattatgagtaccgattgaggtaagcaaataaagagaaactaaatgtccaacattaaagactttgttaaataaatcatgaaaatctatatggactgttatgccatcattaaaactcatgttgtagaagagttttcaatgcttggggaagtaactgttagtatttattaagttttattggaggcagggtgcagtggctcacacctgtaatcccagcacttcaggagtcccaggcaggagaattacttgagcccaggagttcaagtcctgccttggcaacatagtgagaccccatctctacaaaaataaaattagccaggctcagtgggcacgcctgttgtcccacctactctggaagctgaagtgaattacttgagtctgggatgtcgaggctacagtgagccatgattgtgccactgcattccagcaggagaaacagagcaagatcctatctgaaaagaaaaaaaaaatggccgggcgtagtggttcacgactataatcccagcactttgagaggctgagatgggtgggttgcttgaacccaggagctccagaccagcctgggcaacatggctgaaccctgtctctactaaaaatacaaaatttagtggggtgtgctggcgcagcctgtagtcccagctattctgggacctgaggcaggagaattgcttgagcccaggaggtcaagactgcagtgggccatggtctcacaactgcactccagcctgggagacagagcaagaccctgtctccaaaaaaaaaagtttttttggagcactgccatgctcatgcattatatattatatattgcctatgaaatgctttttattttgctacaatgtctggcatgagtagttgcaatagtgagtaaaaatatttactgcaaagcttaaaatatttactatctgaccctttacaaaagtttgccaaggccgggcatggtggttcacgcctgtaatcccagcactttgggaggccgaggtgggcagatcacctgagatcaggagttcaagaccagcttggccaacatggcaaaaccctgtctctactaaaaatacaaaaattagctgggtgtggtggcgtgcacctgtaatcccagctactcgggaggctgaggtaggataatcacttgaacctggaagatggaggttgtagtgaggcaagattgggccagtctcagtcctgggtgacggagggagactccatctcaggaaaaaaaaaaaaaaaaagtttgccaaaagtagcagctgagggtttgtactgtttataatagtgacatgaagaaggcttttattttattttatttattttattttatttatttattttttgagacggagtttcgctcttgttgcccaggctggagtgcaatggcgtgatctcagctcaccacaacctccacctcccaggttaaagtgattctcctgcctcagcctctctagtagctgggattacaggcatgtgccaccatacccggctaattttgtatttttagtagagacggggtttctccatgttggtcaggctggtcttgaactcctgacctcaggtgatccgcctgcctcagcctcccaaagtgctgggattacagscatgagccaccgcgcctggcctagaaggcttttattaatcagtggaagtagccatctccacctttgtccacactccagaaccttccttaggcagtcagttgtcctccttaacttgtttcccttcacagttatggcttgccctgaaagacagtgggtaggaagttaattttatgtttattattctttagaggcagaatcctgttaygttgcccggccgtagtgaaggctactcacaatcgcagtcactgttcactgctgcccagaactcctgggttcctgcgatcctccsacctcagcctttcaagcagatgggactacagacacgtgccactgtgcccagctttggcagtacacattttaaagtgcattccaggtcttgtatgctcatgtttatatatttaggttggtccaaaagtgtggattttgccattactttcaatggcaaaatagctcagtaatatattttgtatttagcttccacaacaatctcaagacagtgctatggtgaccctagttttacagatgaggacactgaggcttataaaacttagttaatttattggaaaagtttacagcttaggaagcggcagtaataataattttctgtaatgtgttcagtaagtgttctcaccacacacgctgcctctctgtgcctctcatgctgtttcacatgctttgtttattctactctacatgacccttggtcacttcctgttaggggtgggccctctgatcccacaaagaaatcaaacatcaattctacaccaaggtgaatagctaattctctgcctaacatgtactaatgggtcaacgctaacctcagttacccatttgactcctcggcaacattttaatcccagtatattttaaccctatttttctggggcctacgttactgcctttgtatatttcaaatgggacactattggtggacgttcacagtggcaagagagtgcaatgacaggttgagaggaatttctatttagacaaatgtgactccattaaactcacactatgyagacattcacctttccaaagggcactcttttttttgttgttgaggtgatgtctcgctctgttgcccatgctggagtgcagtggtgcgatttcggctcacagcaacctccgtctcccaggttcaagtgattctcctgcctcagcctcccgagtagctgggactacaggtgcgcaccaccacgcccggctaatttttgtatttttagtagagaggggtttcaccaccctcgccaggctggtctcgaactcctgacttcgtggttcgcccacctcggcctcccaaagtgctgggattacaggcgtgagccactgcacccggccctcaaagggcacttttgtaatgctgtgtgcgttcagttttacaaagtgaaaagtattttttcctttgtacttttgtatttgggtatctcatgctgactgctgatgacaattcatgrcaaactaaagacccatagataatgttaaattcaatgacagcagtttctatttttttccttagagacagggttcttgctctgtcacccaggatggagtgcagtagcatgatcttagctcactgcagccttgacttctggggttcaagtggtcctcctgcctcagcctccccagtagctgggactagaggagcacaccaccatccccagctaaatgtttacattttaagtagtgatgggccagtctcattatattgcccaggctggtctygaactcctggcctcaaatgatcctcctgcttcgacctcccaaagtgttgtgattacagctgtgaaccaccacacctggccagcagtgtttctctgtgccaagcttattagtaaatcttggtgctgtttcttcctctttcatgtaaaagctgcacctacattgttcctatttttatagccttttttagactgttacttcgattcagacttttccctgcttggcacatttagtttcttctgctttgaggccatcttcatgtgaccactcagaacctagggcaggccaagaggaagagagtatagggttcccttgctagcttggctttgaagcaacattgtccagtaactatgcttgcaggaagtatgcaaaatccttctgtgagcccacagattttacagagccttcaagacccagtcaaagcagtcttacgcgattgctgctttcctggaatagcaagttttaaatagtaaatgactgtaaagaaactcattagggaaggcatattttacctccttttctgtcgtcattacaatagaggattcaatcaagtttaatttattcagccaggtgcccgtggaagctgcctcgtttgtttggctttgttttcatgaaatccctcgtcacttgtgttccgagcgtcagtgagctaatcctgcccctctgtcagttccatggaagacaaaggccactaacacagaatctccacaatgagaacgggcagagaatctattaatgtgtcagttgcctgtgaattatggccaagatagttgcccaacatatggcacaaggttatcacattgtaaaagcaactcatttgaagcaaagcatccatgcacacaaacagacactcataactacttaggggtacaaaaaaattatacccaaggacaagtattcttgggcatttgaagaaacaactacgtaatagtagagttaatctattgggagtattttactttctgtaggataaaaataaagataaaataaaaattacagcagccatgagggatgaagtgggaaacagccatgtttagtcctaatcctcaatcagaggacacctcttaggatagagggacagggtccgtaggcaggaaagagtgttatcacctgaatccattttattttattttattttattttttgagacagagtctygctctgttgccaggctggagtgcagtggcaggatctcggcttaccgaaacctctgtctcccaggttcaagcaattctcctgcctcagcctgccgagtagctgggattacgggcgcccgccaccacgcccagctaatttttgtatttttagtagagacagggtttcgccattttggccaggctggtcttgaactcctgacctcacgatctgcctgcctcagcctcccaaagtgctgggattacaggtgtgagccaccgtgcccagcctgttttattttttatttttttatttttgagacaatgccttgctccgtctcccaggctggagtgcagtggtaccatctcagctcactgaaacctctgcctcccgggttcaagcgattctcataccttagcctcccgagtagctgggattacaggcataagccacctcgcccggcccctgaatccattttatccatggaaaggaacaagctgatatcatggagacagctatcatctagtcatccagctttctgttagacacctccagacaggcccaggaaggttggtctttgcctttgcaaattcagaatcttaaactaattagcagcaaagttaacatatgttttattttattattattatttttttgagacagagtctcactctattacccmggctacagtgtagtggtaaaatcatggctcactgcagtctcgaccttctgaatgcgtgatcctccctccttagcctcctgagtagctgggaccatgggctcctgccaccacacccagctcatttttaaattttttgtagagacgggggtctcaccatgttgcctaggctggtctcgaactcctaggctcaagtgatgttcctgccttggcctcccaaagtgctgggattacaggtgtaagccaccacacatggcctaaacgtatctttttgggggacacaattcaagtcataaaggcaatctcattatttctgcatgaacgatagtgtagtgggcatctgctaacactgcctcacatcttttctcttctgctggtactgcacctccctcctcccttcctacgggaaactcttcctcacctttccaaacctgtgagtccacacccttggccacacgggactgagaggtaacccaagctgggcatgtgactgatcaattaatgaccttccctcagatttttctaaatagacctgtggaggaaggctctttcctgtctgggatgtgggacttgggcacaaaaccttggaactgcagcagctacatccccaaatataacatggagagaagttgtctgaaaaaagagaagatgaagccaacaggaggagagcagctgagacgagagacagagggcaggagccggatagcttagaggttctcgattacagttttccttaaggtttggccctggcgcatccagggttatgagaattaaccaggtcttctttgtggtcaactagcttgaattgagtttttggaacaaaaacggtcctaggacaaacctgtagcatagtgaggatgaaagggacagagcattaagtggatccttgagggctttatcatttgggaaagccagaggagagaccctggagacatacatctttccagaggagcagagggctgggtggagaagtggaccctgagaagtagttggggatccttcaggagctgaggcctgtggctctctaagagagccaacatatcaggaatttgcgtgttaaagctcaattacagcctctgtgggacctgaggctatttaaattaaaaatgaaaaggcaaattatcggccagtgtggtggctcatgcctgtaatcccagccctttgggaggccaaggtggacagattatgaggtcaagagatcaagaccgttctggccaacatggtgaaaccccgtctctactaaaaatacaaaaattccctaggcatggtggtgcgygcctgtagtcccaccttctctggaggctgaggcaggagaatcacttgaacccgggaggcggaggttgcagtgagctgagatcatgccactgcactccagcctggtgacagagcgagactctgtctcaaaaaaaaaaaaaagaaaagaaaagaaaagaaaaggcaaattatcaaaaagctggttggtgagcctagaatcccagccagaggggtctaaacaagctgactatattagtccattctcgtgttggtaataaagacgtacccaagactgtgtaatttataaaggaaagaagtataattaactcagttccagtatggctggcgaggcctcaggaaacttacaatcatgacagaaggggaaacaaaggtgtccttcttcacatggcggcagcaagaagtgctgagcaaagcccgggaaaataatccactcactatcacragaacagcatgagggtcactgcccccatgattcaatcacctccttctgggtccttcccacgacatgtagggattatgggaaccacagttcaagatgagatttgggtggggacacagccaaactatataactgacttaaatatttacttgcatcaggctctgatgtctagtttcaccatcaagtatgcctatcaggaggacattaatttattcattcaacaattattaaaggcctactatgtctcaggcactttggtaagtgggrgtgggcatactgcagtacacaaaagacatgtgatttgtgctcccagggaactttcagtctatggggaaaaaagatactgaacaaattaacatatcaatgaatgtacaattataattgcaaactgtagtaaacattatgaatgaaaagctatgagaaagaaggacaagaagggatgtattttattttttatagagatggggtcttcctatgtaactcaggctgatctggaactcctggtctcaagtgatcctcccaccacagcctcccaaagtgctgggtttacaggcatgagccaccatacccagctggacctattttagattggaaagttaagaaaggcttctctgaggggagaatatggaggcctgaaggcaagtagaagttagccaggcaactagtgtatggggaaggagaatggcaaagcaaggcaagaggagggaagagaattccaggcaaaggaaacagtgtatgcaaaggtcctgtggtcagaaagagcttgactataaatgaaggagaagtgtggctgaagcatagttagggaaggaacagaacggcttgaaaagatcctagagagacaggcaaaggcctgagtaaggattctagattctaccctagtgcaatggaaagctactgaagaatgttaattcttgctctgaattacctttaaaaaagagaattaatggaagaaggacaaaagagaagagagaccagttaggaggttataggcgataggttagggcagagaagatgctagtttggamcaggtgatggcagagaagtatggatttgagacatgttggagatagaaccgatgacactagacatggtgtagatgcagtaggtgacggagagagagctatcaaggatggcttccaggttactgtcttgtgcttctgggagttggtggtgccattagctgagttgagaaataatgaaggatgttgcaacgagaagggtaatgaagatcaaagaccggcttcagtgttaacattttaggtgtcagatgcctgtaggacttccaagtggagatattaaacactagttggatatatgtatctcatgatatatgaaaaaactaggttggtggtataaatgtgtgaatcactgaaaaaaccaataggaaggggtgagactgcccaagcagaaagtatacaatgaaaaaagaagaggacccagggactgacatcagaggaactcactacatttaattgttgcacaagccagcaagttaacaaagaaaatggaaaaggtacagccagacaggtggcagaaaatccaagagagtatagtgtcacaggtaccaaaaagagtgttataaggagccactggccacatgtgtgaattgctaacctccagtacgatgaagattgaaaaatgttgccgggcgcggtggctcacacctctaatcccagcactttggaaggccaaggtgggcggatcacctgaggtctggagttggagaccagcctgaccaacatggagaaaccccatttctactaaaaatacaaaattagccaggcgtggtggcacatacctgtaattccagctacttgagaggctgaggcaggagaattgcttgaacctgggaggcagaagttgcggtgagccgagatcacgccattgtgcttcagcctgggcaacaagagcaaaaatccttctcaaaaaaaaaaaaaaaagaaagaaaaatgtttattgggctgggcatgatatcttgtgcctgtaatcccagtactttgggaggccaagataggaggaatacttgagcccaggaacttgaggtcagcttggtcaacagagtgagaccccatggctacaaaaaattagccaagtgtggtgacttgcaactgcggtcccagctactcaggaggctgaggtggggagctggcttgaacctgggaggttgaggctgccatcagccatgatcgcaccactgcactccagcataggtgacagagcaagactccatctcaaaaaaaaacaaaaaacaaacaaacaaacaaaataaataaacagaaaaatttttactggatttggccaacagaagtacttctgatggccattcaagagcttcctcagtggagtggagggggtaccaccatctccaaatggcacttgtgagtttcctgaatttgtcatttgggaatctttcatagatcaattgtcactccaaattattcagctcatgtcctcacaagttcaagggagactaagaaacagtctggttcctgtggacactcagactagtattatgcatttattaactgcaattagccaggaacaggctgataagatgactcttctggttctagcacacagagtgaagggtagaataaaagtttcaggctgggctcacccctgtaatcccaacactttgggaggctttacctgaggtcaggagtttgagaccagcctggacaacatggtaaaaccctgtcgctactaaaaataaaaaaattagccaggcatggtggcaggcacctgtaatcccagctactcgggaggctgaggcaggagaattgcttgaacccgggaggcagaggttgcagtgagctgagatcatgcaattgtactccagcctgggcaacagagtgagactgtctcaaacataaaaaaaaaaggctgggcatggtggctcaggctgggtgcggtgactcatgcctgtaatcccagcactttgggaggccgaggcaggtggatcacccaaactcaggagttcaaggccagcctggccaacatggtgaaaccctgtgactactaaaaaaaaaaatacaaaaaattagctgggtgtggtggtgcacgcctgtaatcctagctacttgggaggctgaggcaggagaatyacttgaacccaggaggcggagattgcagtgagccgagatcgtgccatttcactctagcctgggcaacaagagcaaaactccgtctcaaaaaaaaaaaaaaaaaaagaaagaaaagaaaagaaaaaagaaagaaagaaagaaaaataatgtttccttgccactttattttctgagtatagtgtttgaagtttaagtgagaccatgggtacgaaactctcctggagaagggtaaagccacgttgccctgtgatatgttacttctggtgctggaagggaactggcagctcattgtgctatctgggaactcaggacctgtgagccaggacctcatctcctccggggctgctgtgcctacctgcaccccctaacttcagcactacacttattaaatggtccatgtctctcttatcacaccaaggagattaaagcccaggttgatcctcccttgttggcactaagtacaaaatgtcttgggggacgttcactgcgtggttaagctgtcggactcctccacacacacttagtacagacaaactgggaagaggcaactctttctcaggaaattatctggtataaactaagtaggtaaaatcctggtttacaatgcagattaatgaagcctgccatgtttgaattcaaaaggtcctgagtaggagcccatttccaccacttactagctgtgagactggcagtgtgttacttcatttctctcaagctcattttgctcagtgataaaatgaggatgataagaataatgcttagtttacagggatagtgtgaggtaaggagataaagtagataacgtacttggtactagagcccaatagcgaacattcattctctccctccctcagtcccaccttagctgtaggtctgcagctgcatgtaggaaagtgggttagagaccccttgaggtatgaagaatccaagggaagtattttgggagaggatgaagtgccaccaatctggatctggagagccagggagctgtgggcgtccctgaggcttggtgccccaggggctatggagagtggtctgcatgtttagtaagatttggactggaggttacaaagcttgtgtcaccagtcatttctgacacattaaataaagtctgtcatatcggcttctaagttcaaggttttaattcaccttggaggaccaaaaagcattttgcagctagattcgctgctgggtgctattctgtctcccatgcttttcatttctcagaaccagttcatcgagactaaagactaatgccagtgctgttggcttgtctggagaaaacaaagccattaatggtagttaccatattaattgcagaaagtgcttctttaagtttctgttggcaagaagttaccagtctaacaaagtaagtgaagtgcgtccaggccaggcggggtttttaatcttcttgcttcaggtttttgttattgcagttgccaaaacgccaagcttataatttacaagtcgtatccacatgtcccttagaaagaaactcaaacctaaaaatagaaatgaaactcaggaaaacaccaacccagataaataaatcttatgtcaaatggagaaagcttgtaaatctgtgctcgcggttacattaattgcttacatttcgattgattgaagcaagtgccttaaccagtcagcgtgtccctgcccaaaggaagacggcaatcctctcatgtttcagaaaaatttctcacatcatttcttgctcttttttctttttcttctcttttcttcttctttttttttttttttgagatggagtctcgctctcgttgctcaggctggagtgcagtggcatgatctcggctcactgcaacctccatttcccaggttcaagagattctccttcctcagcctcctcagtagctgggattacaggcatgcaccaccacacccagccaatttttgtatttttagtaggagcagggtttcgccatgttggccaggctggtctcaaactcctgacctcaggcgatccgcccgcctcggcctcccaaagtgctgggattacaggcatgagcccccaacccagccacttctcagtttcttagattcagtagctagggcctgcatattaaactcacagaagataccttaacaggagaaaaataaaaaagagttcacactcacatgtgcaaggtgtatacagatgggagaattctgtgatgactaattcaaaggggtggctagaatttggggcttatatgccatcttaattggtgaaggggaaggagagaaaggcacttgtgagaaaacaaatgaccattttggaaaaataaatgggttttcaggagaacaaacaggagataagaaagtttgtgataatgagctgggtgcggtggctcacacctataatcccagcactttgggaggccgaggtgggcagatcacttgagatcaggagtttgagaccagcctggccagcatggtaaaacactgtctctactaaaaatacaaaaattagccgggcgtggtggcgggtgcctataatcccagctacttaggaggctgagggcaggagaatcgcttgaactcgagaggcggaagttgcaatgagccgagatcgtgccattgtactccagcctgggccacagagcaagactccgtctcaaacaaacatacaaacaaacaaacaaaacccagaaaaattagctgggcgtgatggcacatgcctgtaatcccaggtactcaggaggctgaggcaggagaatctcttgaaccagggaggcggaggttgcagtgagctgattgtgccattgcacttcagccttgggcaataaagtgagaatttgtctcaaaaaaaaaaaaaactttaagagaaaaactgaggtttccattctgcctcgagacctcaagactggagtgtcacctcctgcccaagttctgagcttgcagcctgtcggcctgccctacaaattttagacttgttcgctcctacaattgcttactctatatatcatatagatatataataagagtgtatatatactcctactggttctgtttctttggaaaaccctgaaagacacacatcgcactactctttttttttttttttttttttgagacagagtctcactccactgcccaggctggagtgcagtggtgcgatctcagctcactgcaacctccgcgcctcccaggttcaagcaattcttctgtctcagcctccagagtagttgcaataacaggcgtgcaccaccatgcccagctaatttttgtatttttttagtagagacagggtttcaccatgttggtcaggctggtcttgaactcctgacctcgtgatccacccgccttggcctcccaaagtgctgggattacaggcgtgagccaccacgcccagaccacactactctttttttattgttgttgtttgcttttttgagtcttactctctgtttcccaggctggagtgcagtggtgcgatctgggctcaatgcaacctctgcctcccaggttcaagcgattctcctgcctcagcctcccaagtggctgggactataggtgcacaccaccacacctggctaatttttatatttttagtagagacgaggtttcaatatgttggccaggttggtctcgaacttctgacctcaagtgatctgcccgcctcggcctcccaaagtgctgagccactgcgccagggctgagccactgcgccagrcctgaaatatccttctatcgctcaagaccaagaccaagtcatccacctttgctcctaattctactggctttggtttgaatgttcatgtcctccccaaatttatgtgttgaaatcctgacccttgtaaaagaggctcaagagagctagctagtcccttctactatgtgagggcacagcaagaagtctgaagtccacaatccagaagagagcattcaccagaacccaacaaagctggctctcagatcttggacttcccagcctccaaaactgtgagccatacatttctgttgcttataagccacccagtattttatggtattatgttatagcagcccaaacagactaagacacgaccgcatatggttttcctggggaccttgctttttcagtcatattctctttatctctagtttcttcctctcaacgctttccattttttatttttatttttattttattttattttatttttttgagacagggtctcactttgtcatccaggctggagtgcagtggcgtgatctcagctcaccacaacctctgccttccgagttcaagtgattctcctgcctcagcctaccgagtagctgggattacaggtgcgtgccactaccgcctaatttttgtatttttagtagggacggggtttcattatgttggccaggctggtcttgaaaacctgacctcaaatgatctacctgcatcggcttcgcaatcttttcattttttcaaaaaatatttactgagttcctaycatgcagaatagaatacaaccctacgtccaagcctatgaacatgttcaagttattcacacaataaaacgtaacaaacacactaacaaaaaactttccttgatctttcattcctctctagcttctcttctctctcattcccttccccaaatcagatctgatcatcctcctcccaaaacctgttcatttcctagcttctcaaacttagttcacgtgaccaccatcaagattagaaacatgggaagtgggaggatcacttgaagccaggagttagggactggcctgggcaacgtagtgagacctcgtctctacataaaaaacattagcccgagggtctggcatggtggcttatgccataatcccagaactttgggaggccgaggcgggagaatcacctgaggtcaggagttcgagaccagcctggccaacatggtgaaaccctgtctctactaaaaatacaaaaattagccaggtgtggtggtgggcaccagtaatcccagctactcaggaggcggaggcaggagaatcgcttgaacctgggaggtggaggttgcagtgagctgagatcacgccattgcactccagcctggggsataagagtgagattttgtgtcaaaaaacaaaacaaaacaaaaacattagcctggagtgacagagcaagatgctgtctaaagacaaacaaataaaaaactcagccaacaaacaaacaaaaaccaaattagaaccacggaaattagatctcttgctctccttcatatatgtttagtcaataaccaagtcctccttttccctccttaaaaatctgccttggtttcctagatctgtcctctttatccttatctagttatggccctcaatagtattttgacaaaactataggaatrcaattttaaggaatctgcttgcctgcagtcttatttttttatccgtcctctgtactacatctagaattacttacacacatgaaacaaatcatgtcactcctctgcttaaatgcttttaacagctccctctgcctacagcttaagtccaagttctttaacatggcttacaggccctgcatgacctggccagactcatcctccaaaaatccaatcatgcacttgacactgtaataaatctgcatgtttcttgaacatggcatgctttttaacatttttccacttatgggcttttgcttttgctcttcctgcagcctagaaaaccctgcccatgtttgttcacctgacaacttcattttcatccttccagatccactcaagcagcactttctccaaaccttctctgaatactagctggcccaagtattccagctctgtgctcccttagtatctttctttctttttttttttttgatacggagtttcactcttgttgcccaggctagagtgtaatggcgtgatctcggctcactgcaacctctgcctcctgggttcaagygattctcgagcttcatcctcctgagtagcttggattacaggcatgcgccaccacgctcggctaattttgtatttttagtagagacagggttttgccatgttggccaggctggtctcgaactcctgacctcaggtgatccgcccgccttggcctcccaaagtgctgggattagaggcgtgagccaccatgccggcctcccttagtaycttatgcatacttttttttttttaattgagatggactctcgctctgctggccaggctagagtgcaatggcgcgatctcagctcactgcaactctgcctcctgggttcaagtgattctcctgcctcagcctcttgagtagctgggattacaggtggtcaccaccatgcctggctaatttttgtatttttagtagagatgggtttcaccgtgttggtcaggctggtcttgaactcctgacctcgtgatctgcctgcctcagcctcccaaagagctgggattacaggcgtgagccactgtgcccagctggtatttactttttacataactgttatgtctccctcttggggctggaagcccattaaggataggaagtatattttactctattgttttttagacaaggtctggctctgtcacccaggctggaatgcagtggcactatcacagctcactacaacctctgcattgtgggctyaagcggggaggtcctccccgctcagcctcctgagtatctgggactaaaagcccatgccatcatgccctgacaattttttaaagtttttgtagagacacagtctctctatgttgcccaggctgctctcaaacacggcctcctgccgtggcctcccaaagtgctgggattataggtgtgagccaacacacccagtctgggaagtatattttataatattgtatatccttatcatatagcagagtatgtgcacaaatatattaattaatgatattatgaaataatattattacgaaaaacaactcaagcatatactttactaatcatgggtcagctctataatccttatgtaataagagcagtccattttggatcaaatttatgcaaaaatctccagtgagatttccaatgagatttcttttctttcgtttttgtttctttttatatatttccatttttgtttgtttcaaccctattaactgatctatttattattattattttttgagatggagtctctcttggtcgcccaggctggactgcagtggcacagtcttggctcactgcaacctccgcctcctgggttcaagcgattctctgcctcagtctcctgagtagctgggattacaggtgccggccaccacacctggctaattttcgtatttttagtagagacagggtttcgacatgtgggccaggctggtctcaaactcctaacctcaggtgatccacccacctcggcctcccaaagtgctgggattaccagtgtgagccatggcgcccggcctgatccagtgagacttcttatgataatatgcaatataaaacattgagaaaagtgaagcatcagctaatcttasacacacacacgggtttttgttcttatcagagtatttggctactaggcagatatatcaccaaaaatgattccttgaataggcaattcctcagactaggaatatcagcctttatggtgcatatgtggtccgtcctgtttgaccacattccagccgtggtccccttaagtctccttcctcttcacatatcaattcattctttctcaaagcactgccagtaggatctagtcctgtttcactatcttacaagtttcagagaatttgagggagccaaggcaaactctttatccttcaaatatatcgtacaatttttaagcagatgtaatctggataaaattagggtaactttgaaggctgtctcaatgtttattagaaacaaaaaataataataaagaagaaaataaaagtaagaaaattagagtaaccttcaaagaaaaagaaaggccaggctgggtgtggtggctcatgcctgtaactccactccagtcactttgggagactgaagtgggccgatcgcttgagcccaggagttcgagaccagtctgggcaatatagcaagaccccgtctgtacaaaaaaaatttaaaaattagctgaacatggtggtgcatgrtgcttatagtcccagctacttgggaggctaaggtcagaggatctcatgagcctgggaggtggaggttgcagtgagccgtgattgtgccactgcactccagcctggatgacaaggcacgaccctgtctcaaaaaaaaaaaaaaaaaaaaaaggaaaagaaagcacagagctattttgaaagggcagctgctagcctaagcgatgacctgataagcctggtctcctcatttcttacggctgtttctgagcacacctttgtggcacctttttttttttttttttttttttgagacagagtcttgctctgtcacccaggctggaacgcagtggcggatcttggctcactgcagcctctgcctcctgggttcaagcgattctcctgcttcagcctcctgagtagctgggactacaggcgcttgccaccacgcctggcttatttttgtatttttagtagaggcagggtttcaccacattggccaggctggtctcgaactcctgacctcaggtgatccacccgccttaccctcccaaagtkctgggattacaggcgtgagccacagtgcccagccggcacctttaatcctcatagttcacccactagccacccccacattgcttaaactacctgatcctcatagtgtctctattacccaaacacttagacttttcttccagtaaaggcagctctgattccatatttggatttataaaaataattaatgattatggataagtcaacaaatacttataaggtatctgctttttctcttttcttttctttctttttaatttattattattattttttgagacagagtcttactctcacccaggccggagtgcagtggcacgatctcggctcactgcaacctccgcctcccgggttcaagcaattctcctgcctcagcctctcgagtacctgggactacaggtgcacgccaccaygcccagctaatttttttttgtattttgttgtagagacgggggtttcactgtgttagccaggatggtcttgatctcctgacctcgtgatccgcccgcctcggcctcccaaagtgctgggattacaggtgtgagccagcacgcccggctcttttttttttttttgagacagggaattgctctgtcacccacattgcagtgcagtaatgccatcacagctcattgcagtctcgattccctgggctcaagcaatccttccgcctcagccccccaagtagctgggaccacaggtgtgcaccaccatgcccagctaatttttgtactttttgtagagacgaggtttcaccattttgcccrggctggtttggaactcctgagctcaagggatccacctgccttggcctcctaaagtgttgggattacagacgtgagccaccatgccccacctggcatttgctatttgaaggcactatggaaattcaaagatgaatcaagcttggatgaagctagctgtcctaagcccttagtgtgcatcagcatcaactatgcaggtttaaaaatatgcagatagccaggtaccaagtgtagaaattctgattccttcagtctgtgacataaatgtgttttaaaagatcacaggtgatttttatgccatctatggattgaaatgattagaatcagctctcattctcatacagagatgtgaggctgtacacagataaatgaaacataaagtagaaactaatatgtgctttcagaggcactcaccaagtgttagaagagttgagaggaagaaagtattgcttcctgtttgagcgattagggcgaagtccatggagtaaagtagaatgaattccgaatgaaccaggtcaggaggtgaggtttcttatctcatctccatcactaatttatgacacatgtgacactgaataagcttcataactgtaaaggcccattttttcctatgtaaataggaaagaccagcatctatgtcaggattcttgtgaagattattgtgaaggaagataaaatatgtgggtgtgcagagcgatgctggatccagagctggaaatcaatccatgaccattactgacgtgagctggcattcgagtcaggcctcgaaggatgatgggatttaaacgatcaaagatgagggggaagagagttctgggtagaggaaagaagagcttttatggacttcttggttgtatatttatttatataagtaggtaccttttttttttttttttttttagaaggagagcctcgctctgtcgtccaggttggagcgcagtggtgcaatctcagctcactgcaacctccgcctcctgggttcaagcaattctttgcctcagcctcccagtagctgggattacaggcgcccaccaccacgcctagctaattttcatatttttagtagagacggggtttcaccatcttggccagtctggtcttgaactcccgactttgtgatccacccacctcggcctcccaaagtgctgggattacaggcgtgagccaccatgcccggccgtaagtaggtactatttacatgagcaggtagtgtacaagatactgtggaagctttaaagccaaaccaggtgtgaatcctgggttcaagaagctaacactacctcagtaattcatttgttaaactaatacaaacaccgttttaaaaaaactaccattgcttgtattcctaatgtgctctgtgtgtgtgtttgaattaatagagacaaggtctcactatgtgggccagggtggtctttgaaattatggcctcaagcaatcctcctgcctcagtctcctcaagtgcagggattacaggcatgagccatcacgcccagcttacatattttaatagggtttttttctacctttaagtatttttatattactggccgggtgtggtggctcacacctgtaatcccagcactttgggaggccgaggcaggcagatcacctgacgtcaggagtttgagaccagcctggccaacatggcaaaactccatctctactaaaaatacaaaaattatctgggtgtggtggcagatgcctgtaattctagctacttgggaggctgaggcaggtgaatcacttgaacctgggaggcggaggttgcagtgagccgatattgagccactgcactctagcctgggcaacaaaagtgaaactccatctcagaaaagaaaaaaaaattatattaccaaaatgaccaaagctcataaaatcccaaagagggggccgggggtggtggttcacgcttgtaatcccagcactctgggaggccaaggtgggtggatcacctgaggtgaggagtttgaaaccagcctggccaacatggaaaccccgtctctactaaaaatacaaaaattaaccgggtgtgatggcgggcgcctgtaatcctagttactccagaggctgaggcaggagaaccgcttgaacctgggaggcggaggttgcagtgagccgagattgctgccactgcattccagcctgcgagacaagagggaaactccatctcaaaacaaacaaacaaacaaacaaaaacccgaagtgggtaaaattatatgaaataaaagtaactcctgcccactttctttcttacttttatcctcagaagcaactgtgattaacactgatatgtctcctctctgcaatcactttttatgtgcaaacacatgatatatatgcatgtgtacatatattacatgtatgtatatattacatatattcctttttgcccctcaaatgaaatcacactttacctactgttctgcaaattgcttttttgttttgttttgcttttttttgagacagggtctcattctgtcccccaggctggagtgcagtggtgcaatcatggctcactgcaacctccgcctcccacattcaagagatcctcccactacagcctcccaagtagctgggactatgggcctgcgccaccactcccagctaattttttttaaaaagtttttttgtagaaatggggtttcaccatgttgcccaggctggtctcaaactcctgggctcgaacaatccactcacctcggccttccaaagtgctgggattacaggcacaagctaccacgcccagcttgcaaattgcttttttttttttttttgagacagagttttgcttttgctgcccaggctggagtgcaatggtgtgatctcggctcaccgcaacctctgcctcctgggttcaagtgtttctcctgcctcagcctcctgagtagctgggattacaggcatgcgccactatgcctggctaattttgtatttttagtagagatggggtttctccatgttggtcaggctggtcttgaactcccgacttcaggtgatctgcctacctcggcctcccaaagtgctgggattacaggtatgagccaccgtgccctgcctgcaaattgctttttatccatttaatatgttgtgactatctttctatgtcagcatatataaagcagacttattctctgtaacagtggtatagaattccatttaggtgttccatcatttaaaaagtggtcaattcaatttacattaaaataatgcattaagtggccaggtgcggtggctcacacctataatcccggcactttgggaggccaaggtgggtggatcatgaggtcaggagattgagaccatcctggctaacatggtgaaacccgtctctattaaacaaaatacaaaaattagccaggcgtggtggtgggcacctgtagtcctggctacttgggaggctgaggaacccgggagggggagcttgcagtgagccgagatggtgccactgcactccagcctgggagacagagcaagactccatctcaaaaaaacccaataataacaataataatgcattaagttacaaagtttagaaacaattttattattctaaaactattatgaataaagttcagcatcttctttttttttttttttttgagacagagtcttactctgtctccaggctggagtgcagtggtgtaatctcagctcactacaacctctgcctcctgggttcaagcaattctcctgcctcagcctcccaagtagctgggactacaggcgtgtaccaccacgcccagctaatttttgtatttttagtggagacggggtttcaccatgttggccaggatagtctcgatctcttgacctcgtgatctgcctgcctcagcctccgaaagtgctgggattacaggtgtgagccactgcgcctggccaaaactattatgaataaagtccagatcttcttacatgtttatttccatttacattcttttgggtaaactaatttcactgatactttatcacttctactttactgatattaagaaagtattgggtctggtgtggtggctcacaactgtaatcccagcatttgggaggccgaggcaggaggattgcttgagccccaggatttcaggaccagcctagtcagcatgggaaaacctgtttctacaaaatatacaaaaattagcctggcatggtgggacacacctgtagtcccagctactccagaggctgaggtggaagggtcacttgaggctgggaggcagaggctgcagtgagccgaggtcacaccactgtactccagcctgggcgacagagcaagactctgtctcaaacaacaacaacaacaaagaaattatccccttatcttgcagtgtttttgttttttttttttaatagtttgactttttggtctttatatggtattttctcctattttacaaattttatatttttatgtagttaaatttattaatctttcaagtcctttgagttccctcactccatgctaaaaacattatttgatataaatatttaatttttgagacagggtgtcgccatgttgcccaagctggccttgcactcgtgggctcaaaccatcctctcacctcagcctcctgagtagctgggactacaggcatgtgccaccacacccagataatttttggattttttgtagagatggcattttgtcatgttgcccaggctggtcttgaacacctgaactctagtgatctgcctgccttggcctcccaaagtgctgggattacargtgtgagccaccatgcctggctgaaagtttttaaattaactgtcagcaatatattaagttctcctggccaggcatggtggctcacacttgtaatccgaagactttgggaggctgaggtgggagggttgcttgaggccaggagttggaaaccagcctgggcaacatagcaagatcccatctctacaaaaaaatataataataattagctgggtgtggtggtgcatgcctttagtcccagctattctggaggctaagtcagaaggaccacttgagccgaggaattagaggctgcagtgagctatgattgtgccactgcagtccagcctgggtgacagggtgagatgttgtcactaaaaaaaattaaatcaataagtaagttcttccagattcctcaatattttatcaccaaagcttttagaaatggcaatgcagcatgtctctttgactattatgtgtccactcattcacttgttcatcatctgttgatgatgtagcatgcttgcctttagtgatgccttgaatagttagaacagtgggttttccaggaagtgaactctatgtctgggggatcagcttctttttttctttcttcttcttctccttctccttcttcttcttccacttcttcttcttcttttttttttcttttttttttttttttttgaaacagagtcttgctctgtcacccaggctgaagtgtggtggtgctatcataggtcactgcaacctcaaacccctggtctcaagcgattctcttccttggcctcccaaagtgttgagattacaagcctgagacattgcacctggcctggggatagcggtggggatcaacttcttattgacatttagaaaactaaattttggtagaagaaacatacattgattaaaccatttgtaacctaattataggggttcatctctgaggtatgcttttggcatgcaattacgtccaactccgatgtaacttccaaattcacagggcttaaatctctgtctccaacacctgataccatcttttccctcaaacaggactcatttgcaatcttttattctgacttttatttagtcaaagacacatttttttctcttagtcttgtctttttctaacacccgttgttcctgaagttgccactggttcaacactctttccctctctcccacttctccatcgaatcctactaatatctcaatgtcacttcctcaaagaagccttctcttacctccagattagatctgatccccttgccatacatggttaagtccctggtacttactttttttttcttttatttctcacactttattctgtggccacagtgatgtaaacacctcatgaccttgagacattattgatggtatcactagtctattccgtgcaatcaaagattcataaaattcaacaggagttcagagaggttagctagcttcatattgtaagtaatgcaattcattgaatgaatttttaaaagcattatcttgattttatctgtttgtttagtgatgaggagctgcctttggaagtatcctgaaccatccttggactatttgtatgtctgggaaattttatcatgtttagcatcattcttttgattttcaagactaattttgttccaaaggataaaacaagtccatccctctactaaggacaatccttcagatagtcaaagattgccctcttactcaatcgaaacacagccttccttctattattgcttttatgctatggtttccatccttcctcattgtcctgatttaccctactgtgaactcattctagtttttcaatattcttcttaacgaaaaattatttttgttactggtaattttattttttaaaagcatgctggccgggtgcagtggctcatgcctgtaatcccagcactttgggaggccgaggcgggcgaatcaccagaggtcaggagtttgagaccagcctggccaacacggtgaaaccctgtctctattaaaaacacaaaaattagcagggcgcaaaaattaggggtgcgcgcctgtagtcccagctactcgrgaggctgaggcaggagaatcgcttggacctgggaggcagagcttacagtgagccaagatcatgccattgcactccagcctgggcaacaagagcaaaactctgtctcaaaaataaataaatatataaatataaataaataaataaaatcatgctgttcaaatgtcataagatactattataaaacaagatttctataagttcaggatactctaagaataagtttttgataattctttaagctkttatgtccagaaatttgaaaagttaattttgattaagtaataaataactttttctggcagctgtcgacacttgttggaggattggggtaacttagatggcataatccaggctataccttcgagtgtaaacttatctgccttgctctgacggcttgctatttgaacttcaaagagatttaaacaaattattaaaacactgtacttgttttgttgtgagaaaaagaggaaccaaaccctatgcttaataataatcatcagctctttcctgggtttggcaaacatgttttcatgtggttggtaccagccgctgatgagggtatctgcctttattttaaaaacaatcattagtttgtcattacaaacatgactaaattgctagcaatgtccttcataatcaagcaagatttgtcctcttctacaatcctttatatataatttatcctccattccaagaatattraattctaaagtggctgacaataaatctcaaaagaaggcaacacattctacggaagaaaaaggagcaaataaaatagaattatatagaaatgaattagagaggcttgagcccctcaagttctgaaatgatttcactatctggcacatagtgatgatcattaaatgtttgctaaaggaataaaaattcaagcgttagggataattctacagcgagacatacattataagaaagtagttagctttcaacttcaaaatgtttgaaaactacttatgagttcaacatagcattgtagtcattaaaaaatactcagggcagggtgtggtggctcacgcctgtaatccyagcactttgggaggccaaggtgggtgaattacctgargtcgggagtttgagaccagcctraccaactatggagaaaccccatctctactaaaaatacaaaattagccrggcatgcaggctcatgcctgtaatcccagctactcggaaggctgaggcaggagaatcgcttgaacccgggaggtggaggttgtggtgagccaagatcgtgccattgcactctagcctgggcaacaagagcaaaactccttctcaaaaaaaacaaacaaaaacaaaacaaaacaaaatccgcagatattttcctagcatgatgtaattcaatctcttgtaatacaaattgatatattataaattacttcttgtatttccttctttcctttttcacgttgaaaaattcacttgggcaatttaggtagtagtagttaaaagtaacccatacatgagctattgggcctgggtagggccatccataatgacatgttcaagcaacaaactggacaaaagaaccttcggaatgcacttggttgttcaaaaatagcaggtggttgctttaaaaaaaaagactatggaattccgatttttctttgagaattttgtttattgcaataggattatcaaagaaaaattaaaaagtaataaaaaattttaaaaaagaattttgtagctacccttcctaaaaaacttacccagattacttcttgacctatactttgagagcagaggaagtctggctacattaactcagtagctctgcaacttctaggtacttttttacctgaacggtgtatcctaagtactgtaattcctgcattgcttgcacatttgcgtttattattccatccctgtattacaataaaattttttttttttttgagatggaatcttgccctgttacccaggctggagtgcagtggcgtgatctcggctcactgcaacctctgcctcccggattcaagcaattctcctgcctcagcctcccaagtagctgggattacaggcacgtgccaccatgcccggstaatttttttgtatttttagtagagacgaggtttcaccatattggccaggctggtctcaaactcctgaccttgtgatccacccacctcgacctcccaaaatgctgggattacaggcaggagccaccgcgtccggccacaataaatattctttacataaactttcaagagaaaaagcattcaaggtacgtgtgtgtgtgtgtacacacttacatatatgtatatatatactcctgtaaaccataattggagtttaaaaaatattattatggtatttacaattttctttcttttcttttcttttttttttgagatggagtctcgctctgtcacccaggttggagtgcagtggtgtgatttcagctcactgcaacctctgcctcctgggttcaatcgattctcctgcctcagcctcccaagtagctaggactacaggcgtgcaccaccatgcccggctaattttttgtatttttagtagagacggggtttcaccatgctgtccagactggtctcaaactcctgaccttgtgatccacccgcttcatcctcccaaagtgctgggattacaggcataagccaccgcgcctggccagtatttgcagttttcataccttcagaggcatataataatttgaaattatttttggaagatctgtcataagccaaataaatatttgagacaacccaggacaattgttaaaattctctttagaaagaaggcagaaatttatgattagggtccaatttgccaccagtggaacacagaaacagctattaagcttattcatttttattgtcataaggacagggctggcatatcaaccaatgtgaccactataacttccaaactcattttaggtcaaatgcaaaaattgtaaactaaagttctgattagcgataaacctgtaagaaccttgaaaatgtccattaattttttaaaattatatttatatatttattattattattattattttgagacagagtttagctcttgttgcccaggctggagtgcaatggcttgatctctcggctcaccacaacctctgtctcctrgattcaagggattctcctgcctcagcctcccaagtagctaggattataggcatgtgccaccacgcccggctaattttgcatttttggtagagacggggtttctccatgttggtcaggctgctctcaaactccctacctcaggtaattcacccacattggcctcccaaagtgctgtgattacaggcgtgaggcacttcgcctggccattattattattttttgagacaagagtttcactccgtcacccaggctggagtgcagtagtgcgatttcggctcactgcaacctcagcctcccagattgaagtgattcttgtgccttagcctcccaagtagctggaattacaggtctgtgcgaaaatgcccagctaatttatatatttattatatatatatatatatatwwtttttttttttttgagacagagtcttgctctattgtccaggctggagtgcagtggcgtgatcttggctcactgcaacctccgcctctcgggttcaggcaattctcctgcctcagcctcctgagtagctaggattacaggcatgtgccaccacatctcagcctctcgagttgcagggattacaggtgagtgccaccatgccccactaatttttgtatttttagtagagacagggtttcactatgttggccaggctggtcttgaactcctgacctcaggtgatccacttgccttggcttcccaaagtgctgggattacaggggtgagccaccatgcccggctaatttttatatttttagcagaggcaggttttcaccatgttggccaggctggtctcgaactcctgacctcatgtgatctgcctgccttggcctcccaaagtgctaggattacaggtgtgaggcgctgtgcccagccgtttattacattaaaaaaaaattttcctagccaactaatgcatgcaagatgtcagtatatattatctgatgtgcactgtgtcaggcactggaatacaaagatgggtaagaaaggcataaaatccttgtctttaaggagctcatattttaatgagaggtgtcctttttctttctgttttttgtttttgtttttgtttttgttttgagacagtcttgctctgtcgcccaggctggggtgcagtggcgcaatctctgctcactgcaacctccgcctcccaggttcaagcgattctcctgcctcaggctcccgaatagctgggattacaggtgcccaccaccacgccaggctatcttttcaggtatttataatatagttttcatatacagttacaggaatagtatgttacagaacctaaagaaaaataaagaagtattagttgaggagttcagaagtgggtttatactgtatgtactaggaattgcctgttgaattaaattaacatttcagaagtaactatttaaatctgtattgttgacactgcagtgaaagcagcgaaacgtgtcagcagatgattaagttttatggttgattttcacacttttgtaacttgggaccaatatcaagtttctgggaaaaacatccttcctctctccccaccctctatcattaaccccgggtttctgcctgttggtgttaagtgtgtccttgggacaaaggcgaatcaatcattcggttttcattttcctcttatcaatctgagaagagttacttcagtttttttcttccggagtctagaaagcgcttagattgttgaattattacatattctgcattgaaaagtctgtacgtcactcgttattttttccattcccaagaccaccagttactggaattatttctgggtgagtggaacaccctttacaagctgctagaggaggtatgcctgtccctaggttattggctttccaatgcctagtcttttaaagaaagcggcactgttcccacggaaattaacaatcattcaattcggagagacttgaaatcttaaggccgaagtggaggaaaaaactggattgttatgggttgggttactatttgagaagggcaagcgggagttagcgaatggctagggtgttaaaatgggactttattaaacgactcattacaactgcacaaaaactaaacctttgctggccccagaggattttttttttacaagcttcaaaaacctaacttcaaacaaaatttaggaaacgtgggattagtataaattcagtctgggtgcttacaagaccacctcctctgtcaccgacagtggggacaggtgtgagaattttgcaaaagcagctttcagaacaatttttcagcgctcaatggtgcccctaacaacttcgggggcggaaaacacgccaagcagcgcagccctcccctcagttgctaacctttccctttcccacctcgcctctccctctccgccgcggcctgcagccgggggggggggcgtttgtttatgtgacgtccgccgtagtaagcagtccccgcccccgtttccctctggccgccgcgtttcccgcgccgcggagcttctccccttaaaaggacaatagaggcctcgggagcgcgcgcggtcgccgggacttctccccctcccagcccgcaacgtgcgcgcgcccgtatgcaaataagttcgattcaagagaattttgygccgggagccgcgcgtgcgcagagggaaagcggaatctacaccttcccggccagcggtagcaactgcagaactgcaggagactatctttctagacaaggcagttgaggaggagggagcgcttgagggggactggcctggcgtgcactccgcacctcggggacattattgcgcgtggaacggctgcttttggaaggtgagtgactctcaccatgcttctagtgcaaaactgtctcacgaggctttgatttcagtgtttttttttttctcttttcacctccacccacctccccccgtccttccacatacacacaggaagttttgtcttggaggtggcattgttgggagcgctgttttcgtgatcttcagaccccaggttctttggtacgctcgtgtttagtgtgtatttattaattggggagggtatttgaggcaaaccgaaagtctcggggcggggaagtgagtggagcctgggcataattgaggagtcgccggagttgagggatccacgttgaaggtgacaatgacttttctccgccgcagtgttctctcgcggaaaggagcccggcggccgaaaggcccgagaggaaagcgactcgttggccaccgcgcagcggccggggtcggtgcgtccgcgtgggcgcgaggcgcgggcagggtcgggcgccgttgtgaaacctcgtggtttagttgactgcagccctcggactagggtggacaataaacgccattcgctcggaaactaagttgccatccgcttccgagctggcggccgagggtctttaaatcggcctttgggggtcagtgctgggctctgccggagcgcacgcggcgtggcgttgtttgctcaactccggagggatgcggatgcgacaatgagagcaacacgcggtcgcttaaaaacagcccgtcttccactcgcctgccctcttcggaccgcgcccaagagcctctggtgtccggggtgctttcggagcccgaagttttgctcccggtgcgttcacctgtagcgtaggtgtgggcgacaccgcgagggcttcccgtttatgggcggccgtccgcgctgtaagatggccagggaagccaacttggctggagatggaggcggcggcgttgtstacgccgcgggagtcagtgaactcygcagggcactgctttttgtgctctacgtgacagaccacgtgcttcgggctgcgaccctggtccttgtccgaatgtccagccccgcgtgagccgtgggatgcggccgccgtcgggcaggtccggccggcaggacaatgtggtttgctgatgatggcgtcttgccagtttaaaaagcagagtgaaagtcgccaactctccgcccgtgcggggcggatactccgggcgtttctcatcaaggacactgcaaaactttgattaaatgggcctgctcccgaggggagggtcggggggccaggctccggactcttcggggcgcggggtccggacccctacccagggtgatcgtccagtgtccggcccctgcgaaacgctccgacatccctgatgctgcacgtaggcagcgcccggctggacagaaaacaaagggctgcatgtgcccgtgcgggcccccggcgctcggggccgccgcctgggcgtagggccgtgcaggtcggaggccctcgaagttcgggcgagtttcgggaggggcttttgtccctcagccccctcgtggggaaactttggcggcgctacttgtgcgaggtgccatgctggtgcgtagggaggcggcgtgcttccccgctccgggcgtgcgggcgggcgaccgagggaggcggcagtgcccggcgcttcagccctggcgtcgggggttgcgacggccgagggttccggggagcttggcccggactgctcggccggtttctcgtggcccgggagcctgtgtctgggaggtctgtgggttcgcctttgaagtcgaactgttgccatgtttgaattacgtcagggcaaagccatgaggaggaacaagccccggcagcgcggcgtgcgggaggcgcggcctgcgggaggcgccgggccgggctggcgcggggcccgttgttccggcgcaggtgagggaggtggcggcgagcgacgcggttcacctcccgctgccctcgccctcgccccggcgagcggcccccgcaggaactttcctcccgacgcgagatgtcttatttaccaacaaatccaccagggagcattcttacttgctggctcggcgtctctctcggcagtcaccggagtgcccgagggggaagcacgatttacggaaggtggggacccgagggccctgggaggagcggggaggcattttactgctttcagagaaacgggtgagggcggcgagcacctcctccccagccgagctgtggcccgcaagtccaggggacccagccccgacgacgcccgataaaccaccgtggggaagttccggggctccctgttgccctactaagggaagtgaggactgtgggcgaattgtgcgtgcggccagtttctttgtgtgtttctagggggtggggggagcggggaagggcaaggtttgttttggtgtagggggagttggtttcttgaggtggtagggcggtgcagtttgttctggtaactatgaccctagtcagtttctttgtttttattttcttcctgtaaccttccattacttcaggcactcggaagattaggatttactcttgagttaaacagggaccctatccgagacagttttaccccagcaattctttctcccccttcttaagttgtcctaaggagggttaagaaaagcttttctttttcttttaataatttaaaaatgaatttgaccttgttattcagagtacgctgaaagcacctgtttttgaactggaatttgccagacttgaaaagccttttaaaattttatgtcgcaaaattgaacacatttagttgcccaatctaaaagtctgggagtttgtttctggtggagtttcggagaaaaccctcatggcatttaaagtatttatataatgattttgggaagggggatcttttttaggcgaaaggtatgcgtgactcagtgtttggtggttattcagtgccttaggatgaccttgaagaagcaaatgtttagggagttgggccttttggaaacattgtaaggaggctggggagctggctggggaggaagctgctcaggaagatgacacagggtaacggctagcttcttcccagatcccgtgaactgtggttgaccttctggttacctctcctagatttttcttttcaagctaaccttttctttttttgtatgtggccccaggcatagctcaaaaattatgctggtttgacacatggatgcttctttggtatttggggtttgcctgtagtctagacatccgatacccaccaccatatctgttgcttctttcctgatttctcctgcatttgaatcatgtgtaaggcctagaatctaagtgatcattactaggaaataatacccttgaatgcccctgcccccacacacctaaaaatcgatactagttgaaatccattttttttcattattttgttattaataaacctatttttcccaagttttggttgaccaaattacaataccaaaaggcaacctatattagtacatttctgtagtaaatagaaagagcatgtyaggaaaatgaaaaactttggacctatttttcccaagttttggttgaccaaattacaataccaaaaggcaacctatattagtacatttctgtattaaatagaaagagcatgtcaagaaaatgaaaaactttggatttaataactttggctttcctttcgcagctatttctctgggtcctgtatttaaaatgcatatgaggtgctttgcaaatacgctgagattgtttgagttgtttttcttaattagtatttcatagctaagttatggctagaatttccatttcctagcagatttcatatactacatacagagcttaatggtttttgttttactaattagatgatgtaaaacagagatttggattatcaatgtgaatgaattcagggtgggaaagacccacagacaaggtctctactgccttctctttgtattgcttttgtgggaggttggagatacgaagttcaattggtagaatattctagatcactggtggacagcaggccccaagtctgtctgtccttgcacagtattcttaattctgtatatctggaacctgaatggtcaatttttttttttttcccccagagtggttatcaagtcctgggaaatcctgactcatagggctcaaactcagacatatttatgtcagagaagcaatttaagaaccattttacatgtaaaataaaagtttttcactggggaaagcataaacttttaaatctaaaccaactatacagggctcttatgaggataaattaatcaatttaccatgccaggcacatagtaggttgctttaaaagtatgtcattttcgttttttcttaagagatggtaggaatataattggttgagcagaaaaggaacacatgtattgaggcacgaagttttgctgttcagaggtttctgggttagtaatgcttgggtttcaaagctgtcatcatcttatagtcactttgtgatccagtttttttcatctgtaaaatggtagtaatacctattttaaataagttgtaattaagccagtgacatgattgataaatattagctgtgttgtcctcacaacactgggaagtagacattttacagaagataaaactgaggcctgtgtcagttatcgtttctggggaaacattaagtaaatttttagtggaaagaatgagtgtctttggtcccctcccttaccttaagaaagcagttctgggaagacactgcccttgactcttggttgtcttttcaattctgattcaaccattttacatcagaaagtcctgcggaaacctggaaaatgtcatttttctttcttcctgatttctcttgtccacaagattgtcttgtatttcccacacttaagttttgattttggggtgttataaattgagacttttttgttgtcttttgtttctccagttttttattgaatctgcaactaggatttttctgtattatggaaataatctggaaatgtcatctagtccaaaaagggagtttgttttcaaggtagggaggttttctctttgcctcagaaatactaatgtcacaggtacaccgctgttacatattcaagtatgaaagttacagttgaactaaaagaatttatttctagctttgtatttagttgttttccacctattataagtttggtttggcttactgttattttaatttggtaaatgttaactgtgctgagttgaagtagctctcatttctcatttctccccacactagtctaatttccttccccctgctcctgcttgaaataagcaagaaacattttttcctatagcttttaaaacctcaggttttttttcctgcaaaagtctatagaccaaatgttaaaaaaagactcctttttaaaaacattaaaaatatttctatgatcaatagtgcaaacaatgactcctttcaaaacattagtttttaaaattcacgtctttattgtagacaccatttcccattccatgcccttaaatatactgtttatattaatcttggctgccccactctttgagtagttagcaaattctacccgtttctgtgtactatgtacagccagcacctggttgtaatacaagacttagtttctgctctacagcggtttactattgagtagaggagataatgcagtaaacaagaagtgaaatcttatgtggtaggtgttctaataaaggtatggaagggttttgtaaaataagtaattcttaagagaatttcccaggtcaaggggatagagggtaagccgtctcaggcagaaataacagcctgagtagagggtggctagttattaaagtttgtttgacactcctagaatatcagaattccaagttgggagcagctggtaggcaggagcagatcctgaaaagctttgaattccttgccaaggagtttagatactatcatgaagccagtgttggtaccttggaagggaagattagtagttgaactttaggaagatatcacatgtttaaaggatgtagggaagtcagttacaaggttctgacaggagttcatgcaccatgatgaggaacaaacaggcagtggggatggaagtgaaggaagaaacagaatttctaaggacttcacaataaatttgatggagggccatgcagagggtgaaggaagagctcagttggcttccaagttgtttttgtgtgactgtggatgacaaccaagataggtaaatagaggaagagcagatttggagggaagattatataatcaattctcagggtatttaaagattggaatggattggtggtcagttggccatatttatcctagagctaaggggagagattggaccagggaatgaataataggtattaccaataaggttggttagtaacttcctgcgagtggattgcccaaagacagaaagcaaaatgatacctgaaatgtaagaggaaaaaaagagagaaagaagaaagattggtgagtaaaaagaattgtcagagctgagtgcataccttgtgccgatctttgtgttgatgttgtgttgatgctttacagatactattcaggagatttggatttgtcattattattttgagactgagctttgctcttgttgcctaaactggagttcagtggtgcgatcttggctcactgcaacctctgcctctgggttcaggcaattctcctgcctcagcctcctgagtagctgggattacaggcgcacgccaccaggctgggctaattttttgtatttttagtagaaacggtgtttcaccatgttagccagactggtctcgaactcctgaccaggtgatccacctgcctctgcctcccatagtgctgggattacaggcgtgagccactgtgcccggcctgtcattattttatagatgaggaaacaggattagtgaggttaaggaactttcctgaggtttgggtcaaatcaggtgtgtatactatcatgtatccattttcttaacatttttctcaagtttgaaaatgggagaacagcttcatagaggagtatatggggcttttcatgaccttaaagtctccctgaaaaggctaagttcctcttttcccacagacctgggcttaaaagaaaatctttagtaatcagaattttaccttcagttaaatttgttgtatatatcttgggatagatagcatttatttttctgtaatgtgcaactcttataaattcaaggaaataaacagaatttcccaatgttacagaagggcaaataaaattaggagtgacttcctatttagttgtaaagacagaagcagaaatatactccaaattgactcattgcagacccaagtatggttatattttctaactcataatcatccattaaaagcaaataaatattctttctgacactttcagttttttttttcatgtactggaattcctcttaatctagaattgggagacctagttttgtttctctttttttttttttcgctctaccaaaattggaggggcctggtgttttacactatctaaagcccagagacttgaatttgtaattttatttttaacctatgccatttcagttgaagacttgtttatttctgagtttgacctctttcctatataggatgagttttaggctcttctgccaagtgtggattccatagacagccacagttataaatgctttaccatataatttctcagagacagggcacatgtttgaagaggctgttggcaaacaagtggggtctgctacccctttctcagttttattctagacagatttacatttatcccttaaagttagctaaattcaggaattttgctgagatgtaggctgctatctagaagcaggtaagaggaaataatgtcttactgctccatgggtttccttaactgcagatgaaacatgtctcattattggggaatactgcagccaaatagcctagccgcgggagaatacaaagcatttagtcctgttgaccgtttgtgaaaagtgttgctccagttacactgttagtgtttactggatgctgtacttaaatgtgattaatgatagcatatgattgactaaaatggtgtcagtggtggcattaccaattacaggaactcaagtatccccacagtttgtgatcgcgagtattttttcgtgttatttcttttcctttcccatcatcatgatttctagtttggctctaaagaaatgcatctccttcacttcaaagttgtctttggttgcttagttctttttgtctttgttcactgctgcttccttcccactttacaaatctttcgcttgtctcctgtctgcagtttccttcccattctgctctgtgtgtatttagatcttaccagtctatttcgtagtctctcccatggagtgtattttctaatttgtatctctccatctgtatgtctttgaggaagtttatttaagctctctgtgcttttttagattactcttaaggtgtgtcttgataaccaaggttattggagagtgatgctcttggttaaaaaaaaaaaagcaggaggtagtaaagtgaaagtaagcttcttttatgcttgtactcctcagaggcaaccactatttactatttttaagaaccaatttaaaaagaagtttgtgtagttacagtctcattttaaaaacatcctgtgagattatactgtattactactgttcaacttgctttaaaggttgaaacagcgtgctgtggtgtttcaaccataatttaaccagtctgaaaattcgttgacatttaagtcacttcaactatcttgtgttttttttttgtttttaaagacttaggccagttgatttttagaaagaaaaaaatgataattagaagctagggttttggtttattggaaacttaaggatagtttcatttgggaggttgttcccctaatttgtgcatatcagaatttcagttcccaagatgacttggacagttgtgaagttaactgttatttaccacgtttgactattgctctcaattttcttccatctagtccacccagtggtattactgagttttgaaaggtacttttgaatattaaaaaacgctttacttctgaatatataaaaaagccagaagaaggaatctagaaagtggaattggggaagttagagtaaataatgatgtccttyaaagcatgcatgccaactaaggtgaacttaacatatgttaaattcatcgtaataagaaccctctccatatccttaaatgtgagttaacacccttataaagatttaaaaagacaagaaaatagttgaattaaattcatcaccttttctctgtctcctattccatattaaaaagggtactaaagctctaaaatttgcatttcagtatttttcattctgtttcctggttggagcttaaaatgaacaagtatttagtattgctgagatttataagagataatctttaatcttatttatcagaaaacttttcttaaatagcgtctttaatataaactatcgctgtgaaactctttttctttcctatgtatattattatattcagtaaacttatgtgtttaattagatgtaaaattagacgttattcttgatctttggcttcccaatttcattagatgggattagaattgtcccttttgtgtctttgatatattgtggttatctcatccctttcttgactcatcagcaccaaggttagattcattaagttagattcattaagatcattaaatttatatgaaacccacagctttaaagtagaagaaaaccctacaaatcagccaaaacagatgtttagaattgattgttgtgttttaaaactttatttttttgtttatatatattgtccatataattagttatctttttaaattgcttttgctgacttagctattacctttaatcttttttaactttgggatattcagtttatttggtcagagctataattatggcatggttttttttttattttttatttttgagatgaatttttgctcttgtccccaaggctggagtgcagtggcacaatctcggctcactgcatactctgcctcccgggttcaagcaattctgctgcctcagcctcctgagtagctgagatttacaggcgtctgccactactacgcctggcaaatttttttatatttagtagagacagggttgcgtcatgttggtcaggctggtctcaaactcctgacctcaggtgatccacccaccttggcatcccaaagtgctgggattataggcttgagccaccacgcccggccatggttgattgtttttaactgttacagtattaaaacaatttttgggtttttggctaatagtagtcaaagaaagaatgccagtgaaagtgctttataaaatgtaaagtgctatacaaatgacaacttaaaatttaagcaacacatttattacacctgtgaaagcaaataaaagaaaaaactgatcaacacagtcctcctctaaatttctttctggcccaggaatgtgtgtatattgcaaaaacagctatgtcagagataagcgttacaaactcccataaataggcatgttttaactgtaacctttcaaatcctgaggaacttctcaaaatgtttgtcctatttgaagaaacttcagacagcatactgtagacagatagatgatgatagatggtgtcagaagaaaagataaaactggtccaagatggctgcagtttggacatatgcataattaaaccactgcctacaaactaaagctgaccccttgggtttgtaactggagtttgttaaatattttactgacagatactggttgtaaacttgtttatcagatacagaacaaaggcaggatggaatcaatcatccttccaccagaccctaaggtgcctacacaattattaacttttctcttctacccactcaaccacatatttacttgactttaggcataacatcactgaatatgaaccaaattctcaactattgcttcaccataccgcacatattttcctgtttaaaaaatatataaagactgtgcctcatgcagtctacttcagagcacaggtaataagctactggaacttgtgcttcctgggtgcgcatcctcaagctttgtgtttgcaagcagcacattcagattcagaacacctcctgacttagtcaatctaatgagaaggtattaaaaattatggagaacaaatcctctaaatcgactaaatcccctgcaactgcagaacatctgattccacctttagaaaccccagctgggttaatatacagtacttggggtgcctcattgtgtaattacttaaacaaatggaccaggatgactgaagaatgactccacatcacaatggcctaaatgcagatcctttgatatatgcagaccaggatggaaggtgctagtgcaaaaattaagcaaccagaatggggaaactacttccagtggtatcttgaaagtagcaaaagtgggtaggatgatctttcttccttatagaatgctgataaacaacttagaggtgttaacagatagctctcaaatatactctcctattaaaaaaaaaaaatcttcagaagtacctctctttgggcctccttcaccacctacaccttcactctatcttcatctttcttttttttttgagacggagtctcgctctgttgcccaggctggagtgcaatggcgcgatctcggctcactgcaaactccgcctcccgggttcgcgccattcttctgcctcagccttcagagtggctgggattacaggcgcccgccaccacgcccggctatttttttttgtatttttagtagagacagggtttcaccgtgttaggcaggatggtctcaatcttgtgacctcgtgatccgcccgcctcgcctcctaaactgctgggattacaggcgtgagccactgtgccctgccactctatcttcatctttctaactctccaggctggatctgatttttcttcttctgccatctctttctccttgtctgccacttgttagactgtgacaggaaacacggctccaaaggcccctgctcttgttgtccttccacctaccctggcagcaacctcttgttcagaagtgacggacaggaactccacaggaatgcttcctgtggttgcctcattctgggaacagcctatgataggtgggggattcctaattctctttctcttttttttaagggattaaaacatttaattggccgggcgtggtggctcacgcctgtaatcccagcactttgggaggctgaggagggtggatcatctgaggtcaggagttcgagaccagcctagcctggtcattatggtgaaaccccatctctactaaaaatacaaaaaattagccgggcgaggtggtgggcacctgtaatcccagctacttgggaggctgaggcaggagaatcgcttgaacccaggaggtggaggttgcagtgagccgagatcgtgccattgcactccagcctgggcaacaagagcgaaactccgtctcagaaaaaacaaacaaacaaacaaaaaaacatttaattacacatatacacmcagatattacacatattcagtgcattcagaatcccagcaggatgtttgtggaaattaacaacttattctgaaattgttttgataatgaatagggccaagaatagccaagataatcttaaagaataaagttgaaagacttatcaggtatgacttataaagctgtagtaattaagatagtattagtggataatatacaattatatgaaaagaatagagcattcagatacagccccatattgaatttatgacagcagtaccactgcagtgcaataaagaaaagagtgatcttggctgcatggggtggctcacacctgtaatcccagcacttcgggaggccgaggcaggtggatcacctgaggtcaggagttcgagaccagcctggccaatatggtgaaaccgtctctactaaaaatacaaaaaaaaaatagctgggcgtggtggcgggtacctgtaatctcagctacttgggaggctgaggcaggagaatcgcctgaacccaggaggtggaggttgcagtgagccgagatcgtgccattgcactccagcctgggcaacgagagcaaaactgcstctcaaaaaaaaagaaaagagtgatcttttcattaaatggtgctgggtgatctacatatccatggggaagagggccagggaagaatctttgacccttacctttaatgccatgtaaaaatatcacaaattctagaacaattaaaatctaaatttgaaaggaaaacaaacttctggaagataataatggagattattttcccgacctggaggaaagcaaagatttcttaatcaggacgcaaaaagagctagctacaaaagaaaatgctgataatttgtactacattaaaattaggaacttaagttcctcaagactcagttaaatgagtaacagtgaacagagtaaagacatctatgaaacatataaccaccacaggtcttgtatccagaagataagcacatgactgaagaggatacctaaatggccaataagttctaggacccatttggaatcagggaaatgcttatcaaaaccacactgagataccactgaaataacaaatgactgataccaagtgttggcaaatatctgaaataaatggagccttcatacaatgatggtatgagtgttaactggtaccatcattttaggaaacagtttagcaagatctactgaaggtaaatttacacattttctatgacccagcagttctattcctagaaatacacacactcacacacacacacacacaaaatacgtaaaacaatgttgaaaacacattacttgtagtagccaaaactgaaaatgtcccaaaatgtctatcgaccctagaatggatatgctgtcacacaacggaattctatacagtgaagaaaaataaaaaatacagcatggataaatctcacaaatgttgaacaaaagaagccagactgaaagagtacattctgtatagttccaattaagtttaaaaacaggaaaaaccaattgatggtgataaatgtcagttgttaccattgggaccagggaacagtgactgggatgacacctgtagactgctggtaccatcctctttctgatcaaaagttacttctcctttgccagctttgtcaaacagctagctgaaaggctaccataaacaaagtatcaggggcacccaggaccaatcaaaaggccacacattcttgaaaagatactagtcattaaaatggaaatagctggtggatgccaccttcatcaagtgatcaaacttagcatcatcaacgctgggacaacattcctcccatctttggtctgacccaccaccccacttaaaagttccacagtctttgggttaggctggctttctccagaaatgttcaagtatggagtgataaagtcaytgggagacatgaaaaattcaccatttttctcaatgcttgcatacttcaaaaatattgttataagctcagttggatctgctctctcagttaaagccaccttggcagccgccatgcttggccctgggtccagggggctgcgggacccactcactggcttgctcatgctcggtcccagtggttcacttccagtaccagcagcgtgtgtgcccggcctgcctggagtcctgattctctatcaaccctagtcgaaggccaaattatgggccatagttaaggaatttcctgacccttatgaagatcggatttgctttaccaaagaatttgaactcmcaattaaaatctatgacccaggtcattctgacatttatcggcttgtctacatgctggtttcagctgcttaagctaaggaatagctagaaaaagcacagtgtggttggatcccctaacagatcttgttcctgaaaatccagtatgacctctgccacagccaactccccagctttcagaagatggctcaaagacgcgtgggtatgagcagcttctctgttaaatgccattcccttgtttttttcaaaagatcatagattacggccggacactttgggaggccaaggcgggtggatcatgaggtcaggagttcgaggccagcctggccaactggtgaaaccccatctctactaaaaatacaaaaatcagccagtcgtggtggcacacacctgtaatcttagttcctcaggaggctgaggcaggagaattgcttgaacctcagaggcggaggttgcaatgagckgagattgtaccactgcactccagcctggcgacagagtgagactctctcaggaaaaaaaaaaaaaaaaagatcgtagattagattaaaatccagcgatgctgccagaatccagatgggcctgttgtagatttttttacccactttgataaaacatgaaaacaatattgcagatgtcaatggacaactttgaaaacaataaaaatgacatattattaaaatttcccaaacaatttgggtgatgcactacccactcttgtcaaatgtcacatgactgactaggtgatggccagaactaatgactggtcaactggctgaccagttgtcctgcacaatgatgaaaaaggaaaatcaaaaggctgtacacttaacaatggtaacacttaacctcttaaaactcccaggctaggaagtcttggtcctaagaactcttctccccttgtctgtcactactacaagaaactaggcattttaaaaggaattgcaggacattgaaatggaaacaggatgataaactggaaaactaggactcctctgaggaaatagggggttttcatttctcccaatatgctgctttaactcactctttgggagaaattaacacaatagtaggcacaggagctcctgtatcagttataaattccaccttacttgaaaaccccatttctcagaggaatgaaaaagttaacatggtgggtatacctaataaacccatcccttgctttaagttcacatctttgctttagtggttcattgggtttggcttcctcccaagggctgtgaatgtgatacccttagccaatcccatgttttcctgatatgcccagaagtacctgtttaaccttctggattgaaatttccacgacatccataatgctcatctctttttccttaaagtgggaaatgttgctggaactgaaatcatgggattggggaaagcaaaccaaaaaatgccctcataatatatcacaagttggccgggcacggtggctcacgcttgtaatcccagcactttggtaggctgaggcaggtggatcacctgagctcgggaggttgagaccagcctgaccaacatggaaaaaccccatctctactaagaaaatacaaaattagccgagcgtggtggtgcattcctgtgatcccagctactccggaggcttaggcaggagaattgcttgaacctgggaggcggaggttgcggtgagccgagatcacaccattgcactccagcctgggcgacagagtgagactccgtctcaaaaaaaaaaaaaaaaaaatcacaagttgatgttagtggtgtaaagacaccttcatgtgattgggaaaatgagaaaacaaaatgaaatataataaagggaaggaaaccataaggctccttttaaacttcaacttttctactaatgccagaagctaagcttttacttgaaactatttcttacctgctgtggtcccagtctaacataggcataggaaagatactctcagctactccaataaaggttgagattaacactaagaatcccttgcttaacgtaaaataatagccactatggcaagaagccatagatggagttgccccaatcatgagattatcttgagagaggttttattattccctgcatcagtccctgcaacacccccattttccttgtcaaggaaccaaatgggaaggggatggagatttgtacaaaacttacgggctgtagacagtattataatacctagatatccagtgcttcttaaccttcatacacctgtctgccataccaaatatcaaggatgatagtgttctttttttttttttttttttttttgagacagaatctcactctgtcacctaggctggagtacagtggcacaatctcagctcactgcagcctccacctcctgggatcaagtgattctcctgcctcagcctgccaggtagctaggattacagatgtgtaccaccacacctggcttatttttgtatttttagtagagacggggtttcatgatgttggccaggctggtctcgaactcctgacctcaagtgatccacccgcctcagcctcccaaagtgctgggattataggtgtgagccactgtgcctgtccctgacgatatttttcagttgcggatctctgtagtgcctttttaaagcatccctatacatctaggtagtcagtatttgtttgccttttcctggagagaatgacggtatacttggactgtgatgtcacagggatatacagcgccccacttacttttcccaaatactgaaatatgaatttagcagactcggacttctctcaggggatcctcatccctcatccagtgtatgcatacctcctcctttgctctgacacactttcttcctctgaagaagaaaacttgtacttacttcaacaattgaccattacattaagggtaaactttaattttgtctttctcaagtcaaacatgtggcacatgttatgtcagccaaaggattgagcatcaatcctgatagaatcaaaggaatcttagcttttttgatgcttcctactaaaaaatagcttagagggttcttggagttggcctgctgttgtggaagctggatactaaatttttattgtgtgactcaacccttttgtacctgtttaaagaatgaccagcctgatcccatcatgtggactcgtgagggacagccagctgtgcaacaaattaaagaaagattagtaggccaggcgcggtggttcacgcctgtaatcccagcactttgagaagctgaggtgggcagatacttgtggctaggcgttcaagaccagcacgggcaacatggtgaaaccgtgtctctactaaaaatacaaaaattagccagatgtggtggcaaaatgcctgtagtcccagttacatgggaggctgaggcaggagaatcgcttgaacttgggaggcagaggttgcagtgagccgactgcattccagcctaagtgacagagcaagagtctgttgttgttgtttttttttaaaaggttaataaatgccccagcaataagacacccaaactatgaactttctctctttctgttcatgaagatggggggaacacatttggtatgttgactcagacctataggctattatagtcagcagttagatccaatgactcgaggatggcccccttgtatgagggcaatatcagctatagcccttctatataaaactgttggagagatagtcatggggtcctctcccttactgccttcattccgtattcagttgagctacttctgaattcccatcataactcaacacttgtctttcaatagattaacttcctattaggtcttaattttattatcctctaatgttaccatctcgttgcagtaatcctaaccttgccactctctctctctctctcttttttagacagggtcttgctctgtcacccaggctggactgcagtggtgtgttcacagctcactgctgccttgacctcctgggctcagttaatctgcctgcctcagcctcccgagtagctgggactacaggcttgcaccactgcacctggctaatttttatattttttgtagagacagggcttaccatgttgcccaggctggtctcaaactcctgggctcaagcggtctgcccaccttgagtggcacttgtggatctctagtgcctttttaagcatccctatacatccaggtagttagtatttgtttgcctctacctggagagaatgacggtatacttggactgtgatgttacagggatatacagtgccccacttacttttcccaaatactgaaatatgaatttagcagaccacaaagtgctaggattataggcatgagccactgcaccaggcctggccagtcttctgataagacctctcattacttcatcctgatgacacacccaactttttaccccaaggacagacctacaagaatcaccactagataatgctaagacagaatggtttacagatgtatcttacttgaggggagaaggtggtaaggttaaagcaggatgtgccatggtcattgaagctggtcttcttcaggctaagtcagcccaactggctgaactgattgccctgactcaaacttgttaactagcaaagaataaagtagcaaaaattatgcccctatgcatctgatggtgctcatgactttggaatgctatggaaagagagagggtatttaaccttctcagggcaacccgtaaaaaaatggactagtcttggatctcgcttttggcaattataaaggttccaggctgctctgaattaaacacaacacagagtcaaggtaatcactttgctgatgcagtagctaagagtgctgcatttgagacaccagtccgatccttggaatgactgtgagacttaaacagttaaatctacgctaaaggaaacccaagacttagctttcatcgaagaaagatctacctggaaacaaaaggggggggtacttttcccgcaaactgaactatggtatggacctaatgataaacccattatcctagtggggtatcagatacccctcatggaacacatttacagcttgacccattggaattcagataaaatgatatcctattataaacaatattattggagactgtcatcatggcacagaagattgatttacagtgtaccatctacccaaaacacaatcctggaaaacccctttatggggctcaggatcattttctttttctacctagaccttttgagatgtggcagcttgattttatctagctgccaccatcttaagcatataaatatgtattggtaatgatatgcatgtttttgcattgggtaatgcaattgcccatcctgctgatgggcaatggtagtgggtaaaatcttattaagggattaccccattatggggagtccccttttgaacttcacagcaataggggaacttattttactgcccaggtcattgagcatttgtaaaatttggggctgggcgcagtggctcatgcctgtaatcccagcacttgggaggccgaggcgggcggatcacctgaggtcaggagtttaagaccagcctggctaacatggtgaaatcctgtctccactaacaatacaaaaattagccgggcatcgtggcgcacgcctgtagtcccagctactcaggaggctgaggcaggagaatcgcttaaacctggcaggcggaggttgcagtaagccaaaatcatgccactgcactccagcctaggtgacagagcgagacttagtctcaaaaaaaaaaaaaaaaaaaaattggcctatatttccgtattttgattgtgcctaccacccttagttcctctggattggtagaatggaacaatggaataataacacaattggctaagtccccggattggtagaatggaccaatggaataataaaaacacaactggctaaatttatggaggcttttcacctctgctaggctgaaggcactccccttggtattgctcaacctttgatccatccctttatcagctctcttctcatgaaattgtaactggaagacccaggcacatgggaatcaagatgactgatacaaatttactgaatggggacatcttgcactgttgtaagggacttgttcaccagctcatgaaaagccagaccttagtgcaagacacgtcccacagtgcgctcctgggagatgaagattctggtcatgacctccaacctggaaattttgtctgttggaaaagacatctcataaaggactccctccagccttggtggaggggcccttaccaggtatcgttgactaatccatgcacagcagagttaaaggttgtagactcacggatccatatctctcaccttaaaaaggcacaacttcctgaatggaccatgactcccaccaaagatccctgtctctgattcaccaaacagcttcaaccctgaaaccaggacgagaagttgacaacatctgagtggacagctaattgacctaagacttcagaccaggcctgtatgatctcctgtctaaacattcttagagtattatatttactttggggactattggccttgtctgctttgactcagattataggatatataacctggttaatgtttctgtacacatgatggccacctatgtatatacacttgacttttcagggtctctgctggggatggaaaaatagttcattagccaaactctcctaaagtgtggcagatggaggcagtctctcagattgctggatttgtcaccagcttccaagggccattcaagatcattacatgctacttgttgcaccagagattgatttttctgacactccaaatgttaccatatacttacatcagttccctccaaatgtcactttccaaattcaaattcagcttctaaagccaggccatattttcattctgtgcttagtaataagccctaagtctcacccttccccaccgcccccaggtctatctatcagtaagccaattagggacaaattctctaacttatctagaacacaaacttaattcctcatcttttccaggtccctgcacattcctggcctcccaccgttactgtcataactggcaactgaatgtccaaaggagaaaaagcaaagcagattgtgccagcacgtctcatttgttatatatcatgcttatgcaggcctttgtaaggcctgcagtaaaaccaatccatggctcactcatgttttaaacaacttacctattcaaactattatgaatgaatagttaagagatacattttggtatgtggcattgggccacacccaccaactcaaggatgggcacatagtgtaaatagctggcaaaatagctggcaaattgaagggcgctttttttttttttttttttgagggagagtcttgctctttcgcctaggttgtagtgtggtggtgtgatcatggctcactacagccttgacctccctgggctcaggtgatcctcctacctcagcctcccgagtagctgggacaaggagtctgtgcagtagctcacagtgcctgttgcacttacatcgacacctcgggtgaagtagagacttgcacagaaagaatttccaagcaagctaaatggttacaagaggcacaaactactgatcttctcaatgatctatttaattggcttcctatttcttccagtctgcagttcaacccctttttcatgggtaaagtgccgacgtcataacaaggtttgagggaggcacatctcacacgtgtgaatgcccagtcatcacacttacaaatgacaaaaggatctcaaaccttgatatagtctctatcctacttctcttactatcacttaaattactcatggtatttataaccaacttacgtaagtctattgctaaaaccagaattataggtcaggtgcagtggctcacactcaatcctagcacttgggaggccaaggtgggaagactgcttgaggctaggagtttgagaccagygtgggcaatgcagtgaaaccctatcttgataaaaaaaaaaaattaacaccctccccgcccattatggtagcacaatgtagatagaattatcctgtaagcgtagcagcagattctactacatacccctggagtgtccacctcaggcctacatcaacctcatctcacctctttccctccaacgtgggacatgacttcctgggaatgagccttcccaatgcagaaggacaaaaggacatgaagtatgatcatttgtgttctctaaagagaaattttgatcaaaagggggaaaatgtggaaatacaaggaaaaatgggttgacacagcctcttctaaatatttgttctggctgaagaatgtgtacgtgcaaaggcagctatgtcagttagatcagtgttagaacctcccataaataggcatgttttaactgtaacccctcaaatcttgaaaaacatcttgaaatgattttttttttctatttcagggaccttaagaaaacatattgtagatagacagatagatgattgatgatagtgtcagaagaaaagagaaaagtgagccaagatggctgcagtttggacatatgggtaataaaaccatggcctattaactaaggctgaccctttgtgcatttgtaactggagtttgttaaatattttactaacaggtactggttgtaaacttgtgtatcagatatagaacaaaggcaggatggaatcaatcatccttccgccagaccctgagatgcctacacaattattaatccttctctcctacccgctcagccacatacttactttaccttatgtgtaacatcactgaataccagtcaaatcgacaagagtgtaattgttgcttcactgtactgcaggtatccccctgtttaaaaaaatgtatgaataccgtgcctcgtgtaatctgctttgaaacacaggttataacctrttggaacctgtgcttcctgggcgcacatcctcaagctcggcctgataaactttgtttgattgagattcccatcttggtctctcaatttgggttgacacagctagtatgagactggcatccgagatgatgagtttacaaagatgataaagacaagtgaattcctaactcagttatttttatttttaaatatctcaaaaacaggcttactgagatctttcacgtaccataaaattcactcatttatataccataagattcactcttgtaatgtgtacaattcagtggcttttagtatactcagaattttgcaaccataccactatttaattttagaagacgaatgacagttcataatcagtattttaagtttttcttgatttttggctttatctcacagcttaattttcctcttctttccccaaacacatggttaaggatgagattgtatggggtctgttctcagctgtaactattaatcaattagaaagcagatagtattacctttcttcctttaaaacatagtgcygagtgatatgatgcctatgagaatagaggcaaaattcacagatagtttcatagctgatggtgtcatttgaacaaataagatagattgtactggaggaatcatttaatattgcacaaatttggtactaggaaagcagtattctaaagaaccaccagattgcttgaaaaaacaaatctccagtttaaaatcaagttatgccacgcccacccagtactttgttaaatatataaagtaacytggtttcagagaccattttatgtccttggttttgctctagggattaagtagtgttttttttttgttgtttttttaaacatttcatgggtttgtagatttttggaaataatttcagttaatctcagggcttcccaaaccttgaaatggttaaacaccaaccactgcttaacttggttgttgtaaacaaagcccgaaatgaaacccctgtgtatttgctgcagattcccaggtgcctcttaagtgtgaggataagctcagaaaaggcttaataggtttattaagttgtcatccattaaaaggttcacatgctccttgtgtgttgcataaggacaggtgtctgccacctcattgcatttctcactgagcattgcctaggagagggtaagccctaggatttagatccctctcagatgttcaggcagaataattttgtcaggacaaaagtaaggtcacggaactatatgaaaatggattatgaatcctaagayatcagcctattctcccctatgtctaagaagaatattcctcagcttatgactggaatgtcttgctaggggtgctgggtaagttttgtggaggtccccaccagcagaaaaaaatcattgaagaggaacacttaattcacaatggctgctgattaaaaagaaagcctcaatattcacctataaccctaacatccttaacagcttagcagtgtggtaactggcacaaactatggcgtcttggtcaaatccaacctcagtgaaggtagttcacatcctagagatgagctgaatgctgatagctttgaggacttgtttatttgggggaagggaaagagatggtgagggtagagataggaatctgtctgtcgtaataggatttggtctgtgtattaatggaatgaactggccttttttgctctgcttcttttgtccttgctgagaagggaggctgaagtttccaagagttatggatgaagttggagagtattagaggaactgttctctgaccttcttgatggtaatgcaagctgttgggcgagtttggagaagagcgcagggtggtgtgaggacgagggccgtattaacattttgccttaaaacaggaatacacaaattaaagcaataactgctactctgctttcttgtttctgcaatcttctgtcatttgacattgttttttccaaagcaacatgcgaccattttcttcaggattttcttttcagttatcatatgggtttgttgttggattgagaaaaaaaaatctgcctcatttgagcaggcctctctagatcttttcttatgactgtgtagagggtacttcctcatttttcttcctctcaaagacatcaaattcccaagcatttaactaaaattattatcaactaaaaatgttttttttaaaacagttcttagaggtaactgtttagacttaattattgaaatgcatgaaggccttctgccttgcccccatcccactcttttgcctgcctctctcaccaacaaaaacatggcagaggaacagtttattaacaatagcctgtttgaaagggaagcttcagtttttagctaattatttgctaataaaagttttaaaaaaattttcttttaaaagttgtaaaacctctgtctatatttcaaaacccctcaataccaaaaaaatacacataaaaagcctggatatttggttctgaatcattttcattaatacttgctatattatactaaccagaattggaatggaatgggatcagacgagataatccaaagacaaatacagccatatgtcacacaaggacgtttcggtcaaccacagactgcatatatgatggtggtcccaaaagattatgataccatatttttttgtaccttttctatatttagatgcacagattcttaccattgtattacagttgcccacggcattcagtaccgtcacacgctgtataagtttgttgccttggaacagtaggctatcccatatagcctaggggtgttgtaggctattgccatcttggtttatgtgaggacactgatgtctgcacaaggatgcccaatgatgcatttctcagaatgtgtccccattgttaagcaacacatgactgtactgaagctttaggtttactcatctaagtttatttctaaaacaactttaaaaagatagtgttctgtggtaataactcctaaaactatggacacgaaagtgatattaataattttcttggccgggcacggtggctcacgcctgtaatcccagcactttgggaggccgagacgggtggatcacaaggtcaggagatcgagaccatcctggctaacatgctgaaaccctgtctctactaaaaatacaaaaagttagccgggtgtggtggcgggcacctgtagtcccagctactagggaggctgaggcaggagaatcacttgaacctgggaggcagagcttgcagtgagcctagatcgcgccaccgcactccagcctgggtgaaagagtgagactctgtctccaaaaaaaaaaaaatttttttcttttattgttgctttatgtgataattttgtgataatttatagttagaccctcatacatacacacatcctctgacttgtccattggagtttagtttctatattcattgccttttcatcacctctcttagtccggttgttttggtgagctggcccttgatttggatattccaaattacttttcctaaggtacagatttactgccagctacatatttgcatccagccccagagctgttttcattccttccttgacgttgagattttttttttttttaacaggaggactgcaatttatttcactctacgtctctgggacatttgcctcccactgttactactctcaggcacaaagccttgtagaagaggtccacaaacctctaacaactaaggggcagatcagcggtcagacaacatgagctcgttctttttttgtcttaatgataataaggaattattattattaaattctaaccttggatttttgtgaattttacatcttcccttcagcagtttcaattcaggggcaaacttgactgcttagaacttcccatttatcacagaagaaatcccctctgaattcccattaggcaaagtagtatgggctgatgcatagtgagctagttgtgtgcttagtatcaaatagtattcatggtaaatgctcaaaacttccccagaggggaatcacgttaatgcaaatgtgcaaaataaaaagrtgtgtcttaaatttaaggatgcatccttarttgtgtacagcttcattattttacaggattgtttgtggcatttcttacttcaaaacctgattttaaaaaatgcttctcttccccatttttagattgcatgtttgttaggcgagttaggaggtagtagagtcctccttaaataactaggcttttctttgtgttttatacgcttgccttgatagtgccaagaatggaggtcgatccaggaggtcttcccttgagctgcctgcctgtcttggtcatataacaccaagttgcttgggggtggggtggagcagagagaactctttaatggttccttgttacagccctcaacaaagatatgtcaattcccttggctttacagactatygcccagaagaaaagatgtttggttttcacaagccaaagatgtaccgaagtatagagggctgctgtatttgcagagctaagtcctccagttctcgattcactgacagtaaacgctatgaaaaggacttccagagctgttttgggtaagatcacctgatgtttgtactattcttagagtgaaaaaataccacagcatacagaaatatttgtaagcaaggtgattggaacaatgtgctaataataaaaatcacttattctaatttaggctgtgtaagtctcctgctttttaaatgaatcaaacaatgctgacagcctacttttttccagattatgaggagctaccacattaatcgtgaagccccttaaagttgtagctagacaaacccttttgttgttgacttccttttgtggttaatttttaaaaaggcttttaaaaaaattacccttgactgggtgcagtggctcacaccagtaatctgagagcattttgggaggccgaggcgggcggatcacgaggtcaagagatcgagaccatcctggccaacatggtgaaaccccatctctactaaaaatacaaaaataagctgggcgtggtggtgcacacttgtagtcccagttactccagaggctgaggcaggagaatcacttgaacccaggaggcggaggttgtagtgagccgagatcacgccactgcactccagcctggcgacagaatgagactctgtctcaaaaaaaaaaaaaaaaaaaaaaaattacgcttgaccgggtgcagtggctcacgctagtaatcccagcactttgggaggctgaggcaggtgggtcacttgagcccaggagcttgaaaccagcctgggcaacatggggaaacccatctctacaaaaaatacaaacaaaaaactcaccagacgtggcggtacatgcctgtagtccwagctacgtcggaggctgaagtgagaggatcacctgagcctgggaggttgaggaaatgaagatactaaaataaaaataaaatttaaaaaggcatgcatggttggcacagacctttttgacaccttcagaatagttaaaaagtccaggattaacaataaatgatcaacaaatgttttgataagaaaaagtggtgaaagtaatttctaacatgggaaatcattctttttttcttttcttttttaaagagacaatgtcttcctatgttgcctaggctggagtgcagtagctattcacaggtgtgatcattgtgcaccacagccttgaacttttgggctcaagtgatcctcccgtctgagcctctcgagtagctgggactacaggtgtgcaccaccttactcagcaatataatcgtttgtttgtttgttggtttgtttgagacagagtctcactctgtcacccaggcagaactgcagtgtcactgtcatggctcactgcagccttgacctcactggcctcaggtgagcctcccacctctctctcctgagtagctgggactacaggcatgtactaccatgccctgctaatttttctatttttttgtagatacaggattttgccatgttgcccaggctggtctcgaactcccggctgcctcagcctcctaaagtgctgggattacaggcataagccacctcatctggccattttcattttttaaaactacagtgcctctctggttttgtttgctgcgaaactggaatattatggcacattattttacttgccaaaggttagcattttgatacttatgaaatatctacacaggccgggtgtggtggctcacacctgtaatcctagcactttgggaggccaaggcggacagatcagttgagcccaggggttggagaccagcctgggcaacatggcaaaaccctgtctctacaaaaaatacaaaaattagccaggcgtggtggcacgtgcctgtggtcccagctactagggaggctgaggtgggaggatcacttgaacctgggaagttgaggctgcagtgagccataatcccaccactgtactccagcctgcgtgacagagtgagatcctgttcacccccacgcccccaccaaaaaagaaatatatttacacatttcaagaaagattaattaaacagcaatgtttaaaaccgtgataatcagaatctcttttaggtcttgagttttactctttaattttaaaagcatttttttaaattaaattaaaaaaaaaaattttaaagtagagatggggtctccttgtgttgcccaggctggtctcgaactcctgcactcaagtgatcttcccaccttggtcttccgatgtgctgggattacaggtgtgagccaccacaccagcctatttaattatttaatttttttttttaaagatggagtctcgctcttgttgcccaggctggagtgcagtggtacaatcttggctcactgcaacctctgcttcctgggctcaagcgattctcctgcttaagcctcttgagtagctgggactacaggtgtgcaccaccacaccaggctgatttttgtatttttagtagagacacgggattttgtcatgttggccaggctggtctcaaactcctgacctcaagtgatccacccatctcagactctcaaagtgctgggattgcaggcgtgagccaccgcacccagcctggcctatttaattttaaaagcatttcttatttcaaaataaccaaattgccgtacatagaattggtttgttgaatctagaagataattttatttctgaaatattctatagaaacaatggaatgggatcatccaggatgattaaattgtatctataaaccatacatagatacagttttttccccaaaagaaatgtgcttgcatgaattctttaaggtaagggagactgataaaggtttgattgttttcttatcagattgcatgagactcgttcaggagacatctgcaatgcctgtgtcctgcttgtgaaaagatggaagaagttgccagcaggatcaaaaaaaaactggaatcatgttagtccatctttcttttttctcaattatacctctactgtatttaaagtaacattaatttccccctaatttaggaagtaatatatccctagggtagaaaagtctgaaaagaataaagaaaaacactagctgctgttcagatataatggcctaacattttggcatctttagaacagaatagcctggtgtggcatttccttaaggctgtatccaatatcccccttctggagattcacagtaagcattcacctgtttttaggcttaactcagtaattcccagagttaattagacatgaattctttttcttaaatctctttggataacatgatcctttgaactcaggttggtactaatgaacatgtagatcagacttgaatttgaattttgcctttaccacttactagttgtggattttgggcaggttatatttattcatgaagtgcaaagataatagctctcttacagagctattgtgagaactggatgagatggtgtatagaaagtataacacagttatcgttcacactagccttacattgtcctttgatgacagtgttatgttattataataggtcatgattttgaagatgataacaaccttcctttttacatggggtagaaatctgcagctaataaatgtgaatgaatacctaagaaacaggaccatatggggcgagatcaatggctgggctagactgtgggagaacatgctattgctgtcgtgtaactcacctcagagattaaggtgtaaagtgaaaaaagcataaagaataggcctgaagaccttgattccaatcttctcccctctccacccctcttacccatttactcgcttggtgaaataaggcaaaatgcataatttatctttgccttgttttccttctgtctaaaattggagtaacaaaagtagctctattttttgctttgtactaaatataaaaagtatatgaaagcttttcgtaaactgcaaaacattatcctgtagaaatggagttgtttttaggtttgattcttaacctagctgggtcatccagtaatgattatcccatatacaaatctatttaaatttttttccaatagactcccactattacccacttcacaggaaagaatatctttaaaaaccccagtagataaatattatttattcccttatgtcatgtgatgattaaaggtgcacatggagcttcatcctcttttcagtataaaactgtggttctcaaataggcacggatctgaaccaaagggatacactggtgtcattttaaaaatattattaaatattcagtattttcttccaggtggtagatgcaagggctggacccagtctaaagactacattgaaaccaaagaaagtgaaaactctatctgggaacaggatraaaagcaaccagatcagtaaactgcagaaggaatttaaacrtcatagtaagtttgatattacaacattagtacttaataattgttttgttatttttggctgggggtggtgtatggcatgtgtggatcattttttcctttattgctttttataaagagcactggaaggcaacgttgacttggtagagatgttatcttatttctgtgaaatgttggcactttttctgattttgatgtctcaagagagtatttctactagctaaccacttcagattgtactgagaccaccctgatgtctttattgacatcttaattttctagaaggtgcatttctagctcatttacttgatttttatccataaggaaattgagtcctgcagatgtgcaagaaggtacgtaaaggggacaatctgagaccaaagtccagattttctggaaagtaactttagaaatcataacgcacatattgaaattcagccaacctcagggcttgctttcaggtttaaggggcagtgtgtgttgtgtgatagaatgagaaaggaatgtctaattaattaatgtcaggtcacatgctattattggaagttttggggggttgctgtaatggcacatctgtattttggaattgagattttagattttgaaaaggaaatacactgcatataatgttattgtctaataaatatctctattacccttggggtttgaaggagcattattgaaccaaacacattagtatttttacagcaaaaagtagcagtattcacatttagtggaataaatagatggtacataggctagtcaggtttgtctgcttatagtcatagtttaggtcatgccagattttgtggccaaataggttaggaatatactttctgtttccagagctttctcagaattgcggctaggggttgtggatctctattggagctctcagtacttttaaaaaatctatagggccctgttagagagaacattatcaatcaagacatggttatcatgcttgttttagaataatggaaaaagacatctaagtttagtgacggtaaagtgaggagtgcaggagaactcaacattttttgagcattttggtatactaagcactttacatatgtaatctcagttatttccatcttagagctcagaataggaggcacaaagaggtgatttaaacttgatctgggccacttaataagtggtagagatgtaaaatatttaggaaatataaatttgtatatgtattttaattatacacttacctttcctaaccagctctcaaccccccrtctccctaaagatttaactctaccttccattctcactagatattttcttttatttcttttttttttttgaaacagggtctcgctctgtcacccaggctggagtacagtggtgtgatcttgggtcactgcagcctctgcctctggggtacaagcyattcttgtgcctcagcctcctgagtagctgggactacagacatgcaccaccatgccrggctaatttttgtatttttagtagagtttgggttttgccatgttgcccacgctggtctcaaactgagctcaagcaatccacccacctcggcttcccaaaagtgctgggattacaagtgtgaaccatcacacccagtcctcactagatgttttaatgaacatttgggaaacattaattttcttttatcacttgaaggccgaggaactgattattcatatgtatattcttagccctttcccttaattatagagaaagtgatatctcacttttgtcttacttaagggaatattcagtgtaattttagatttttattatgaaactgtgctgtgtagtagttagagactgaaaataaattcctttgataataaggtgtgtagattgtggaggctcagactgaaacagggtgttcaccaggtacagtataaattgctggcacctttgtgcattgaagcagttgggaaacatgtgaatttttatatatcacccactaaatggtctgtgcttctggttatgtgtttgcttctgtgtatcctgcacataccaggcctgtatrctcttctttctttctttttttttttttctgagatggagtcaaacttgctctgtcaaccaggctggagtgcagtgcagtggcacggatctcagctcactgcaacctccccctactgggttcaagcgattctcctgcctcagcctcccgagtagcygggattacaggtgcatgccaccacacccagctaatttttgtatttttagtagagacagagtttcgccatgttggccaggctggtcttgaactcctgacctcaggtgatctgccctccttggcctcccaaagtcctgggatttcaggcgtgagccaccgtgcccagccctgtattcccttttcaagacattttgtggtgtactgaaaaggcattggacctagagttacagatctggatttgaatatcagctcttgtcactagcaaatgtgtaactctggagtcacttgacgtttaaccataattttctaatcagagaactggggataatcaagtaaaaaatggctttgtaaaacaaaataaattcgtctataaatgttagctattctttttgtgtcatccttttcaaaatctgcagtgatttctgcttactataaaatatggttgagaattcctagaaagtgtttgaaggtcctatttttgtttgagctgagtcagttcctggrgtgtttttggcttccacagctttgctcattgactttgcccattgtccctaccgacttgatgccatctaatcactccttggtgccttctaaatcctacgtaatttttaagacttaaaattgcagtttgggctgggcatggaggcttacacctctaatcccagcactttgggaggccgaggcaggtggatcacctgaggttgggagtttgagaccagcctgaccaacatggagaaaccccgtgtctactaaaaatacaatattagctgggcgtggtggtgcatgcctgtaatcccagctacttgggaggcagaggcaagaaaattgcttgaacctgggaggcagaggttgtggtgagccgagattgtgctattgcactccagcctgggcaacaagagcaaaactckgtctccgaaaacaaaaacaaaacaaaacaaaaatggtcagataattgaaatttcaaatagtttaaagatattaagcacttcctaggagagtgagttttcctcagcagcatagaggtgtctgttgatgttaattatttaggaagtcttaaacatcccactagactcatttttttaaaacctgctactcttgaggattttgtttgctaagttaacatattaaaaatactaacggggctttcttttagatacctaattttatgctgttttatgtaaatatttgtaaatataaaatatttgtgagctctattcagaaaacgttttcttgactgggtgtggtggctcacacctgtaatcccagcactttgggaggccaggagttcaagaccagcctggcaaacatggcgaaatcctgtctactaaaaatataaaaaaattagttgggtgtggtagtgcacacctgtagttgtagctactcgagaggctgagkcatgaaaatccaagaggttggaggctgcagtgagctgagatccagccactgcactccagcctgggcgacagagtgagactctgttttaaacaaacaaacaaacaaacaaacaaaaacaaaaacattttcttggctaggtgtgaccatgcctgtaattgcagcactttgggaggccgaggtgggaggatcgcttgaggctaggagctccagaccagtctgggcaaataacgagacctagtctctgctaaaaattaaaaaaataaccagccgagtgtggtggtgtgtgcctgtggtcccagctactcaggagactgagacgggaggattgcttgagctcaggaggttgagactgcagtgagctgtggtcatgccactgcacttcagcctgggtgacagagtgagatccggtctcaaggaaaaccaaaagataaaaataattaaaaaaaaaaaaaaacccaaattttctttagtctgtttctttccatgcagcatgtaacataggatttgatgccttataaatatttaataagtacttgattggttatctgaatggaaggattgctctgtcaacgtgtcctgggatgggcaaggtgtatggtaggccccacctgtgtttatgaggtttatgatactgctcttgctgtgacgtggcagtacaacagccttatagcacaatgactgttaactaagaaacttattttctggcttgtacatttatctgacatcttcacataaacaggcaaagtattaaatcagggttagctctgcatctaatgaactgcctttattccttattaaatcaggatcttttgttttctctttataggtataatgtcattattctttggctgctttcaagatttttctcttggtttagtttatagaggcttaattatgacgtgttttggcatggatttctttgggtttattctgttgggctttggttagcttcttgagtcttaggtttatgtctcgccaaatttcacaagttttcagccactatatttgagtactttttcacctctattctctttttcctctccctccaggactgcaatgacatgaatgtagatgtatgtttgactaagctccacaggtttctcctgctctgttcatttgttttctgtgtcgttcatatggggcaatttctgttgttctttcttccagttcactgtttgttttctctctcccctccatgttgctcagcccatccactgtggtttttattttctttattgtatttttttcagttacaaattttccatttattttttccttatagttttctatcttatttttactgaggcttcctatttctttgccaagcctatgttttcatttatttcaaacatgttcataattgctcactgaagcatttttgtcgtggctgctttaaaatcttggtcagataattctaatgtctttgtcatcttagtgttggccttttcatttagtttgagatcttcctgattcttggactgatgtaattttttattgaaacctggacattttcagattatgttgtgagactctgggtcttatttaacccttctattttaactggcttttttgacacccctcagggcagggaaagagggaggggcctcaccaccctattaccgccaggtgttagaattccagtttctctctcaacctccattgacatctgaggttggggggagggggaggctccttgttactactggatgtcaggagagagttcaggctaccacctggtgagggtggccttgtacttagtgggycataatgaaaatcctgacttcgctaggcttcctctgacaccaccctggtataggtgttggggtgcttcctaagtcttgtgagggtggaaatgtaggctcttcacctcagcctctgctggggttaggaaaggtgtccacagttttttccgtgggtttggctggaacaggaaggttagtgttcagaaatgttttctgtctggctaggctgcccttttcctagttctttgctagagagatcaggttttaattggggttttggatttttgttttgttgttgttgttttgattgtctgtacacattggcatttctgggtggctgctgtttcacttccaaagctggggattatgaggcaaaaggaaaatcyagaaaaactaaggaacctaccaccatggcttgccttgggtcttgagctccctagatgatcatcaccttttggagtctcaggtttgttttatatataatatccagggartttagttgtataagcaggaggaataggaagtatgtctattccatcttcttcacttctttaaaaaacacgttagtctgaatatcttcaaatatcagtagtgcatagaaaatgaattattttttactttttcttttttaccaactctttcacagtgtcttatgctgaggtttagttgcaattacatgtaatgaaattgaaaattttattttttctcttaatctttattgcagattctgatgctcacagtaccacctcaagtgcctccccagctcaatctccttgttacagtaaccagtcagatgacggctcagatacagagatggcttctggttctaacagaacaccagttttttcctttttagatctcacttactggaaaaggtaaaagaaacaaagtatctctctaaccagcaaaccatcttaattatgggcagtatttttctacttccttagcaattaaatggcatttggcaaacagttggtaacacacgattgcagtggattaagcaggaattgagcagggaagtgggatttttgtatgttcttcctattaaaatttatttaaaataaaaatcacatcaaggtacctacattgcctattgctagataagtggagtagaaagacaatatgcagtggagagaatcagtaaaactaagagttggtccttcaaaaagacgtgaccaaaaatatactagagataaagtggatcaggaaaaggagataatacacataagcaattttaggaaagagaaaagagacttaggtatagataaagcagacatttaaaaaataataggatattatagacaacttgatgccaataaatttgaacatacaggtgaagcaggtacagtactagaaaaaagacatgttgctaaagctgtctcaagaaaaagtgaaaaacggagataatctcataataaattgattcaggccaggtgtgatggctcacacctgtaatcctagcattttgagaggccaaggtgaggggattgtttgagcctaggaggttaggtttgcagtaagwtatttttgcaccattgcactccagcctggtgataaagcaagactctatttaaaaaaacaaacaaacaaacaaacaaaccacaataggcaagttgtactaaacatccaggaacagatgattggagcctatgcactggcttttccagactatggataaaatagggcataggccccaagcatttttaaggctgatataagtttgataccaaaacaaatatatcatcagccactagggttattctaggtatgtaagattggtttgaacatgagacgatcaactaatataatttaccacattgacagtttcttttttttttttttttttgagacggagttttgctcttgttgccaagctatagtgcaatggctcgatctctgctcactgcagcctctgyctcccgggttcagtgattctcctgccttagcctcccgagtagctgggattacaggtgcatggccaccacacctggctaaatttttgtatttttagtagaaaaggggtttcaccatgttggtcaggctggtctcgaactcctgaccttaggtgatccacctgcctcagcctcccaaagtgttgggattataggcgtgagccaccgtgcccagcccacattgatagtttctaaaggaaggtgttgtcttcttagtggtgcaaagaaggagtttgacaaatttgaacattcctttaaggtttaaaaaaaaaaaagttttagcaaaataggaatagaaggaaacttttttacttagacaacaggtatcttacaaaaaggacaaaagtacataatacataattgtgataaaatgaaagcattttctctatgatcaggaacaaatcaagagtgttgactatcaccatttctattcagcattatacagaaggttctaaccaatacaatattggtagtagtgtagtagtaaacactttagaacagtgcctagtgcatagtgtaagtactttaaagtactttaaaccactttgtttgcatttatttaatctttttttttttttttttgagacagagtttcactctgtagcccagactggagtgcagkggtgttatcttggctcactgcaatgtccgcctcctgggctcaggcaattctcccacctcagccgcccaaatagctgggtctacaggcacgcaccaccatgcctggctaatttttgtattttagtagagatggggtttcgccatattggccaggctggtcttgaacttctagcttcaagtgatctgcctgccttgacctcccaaagtgctgggattacaggtgtgagttactgcacctggccttatttagtctttatgacaattctgtgaagcattatgtgaaaacacaggtacaaagaggaagtactttgtttaaggttacatagtaagtagagcaggatttaaatctaggcagtttggcattagaatgatacattttatcatagtgttaggaaatataaaataatgtagtaaaatatcaaaagccctttggaggagttatgtaaaaatcatacaatattgtcgaataacatttatttatgtgtgtgtgtgtgtgtgtgtgtgtgtgtgtgtgtgtgtatgtatatatataaatatatgtctatgttgagagagagagactcactctgtcacttaggctggagtgcagtggtgtgatcttggctcactgcaacctccgcctcctgggttcaagcgattttcctgtctcagcctccggagtagctgggattacaggcatgcaccaccacaccctgctaatttttgtatttttagtagagattgggtttcaccatgctggccaggctgatagtgaactcctgacctcaggtgatctgctcgccttggcctcccaaagtgctgggattacaggcatgaaccactgcgcccggccgttgaataacatttaaagacacctaaataaattgagaggtatagcacattcatagatattattaaactgactgttagggagatgatcactttgtagattcagggtaattgcagtcaaaatcccaacatatttatggaactttacaagctaatttataatttatatagaaaagcaaagggcccaaaataggcatcttcagaagaaaaagaaagatgtggataaacttgccctaacagaaatcaagacatattatgaagccatggtaattaatgtgttttgggactaggaatagaaaaataaaccaatggaatagtatagagagcctggaaacaaggccacatatgtatatagcacttgttatgtgatacatgatgtgggggtgattggtgggcgaaaatggtctgttcaataagtgttgctaggatattaagaacaacatggttattcatgtggaaaaattgggcttgggttccctacctcacaccatagacaaacaccaattacagatgcattaaagtagaaaatagattatgacttttgagtgggaaaggatttttttatgacagagtacttaagcatttaaaaaaacctccaggtttaattacattataattatgaacttaaattcatcaaataataccataaagaaaatgaaatgatatccagcacatatatctgacaaaggattagtatctggaatatacagacaactcctacaatggaagaaaaagataaaccaacagaaaaatggacacacttagaaaggaatcatgaaataactcattaaatgataatgtgttcaaactttttgaaaatcaaggaaatacaaagtaaaatttcaatgagataccattttatactcattagattggtgaaaaaactaaaataaagtctattaccaaatgttggggagaaggtatggaatgatgagaacactgtcagttataggtgtaaatagttataaccatgtagataaatggccgtttttgagtaaagttgaagacgttcccattcctatatgccagcaatataaactagtaaaaacctttaagatgtgtccactgatttatacattaaaataagagtagataaataaaactgtgttatatattcacagggtagaatattatacatgttaaaatgaaataaagctctataacaatatgtatggatctcaacgttgactaaaacattgcagaatacattgtgattctgtgtgtgtgtgtgtgtgtgtgtgtgtgtgtgtgtgtaatggataactgtgcagtatgattagagatgccaacatacggtgaaaccatgaagtataaagaaaagggagtgataaacctaaaattaagtggggagaggatgagatgaggtaggatgggactgtggaggggcctgcagggggcttcataggaaatgatcttttttcccttagagtatgtggtctgtaggcattctcattgtgttgtcatttttgatgcctttgctaacacacacccttttttgtttttttttgagacagagttttgctctgtctcccaggctagagtgcagtggtgtgatttcggctcactgcaacctccacttcctgggttcaagtgattctactgcctcagtctcccaagtagctgggactacaggcacgtgccaccacgcctggctaatttttgcatttttagtagagatggggtttcgccatgttggccaggctgatctrgaactcctgacctcaagttatctgcccacctcagcctcccaaactgctgggattacaggtgtaagccaccacacccggcccacacatgtatttttatctactcagtatttaattaaaaattaccactcaagcacttaggagttgataaagaaaaaaaattaaatatatataaaaaattgctagctgcatcagcctgtttatggtggctgatttttttttcaagagttggtgattttggaggaaatagttaacaacatcaggggcagcctttgaaactgactgctgtctttcaaaatgccgtcttcctcaatatttgagaagattccagtgtggcctttaaggcaactgggtaattccccttctctagctaattggggttactctaggagccctttcacttggaatgtgcaagattgtagaagcacaactctttggttatattggactagttataatagtgagtagatttcttttgtattcctatttttcttccttattaatgtatcttgttctccattttttcttttagacagaagatatgttgtgggatcatctataaaggccgttttggggaagtcctcattgacacacatctcttcaagccttgctgcagcaataagaaagcagctgctgagaagccagaggagcaggggccagagcctctgcccatctccactcaggagtggtgactgaggtttttatgtagaaggggaacaaaaaaaaaaatatctgaattttgaaaaaccacaaagctacaaactgaccctcttttttttttgagacggagttttgctcttgttacccaggctggagtgcagtggcgtgatcttggctcactgcaacttccgtctcccgggttcaagtgattctcctgcctcagcctcccaagtagctgggtttataggtgcccgccaccagacccggctaattttttagttttagtagagacggggtttcaccacgttggccaggctggtcttaaatgaccctcttatttttaacttggatacctgctattctgccaaaagacaatttctagagtagttttgaatgggttgatttcccccactcccacaaactctgaagccagtgtctagcttactaaaaaaagagttgtatataatatttaagatgctgagtatttcataggaaagctgaatgctgctgtaaagtgctctttaagtcttttttttttttaatccccttctaatgaatgaaactaggggaatttcaggggacagagatgggatttgttgtatgataaactgtatgtagtttttagtctttctgttttgagaagcagtggttggggcatttttaagatggctggctactcttgttttccctcatgataataaatttgtcataactcagtaacatgaacttgcccctagaggtagttgttaataattttgaaatattaaggtcttgccaagcttctgatgattcacacctgtactactgattattaagcaggacagactgagctttctgttgcaaataccttggaggagaaagtaatttctaaatatacagagaggtaacttgactatatatgttgcatcctgtgcctcccttcatattaatatttgataaagattttaatttatgtaaaacttctaaagcagaatcaaagctcctcttggggaaatggcaagtctttaggataggcaagaccctgtatgaatygtaccaaagcattaccgcatggtagagaacrcactcgattaaaaatgttaagctatctgaaaaataaaatgtgcaagtcttcaggatggcacaaaacaaaggttaatgcttcttggggcacatttcttagagggcttgctgagtgtgtaaatataatcgacttttgtttgtgttacatgacttctgtgacttcattgaaaatctgcacaattcagtttcagctctggattacttcagttgacctttgtgaaggtttttatctgtgtagaatgggtgtttgacttgttttagcctattaaatttttattttctttcactctgtattaaaagtaaaacttactaaaagaaaagaggtttgtgttcacattaaatggttttggtttggcttcttttagtcaggctttctgaacattgagatatcctgaacttagagctcttcaatcctaagattttcatgaaaagcctctcacttgaacccaaaccagagtactcttactgcctcttttctaaatgttcaggaaaagcattgccagttcagtcttttcaaaatgagggagaaacatttgcctgccttgtaataacaagactcagtgcttattttttaaactgcattttaaaaattggatagyataataacaataaggagtaagccaccttttataggcaccctgtagttttatagttcttaatctaaacattttatatttccttcttttggaaaaaacctacatgctacaagccaccatatgcacagactatacagtgagttgagttggctctcccacagtctttgaggtgaattacaaaagtccagccattatcatcctcctgagttatttgaaatgattttttttgtacattttggctgcagtattggtggtagaatatactataatatggatcatctctacttctgtatttatttatttattactagacctcaaccacagtcttctttttccccttccacctctctttgcctgtaggatgtactgtatgtagtcatgcactttgtattaatatattagaaatctacagatctgttttgtactttttatactgttggatacttataatcaaaacttttactagggtattgaataaatctagtcttactagaaaataaaaggagctgttttgtggctttgtttgacaggtcttcagtaagaataatgtttttggctttcacatatactcagtttaagtgcttagtattaataacaagccatgaagggaataaattcctcttcactgagacatagactttggaataaaagacattttaactgatgtgcacaattattaatctagtggataagatggatttaaaaggaagaacaaaatgttcccagtactttttactgtctgtggttttattactatctatgggcatagtgggaagcatcattgagactttagggaaactataaaagttggaagggtggtggcatcaggggttggatgctggttctcaagttcctagctctgccccttgttagtcatttgagttaaataattaatgggaatatctacttcacaggattatgaggaatcctaagaggtgtaatccatatcaaacttttagaaaccagttgttttattacctgggaaaggtaataaagggccagactttttatactactgttagtatttaaatttgggatagtctggatgccacctaatacagttactatgaaattaacaaggtaactaaggaagttgatagtaccagtattatctattgctatgtcctaaattaccatagatttagtggcttaaaacaaatgcgtctcagtttctgtctgagcatggtttagataggtcctttagaaagctcatggtctcatctgcattctcacctggtgatttgggaagaactcatttcagcctcactcggctggcagaattcagttcttgccactgcaggactgagtgtccagacctctcactggttgtcagctggaggcccccgcttagttccttgccagctgggtgctccctgcatggcctggctgctgactggaccactgacatgattactgtcactaccagcaagtgtcgagagccaagctgccagcaagaggggtcttttcaggtcctgcccatatccaaggggagaggctcatacgaaggattggataccaagaggtgcgggtggggctaatgggaaggcacctagagtttwtcacagctttttttttttttaactgaatctctttaaattggtcgtctcgccctacaatgcaaatgctttgtgtagcaagtaaaaagaaaaatggctctcacaatatgaaaaaccctggctgggcactgtggcttatataaacctgtaatcccagcactttgggaggcccaggcgggtggatcccttgaggtcaggagttcaagtccaaccaggccaacatggtgaaacaccgtctctactaaaaataaaaaaattagccaggcatggtggcatgcgcctgtggtcccagccactcgagagattgaggcaggagaattgcttgaacctgggaggtagaggttgcagtgagctgagttgggccactgcactccagtctgggtgacagagtaagactccacctccaaagaaaaaaaagaaaagacctactgttgggccagacacttttaaacattgtttaagtaaccctgcaaagtaaaaaaaaatctatttaccggtaagaggaggtgccaggaggtcatgtaacttgaatgaaagaatctgcttttcttatttgaaagcctttgttctctaaactgtctcctgtctgctgcagtaatgctgtcctaaccctcattggaaactattccctgggtctcttcttgcctcccttctttctgaaggctgaaatgaggggcaagtttaacttttgcagatacgttgatctttaacttaaatcaaattctgttttttaattttgataatgttcaaagtacctattatctgtctttttgtggagaaaactgctggaggtttagtgaaacgatatcttaaaacaattcatcaaggtggctgctctgcagtgaacaatagaaggtaccctgggagctcttctattcagcgtccctagaacagtttcctagtgccccagatttagcattgtagtggccaggcaatcatttttgtgtgatgttcagtgaactcggaagggaggagaaagccaaattagatcaaagatagataatttcacaggctcatgttctcaaagaaagggatctgcgggttctytctaacaatttctcaagctgtggagtttggttactcattgtagtcatgagaatgctttaggtatcaaataccttacaccctggttagaaactgcttgttattgtatgttgactagggggtcttagacaaacttagttgcaagctttagcatgaaagaacttagtcattcagtttagagagagacaaaagatttttttgcgaaagcctgctctttatctgaaaggggaaaatgatttattctgttttacagcatttattctctaaacttctatggcttatattagcttaactgtgtctccaggtattggcttttttttttttttttttttcagacagagtcttgctcttgttacccaggctggagtgcaatggcgtgatctcggctcactgcaacctccgcctcctgggttcaagcgatcctcctgcctcagcctcccgagtagctgggattacaggcgcctgccaccacgcccagccaattttatatttttagtagagatagggtttcaccatgttggccaggctggtcttgaacttctaacctcaggtgacccacttgcctcagcctcccaaagtgctgggattatagacgtgagccaccacgcccagccagtattggctttttgcaaataaaagagaaggattgtttttgcttacatttatatttaaatctcaaaataattaaaactaaaaaatctcaaattatttagtaagttcctggtagagttaaaatagaaacctgaaaaattatactttttttttttttcctttccttttcttttttttttttttttttttgagacagagtctcactgtgtagcccaggctagagagcagtggctcaatctcrgctcacygcaacctctgcctcctgkgttcaagggattktcccmcctcagcctcccgagtagctgggattacaggcatgtgccaccatgcctggctaatttttgtattttttggtagagacagggtttcgccatgtttgccaggctggtctcgaactcctgacctcaagtgatctgctcgcctcagcctcccaaagtgctgggattactggtgtgacccaccatgcctggccatactgtttttttttttttttttcccctcaagtaagtgtatacttggcctccaattaactttacaaatctcttcaatgttgatctgtcactgatggcttcttcatgagacattccaaagcctttatcttatttacccagcctctccacagtacttaatacgattgacagtttctttcttgaaatactcttggttgaaaacacactttctaggttttccttggacctcagatgctcactggcccaggcttcatcttcagccttcttcctagattatctccattccatggtcccagataccatatgaaatatgcagacatctcccatatctgtctctagagatttttatcagtcctgctggcaggaaatagatggcttactgaaattggataatttgaggaaagtttaataaaaggacctttacaaagttgtatgtagggtatagggaaacctcagggtgagtttagttcttgggactagtaacattggagtcctgttactactactcctgggtctgaagattgaatagagggagttggttaatggaaccaggagaccaacaggctatctaaaaagagtgggggcctggaggaagcagtaggagtaaatattctcactctccagattggccaactccatcattagtgccttcacacctgtttgttttctctgacccgtttccctaccatcctataactaggcaacacctacttatttatccttcaggtttaagctgaggcattacttggggaagcattccagaataattcctctttcttccaacacacacacgtacaaaataacatgctacatgggttccaagagagcatgaagcactgtttagtcaccactacagctcccagaggggttgattaggatatattaatagcagggtcacaataaatatttatattgattgattgcttacaacctggtattttcagaaatcatattcttagaagagttgaatttatcccaactgtcttgaattttattcaagaatgttaaaaaatactttgaagaaattttaagtacacagaaaagttgaaagaatagtataatagtataactttcacctagatccacaaatgcaacattttaccatatgtgctttatctaatttcttttgctgaatcatttgaaagtaaattgtaacaccatgatacttcacccctaaatacacattcatctaggaataagaatattctcctccctagccataatgtcattgccatatctgagctgattaagaataactcaatatccaatatgatagatctgtatggaataaattgtccctatcatcccaaagtgtcttttaaaacattttctcctcatccggggtctagtccaaggttcaggcatacttttggttatatctttcctcttttaatctagaatagtcctctgctttttctgcccatggcaatgaacattttgaagtgtctaagccaattgtcttgtaaaatatcccctatcctggatttttctggctatgttttattattattattttttattttgagacagaatatccctcttttcccaggctggagtgcagtggcatgattatagcttactgtaaccctgaatgcctgggctcaagcaattctcttgcctcagcctcctgagtatctgggactacaggcctgtgccaccatgcctggctawcttcttttttggtagggatggggtctcactatgttgtccaggtttggttgttttcttagtagatgtggattttacttttggcaaggatatagcatagattgtgtggtgcctctgttactgcatcatgtcaagaagcacacaatgtcaggttgtcccactgttggtgatgctaagattaatcgctgggttaagatcgccagatctttttccattttaaagtatatatcttttcttttgtaaatgaacaaaataatctgtggggtaatactgtgagacttttaaaacaacctttcattgagcacctacgtacaaggccctactaagtgttctaagtagtcccttgatgcttgagaaatcgtgtggctagaatcgtgaagtcctttttgagaatcgtagcatactaagattgtggggcttttttcttgtcatttaattgtgtgtgacttttattttctattcagaaataagtatgtagtggatgggggtaagggttatgtttggcacgtgagcttattagttaatatcaccagggcatagatgaataaacaatggaattagagtcaggagacttgaatttaaatcctggttttgctacttactggctttatgatctttgataatttttctctgagctcatttcctttgtaagtggaggaaataataccaaacacagctgtagtaagagcaaaatgaggatcatagagggcctggcctataataggtgcacagtgataagcacctaatgataaacttgttccctcatttgttctttaatctttaggaatgaagtctaattggatatgctaagaatgaaaacttttttgatctgtagttatgatgaacacaggaaaggtcttaaacagttcacatcaacaaccacccctctgcccccataaaaaagctcaaagctttcttaggtttcagtgcttaaaggagaatatgtattcactacaagattattatgctttggcagcacatgaatcccaggattgggaaattgtagagagggcatgaagctatgccagatataattaagctgcacaaaaagtatgttgaaatccagagggtggccaagataggctctcaggatgattttttgaaggaatgattatattagattcagggagtacatgtgcaggtttgttactgggctctattgcgtgatgctgaggtttggggtgtgaatgtcactcagatagtaagcacagtacctaacagtttttcaacccttgtcaccttcccccttccagtagtccccactgtctgttgttgccatctttttatgtccatgagtacccatggtttagcttccacttatgaatgagtatatgtggtatttggttttctgttcctgtgttaatttgtttcgggtaggcctacccaaggatgattttttaaaaattttattattattatactttaagttttagggtacgtgtgcacaacgtgcaagtttgttgcatatgtatacatgtgccatgttggtgtgctgcacccattaactcgtcatttagcattagatatatctcctaatgctatccctccccattccccccaccccacaacagtccccagtgtgtgatgttccccttcctgtgtccatgttttctcatcgttcaattcccacctatgagtgagaacatgcggtgtttggttttttgtccttgcgatagtttgctgagaatgatggtttccagtttcatccatgtccctacaaagaacatgaactcatcagtttttatggctgcgtagtattccatggtgtatatgtgccacattttctgaatgcagtctatcgttgttggacatttaggttggtttcaagtctttgctactgtgaatagtgccgcaataaacatacatgtgcatgtgtctttatagcagcatgatttataatcctttgggtatatacccagtaatgggatggctgggtcaaatggtatttctagttctagatccctgaggaatcgccacactgacttcaaatgtaatccagcatataaacagaaccaaagacaaaaatcacatgattatctcaatagatgcagaaaaggcctttgacaaaattcagcaacccttcatgctaaaaattctcaataaattaggtattgatgggacgtatctcaaaataataagagctatctatgacaaacccacagccaatatcatactgaatgcacaaaaactggaagcattccctttgaaaacgggcgcaaaacagggatgccctctctcaccactcctattcaacatagtgctggaagttctggccagggcaatcaggcaggagaaggaaataaagggtattcaattaggaaaagaggaagtcaaattgtccctgttggcagatgacatgattgtatacctagaaaaccccattgtctcagcccaaaatctcctcaagctgataagcaacttcagcaaagtctcaggatacaaaatcaatgtacaaaaatcacaagcattcttatacaccaataacagacaaacagagagccaaatcatgagtgaactcccattcasaattgcttcaaagagaataaaatacctaggatggtttttgaagagtaaaatttggctgtgctgtaacagctctgtggaaccaattcataaaacatgctgaaatagtacaacacacctcttagcctcaaggcccaaagttccaagcatagttattgaagccaggccggttgcctgctttggccagtctagactccttgaacaactccaagggggcaagcaccattcaagttataggttacagagatggtgctccttttgcccagttatgctagtgctaaagacaatgctatttaagtgcacagttccaggggcgcttgtggctctagcagcttgaggctgcttctttagctctttatcaggcagattttcttcttcttcttcttctttctaatagagctggggtctcgctatattggccaggctggcctcaaactcctggcctcaggccttcctcctgtcttggcctcccaaagtgcggagattacagatgtgagctatcacccctggtccaggcagattttctttataacttmtttttttttgttcttttccaagtaagccagtgatgagagatgcagtaagcattatctttatgactgtatctagagcatccttgggatgccagtttcaattgctaaaaggaaaaaagtctgtcataatgcagttaattttttttttgagacagagtctctcacccaggctggagtgcaatggcacgatctcrgctcactgcaacctccacctcccaggttcaagccattctcctgcstcggtctcctgagtagctgggattacaggcgtgtgccaccatgcccagctaatttttgtatttgacggggmtgcaccatgttggtcagggtggtctcgaactcctgaccttgtgatccacctgcctcggcctcccaaagtgctgggattacaggtgtgagccactgcacccgggcaatgcagttaattataaatttcattttcttctgaagagctaaaactatttgatatatgattcccagtaaactatgaattaytgaggaggctgccaggaagaactagctaagccctttgctgctactgtgaccagcaacttttccatcctggccatgcagcttcctttatcgcgtattgccatatgaatgtccactaggtggtgctagttacacgtcatactcagtgttgtaggcacatccagtttaacacagtttttatagatgcagaagcttacctaatggttacccagtgagttaaaactggagttatttcattgcttcatccacagtcagctaagcaattatttcacctcaactgtaaaccttagaaacacgttttaaaagtttggagaacctaatttctatttccctttgaccaagataattttaatctttaataacagctaagagccaacccttactttttctgtaattaattttatattatcacaaaggaggaagaaggtatatttgtatccaccttcttccttccccaaatgccattttcctagaagactgccgttgcggataaagacatgcaatgtgatttgcaacccttggatatcacagacatggtggccacatttctaaacttttaggacagctggatttctgtccagtgtatttttggagattgagttgatgtcataccattgaggccagaagctaccaaacctttcctaaagcctccagtcaacctggttgtgaatgcagcgtgttgccactgtctttaaagctgtgatttctaaagttatatgtaagactggcccattgaagtgtgcaaagtaaaaattagaactcctatttctgttgatttttcctcattttctctcctgtcctgtttgtatatgttttataatttacataatattagcagagtcctacctgtgcacagttcataacaaggaagcatgctggggcacatatacttttttaaaaaaataattggaaagagataaaaaaggtttggagagagctgcatacttctctgtgcattacatttcaataagaagtttagtttactttttttttttgagatggagcctgctctgtcacagtgcagtggtacgatctcagctcactacaacctccgcctcccgggttcaagcgattctcctgcctcagcctcccaagcagctggcactacaggtgtgcaccaccacacttggctaatttttgtacttttagtagagatggcgttctaccatgttggcaagggtggtctcaaactcctgacctcaagtgatccgcctgcctcggccttccaaaatgttgggatcacaggcatgagccactgcgcctggccagaagtttactttttcaagtacctgaagatcactaataattttagagtgatggagggttggaaatgggggcgtttattttcaagtccaagagatcattttggttggtgaaatattacagaaaatggcctatggacctttcctggatttgagggagaagaagaaataatagttgccagaactgttttctgttacacgctgatcaaacgtttgttccctctcccacagtgtaatgtttcctccccctgcctttatcgcatacagtggtgtgtttttcagaatgggatatcctccttcgggagtaaagttattgagcataccttgtcattggtggaaaggaaaaacaaatacaaaaactgggcagttacctgggagcgtctagtttcttcctttgccttccattcagttgggtaactacaattctcagcctcaaattattttttcttaktcatgttgaaaatccatggaaaatagtaagaatgaccaaactggtctcttcattaaggatgggtctccacattcgccggttttactattgagggcattgaaatgggccatgacagataaagttactcaccaggctttttaaagaaggttgaaaatggatggtagaaaatcagcagttaaatttagattcagcagttgtaaaaatgaagctccacagctgccctaacatgacagataataaagaatacaagaaatactaggaaaaggttcacctggaacagaatcaagtcacaatattgtgggagagattatcagtggatggagaagccaagaaaacttatttcagggaaaacaaatgtgattccataacttagcagtgcagtaatagatgttgccaagtactagaagacctcaagtgatctgcccacctcagcctcccaaagtgctgggattacaggtgtgagctactgcacccagcctaagatattttttttttttaaaaagacatcacttgtaaatccagctctccatccccatcccccagttcagtaacaaccttggtcttttgtcttccatatcagggctcagcatctaggtcctcctcttttccggtagttctttatgtttcactgccgcataggcagttttccatgtcagtagatggcggaagagtcaaagaggtttgttttctcccgtccagcattatcagcccgatgcaacactggcagggagaagagatgggaacttgagtggtttcatttgtgtagctacaaggaaagaaaatttaggggaagaggaggtgatccatgtttggaaaactagattataaaggaacatgtattttcttagatgaacaaggaatgctggccacagatggtttctccaggtttgcatgtctgtgaagagccttgtacccaccagctcctttatgccatctcttcatgtggaatctttagcaggagatgaaacctggctaaagtgatctgacagttaaggtccaaaatgaatcctcgcagtgaaagttctgcaaagcaccagacaaaagtaattaagacagtaggagcagcagttggaaaaagtgatggcaaatgagtgaggcagttatccagtaatttcttgttaattttagtcatttgcttacaaagaaaaatataatgttttgttaaatacatgcactcttacttcttttgtcctcattgatgatggaactgtgactggaattagaaattcagcttctgtgtttaaaactgggcctggtgtggtggctcacacctgtaatcccagcactttgggaggctaaagtgggaggatttcttgaggccaggagtttgagaccagcctggacaacatagcaagaccctgtctctacaaaaaataaaaaaacgtagttgaacatagtggcaygcacctgtagttctagctacttgggaggttgaggtgggaggattgcttgagttcaggatttctaggctgcagtgaactatgatcgtgccactgcactccagccttggagatgcagcaagacttgagactttgtctcttaaaaaaaaaaaaacccaaatcaaaaccactcctgaagcattatatgcccactttttaggaatctatccaaagtagatacttgaagtatcacatgatataaaaaaaatttactcaaaatggatcaaagacctaaatgtaagagctcataaaactcttgaagggaacataggtataaatatttatgaccttggattaggtaacagtttcttaaatatgacaccaaaagtacaaataacaaaagaaaaaaagataaattgggcttcatcaaaattaaaaacttttgtgtataaaggacactatcaagaaagtgaagggccgggcctggtggctcacagctgaaatcccaacattttgggaggccaaggtaggaggattgctggagtccaggagtttgagagtttgagactagcctaggtaacatagtaagaccccaactctatttaagaaaaggtaaaaaaaaaaaaaaaaagaaaaaaagaaaaagtgaaaacacaacttataggatgggagaaaatatttgtaaattgtttctgtgataagggcatactatccagaatatataaataactttcatatgtcaacaatgaaaagacaaacaatccaattaaaaattgggcaaagggctgagcatggtggctcatgcctgtaatccctgtactttgggaggctgagcgggcagatcatttgaggtcaggagttcagactagtctggtcaacatggtgaaaccccgtacctactaaaaaaaatacaaaaaaaattagctggatgtggttgtgcatgcctgtaatcccagcttctcaagaggctgagtcaggagaatcccttgaatctgggagagagaggttgcagggagccaagattgcaccactgcactacagcctgggtgacagagtgaggctccatctcaaaaaaaagaaaaaaaggccaggcaaggtggctcatgcctgtaatccagcactttgggaggctgaggcaggcagatcacttgaggtcaggagttcgagaccatcctgaccaacatggtgaaaccccatctctactaaaaatacaaaaattagccgagcatggttgtgcatgcctataatcccagctacttgggaggctgaggcaggagaatgcttgaacctaggaggcagaggttgtagtgagctgagattgcaccattgcactctagcctgggcaacagagcgagactccatctcaaaaaaaagaaaagaaaagaaaaaagttgggcagaggatttaaatagccatttcttcaatgaagatatataaatggccaataagcacatgaaaagatgctcaccttcattagttattgaagaaatgcaaatcagaaccacacctaattgaatggcaataataataaggaaaaggaaaataagtattggcacagatggaaattagaaccctaatgcattgctggtaggaatggaaaatggcacagctgctgtggaaaagtttggtggttcctcaaaatgttaaacgtagattgaacctgcaattccacttctagctgtatacccaagagaactgaagacatatgcccacatcaaaactcrtccaaaaatgttcacagcatcactattcacaacagccaaaaggtagaaacaacccaatgtccatcaactgatgaatagataaacaaaatgtggtagtacatccaaagagtggaatactaattcaggcataaaaaatagttcagccaaaaaggaatgaagcactgatatatgctacaacatggatgcatcttggaaatactatatactaagtgaaacaagccagacacaaaagaacaaatgtratatgatcccatttatatgaaatgtccggaataggcaaatccatagagacggaaactagattagtggttgccaggcaatgggggtagggaggaattgggaacgactgctaataggtatggagtttctttatggggagatggcaacgttctggaattagtggtgatgtttgtacaaccttatgagtatacrcaaaacactgaactgtacacttgaacgtggttaaaatgttaaattttgggttttatgcattttatctcagaatattgcaaacaaagatttagctacaaggatgttcactaaattgtttctcatatagaaaaaaaggaagagaaaaaactgaagggttcagtagcgtattacttgaataaattgtgctagagttgtatgtacacatttgtagaaatgaacttattgatgtgaaaagatgtttatgatatcaagtgaagaaaaaccagttctaaggtaatatttaaggaattatcctattttttgaaaaaaaccaaaatacactagagaggagtgagtggaagtccatacactaatgtgttagggaggctgggcgcggtggcttacgcctgtaatcccaacactttgggaggccgaggtgggcgaatcacctgagatcaggagtttgagaccagcctggccaacagggtgaaactccgtctctactaaatatacaaaaattaactgggcgtggtggtgggcgcctgtaatcccagctactcgggaggttgaggcaggagaatcacttgaacccaggaggcggaggttgcagcgagctgagatcgtgccactgctctccagcctgggaaataagagtgaaactccatcttaaaaaaaaagaaaagaaaaaaaaagttacttttactatcagctgcaaggcaaataggagacatttattagctttttactagctgtgtgactttgggaaatttacataacttttgtgccccctttttctttccgaaaaatgggaatcataataaagcctcccttactgaggtagccatggaggagcggcactcagatttcccttcaagaaagggctcgctgttcagccgttaaggagcgcagtcagcagatgccttcagccattagcacctttggaacgaggtctcaccttcggaggtgagaccttgatctcctaaggtagcccccagctagtgactgagctcagtggcttccgggcttgggcactgcagcctaagatgagcctcctctactggccagctcttgtccagagttgctgatcagattggcccaggctttgtcaggtctgcagcgcggtctgagactctccctgcccaaacccacttccccgctttcctttaataggtgtcagatctgcagcacggtctgaagaatttccctgcccagccttgctttttctgacttttatctttcaccagtgctgtcccacggttaacctcttgtactcctagctccatctgctttcagaggacccaactgacacacttaggtgtgtcataagccacaagtgtgacagcacatgaaaatgctggacggtgcctggcacacagtaaggcttcagtgactgctatcactggcattatgtgactgatcggctttttattataaaatgaggttttgtttttggtcactgctattttctcatttattcctgatttggcttccaccatccttttctactggcatataaatgtaagactgtgtatatactgattaaaaattttaaataaaagttttattgttgatgtatatctatgaaggaaaaatttaaacaaatattggctagcatttggcaaagaaattagaaacaagaaaacgaagagaagagaaagtgtatgtgaagatagtacattctgtgaggacaattttatttagtatttaaacagtgttatatgtcgtatcctcttaaccactcattcamacacacacacccctccataagaattcttctttgtcagtatttatttttttgagacaaggtctggctctgtcaccctggctggagtgcagtggcacaatcagggctcactgcagcctcgatctcccaggctcaagccatcctctcgcctcagccctccaagtagctgggactacaggcccgcaccaccacgcctggctaattttttttttttttagttttactagagatgaggtcttgctatgttgcccaggctggtctcaaactcctgagctcaagtgatcattccactttggcctcccaaagtgctgggattacaggcgtgagccaccgcgcccagcctaaaagttccatttttaaaattcttgggttggtagcttaaatccatctccttctgctagagtaggcatgctttttattcctcagaaggtttcaaacttgggctttcccagcctttttacttttctaacatgttaagtagattgaatagatttttctatgtcattgacaagtttattgactagttatagaagtcatttaaaaaatacctcctgtgacatgattcccatcattttccaaattgggagcacctactggataccgatggatgacaccagccttcagaggctttagaaaccttgtgctttttggcaaatccgacacaatataaacaatgcaaactgcttgtttgatatcaatgtatgcatttgaatccgtctctttttgatggtggaacacactttgtttgcataagatctaccakagaagctggtcagcaggtttttaccctgaacatccctggtaatggtaactagttggaatttaagaaatgcaacttcgtcagaaattattctcttcaaaaatatgaccttagagaccatcggataatattttggctctttgagtctttgtgactaatattaaacatggcaggcattttcacatcatgtcagtctaaacagagggtcaacccttttattctcggctctatttttttttttttcttgagacggattcttgctctgtcatccaggctggagtgcactagggtgatcctggctcactgcaacctccacctcttgggttcaggtgattctcctgcctcagcctcccgagtaggtgcctgccaccccgcctagataatttttgtatttttagtagacatggggcccactgcctcggcctaccaaagtgctttggattacaggagtgagccaccactcccggctcctctttttctataacatgctggttcttccttgccaccaggcatcttggctagaaaagcaaagaggatgaggcatattcttattcagtttccttcttagtcacagagcaaaagttcttagtgtacgggaaaggcacaacactctctctaagcttctcaagggcagttgttgtaaatctaattgcatttttcaccattcttagcattggtgaggtacacattacactttctgaaaataaatttagggagtgtgttaaaatatatgtatatgtgtaaatgtgtaaattgtggagtgagccatagtagtttattaatttttgtgtgctcattgtgtggttaaataaaatgtatacaaccataaaatgtggatttgattatcttaaacatggagagctcctgactctttgkttttttttttttttttttttttttgagatggagttttgctcttgttgcccaggctgtagtgcaatggtgtgatctcaactcactgcaacctccgcctcccgagttcaagcgattctcccgcctcagcctcctgagtggctgagattacaggcattcaccgccatgcccagctaattttgtatttttagtagagacggggtttctccatgttggtcaggctcgtctcgaactctcgacctcccaccccgacctcccaatgtgctgggattacaggcctgagcaactgtgcccagccagaactcctaactctttagtattatctgatttataacttttatgaaatatcccgctttgttagccaaatattttctaagatattagaatgttgttgaaaaattgcctttaacaactaacatygtcaaaggtgacaccattttccttgcatggaagtaagcatctgttctctgggggtaccgagaggctgatcagggtactaagaggacagtaggggtaggtgaccccacgttaaactctactgtaagaataccttccctgttccttgtaccattcaggctaaaatgaattgaccatttattagaattctcaagaggcaatttgtatatgaagacagggcagtaggagaagactgctgaaattctttatgtactaaaaataactgtacttgagattgataaaattaatgtttaatgcttcatcaaggactttttttttttttttttgagacacagtctttctcggtcgcccaggctggagtgcagtgattcgatctcagctcactgcaaccttcgcctccygggttcaaacaattctcctgcctcagtctccctagtagctgggatcacaggagtgtgccactatacccggctaatttttgtatctttagtagaggtggggtttcactatgttggccaaactggtctcgtactcctggcctcaagtcgtctgcccgcctcagcctcctaaagtgctgggattacaggcgtgagctactgcgcccggcccatcaaggaccgtcttaagtgaaattgactttttttgtgtgtgtgagtctctggtgttgacaagtaaaatggttattaatacatctggtgctaccaccttgacttgggctaaggtgccagcagtttatcccaccattactttccccaccatgagtgcacttgtcaagagtgaagaaggcaaataatgtcttactatcggtatcaaaatagaatcattyaaaattccagtctgacaactattctcatttgattaatctgtttacattgygtgtaaacagacatatttggrtttgtctgccatcttactatttgtttctattttatcccatctgttttgtatgctcacttttcctcacttttcttgcctttatttggagtagtttttaaaattattctatcccccatgtccctgccagtagcttgttattcattgttttactactcttttaatggttacmccagagattataatacaaatccttgcttaattacaattgtaatrtaagtattgtcaccagtttctggacaatgtgagggctttaaacactttcactccatttaccctccttcttttaaaaaacctttttagagacaagatcttgctgtgtcacccaggctggtgtgcaatggtgcgattctggcttgtttcacccttaaactccaaggctcaaatgatcctcctgcctcagcctctcaagtagcygggaccacaggcacatgctaccacacctggctgatattttaattttttatagagacagggtctcattatgttgcctgggctggtcttgaacacccggacacaagcaagcctcctgccttggcctcccaaagtgctaggattacaggtgtgagccactgtgcccagccatttaccctcctttaaaaatattttttactttgagaaaaaatttaaacctggttggatgaagcccacctaagttatgaamgattatctcttttatttaaagtcaattaagtgtagctsttaaccatatctayrgaataccttcacctagmtttgtgtttaattgaataaactgggtactatgacttcrccaatctgacatataaaactaaccatcacaaagcatattcagtttcttctcgttgtcagggaatataacagccatttgcactttccatttgttcattcatttattcaagaactattttttgagcaccagctatgtgccagatacygttatagatrtgtggatacatgttctaagatccagacaactgacttacagataactgttacaatataacctatttataagttaggaccctattatatataaggttatgccttctttttgactttattttcctgcaagacatagacagaaatgtattcattttcaygactttcatcaatctccttgcttagttctttgtcaagtaaatataaatatctgccaaatagctatcaaaaacaacatttggccaggtgcagtggctcacacctgtaatcccaacatgggataggtgggggcgggaggattgcttgagaccaggagttctggctgcagtgagccaggattgcaccactgaactgggtgacagagcaagactctgtttcttaaaaaaaaaaaaaaaaaaaaaaaaaaaaaagaagcttaaattaamccaatagttttacctggaaggttgaagtcaagggttattgaagtggaagaaaaatctctgccccrcgtggcagctgatttccaaaaggggcaagagaggacaagccccattgcataaatgtttttcaggcctctgcttgcatctcgtttgctaatgtcccattatccaaagcaagtcacaaggccagtctgggttcaaggggtggggaagtagagttcatatcctggtggaaattgctacaaataatttgtggccatttattctttgccatctaccgcaatggtctgaaagaaatatgaagcacatgacagcaggttggcagctggtcagagggtcacaccaatggaaccccgccgggcatattctgatgtatatggatagtgctttctaggccatactgtggtacctggtcactttttaacataaagggggaaagctgctgattatataattaaatcagacaaaccacatcatttaagcattaaaaaacctcctttgaagcctgaattcttggttttcccattatatcagccagayaccttgtcaaacggtgccttttgttttataggcattatatatgcaacttagattactgcctttttcctttattcctgtgctcataagcataccccgaatccctaaaaaaaaacccccgattttcttctttttcttgattatacaacttctaaaagattgctttgggctgggcgcagtggctcatgcctataaatccagcactttgggaggccaaggtgggcggattacctgacgtcaggagttcaagaccagcctggccaacrtggtgaaaccccgtctctactaaaaatacaaaaattagcggggcgtggtggcrgctgcctgtaatcccaggtactgaggtcggcgaatcgcttgaacccaggaagctgaggttgcagtgagcccagatcgtgccattgcactccagcctgggcaacaagagcaaaactctgtctcaaaacaaacaaacaaacaaacaaacaaacaaagattgctttgtcatttagattcagaacaatgcattctattctcccggtaatggctttttatgttttcytaaataagtaaagtggaaggtatataatagacactactgcttcctccccctggaagaattacttagttttagtaacacaacatgtcatgctttaaaaatctggcaagaaatgatgaaaatayacccttcaacaaagttccgctgacgtgaactgagttgctaagatacttagctaagcaaattcaattataagctttctgactcaactgcgcactgattttcaggatcttgcaatgtgatgctactgacctgaaagaatgaatgcgcctttaaagaagggggagattatttgcttcccatcagcaggctcaagctcagtattttcatagcgtgtttaataaagctttggaaagaacacagttaaagtgatgaccattagctggagtaggaaaagattcaactcaaacatatttcagttatcttaaacaaattcttccctgaggtgtacacacatgcaattagttgcctttcccagtgaatgttgtacagccatatgccccagaagaatttggctccattcagttacaattcacaaaaggcatttttcaaacatcttgagtgacataaatagctggcaagagtgttaattgcagaagtactctgatttatcaagcraataactatgtgaatgtgctttgtaaactacaagatactctgaaaatatctgttgtcattctgttttttttttttctgagacagagtcttgttctgtcgcccaggcagcagtgcagtgggtcaatctcggctcactgcaacctctgcctcttgggttcaagtgattctcacgctcggcttcttgaatagctgggcctataggcatgtgccaatatacccacctaatttttgtggtttttggtagaaacggggttttgccatgttggccaggctggtctcgaactcccaacttcgagtgacccacctgccttggcctcccaaagcgctgggattacaggcatgagccaccgcgcccaactgtcattctgttttttaactcgtgtacataatacatacagattaataggttacaccttcttcamaatgactttgcaatttgttggactgaaaaatgaaataattttggtaacactctcccaagatcagtgagtttttctgttgttttctttcttcttaccattagactataggcacaatgtctcaacggtatttataattccttgaaagaattatttctaattatctatgtaatatacacctattttagaaaagtttaaaaatggagaaaagcatgaaaagtaaataataagtaattattccatcacccagaggtagtagtcattaatatttagtccattttcttctcatcctttttctacacatataagtatatatggaaatatgaaaatgacatgtatttttgatgtgattgtataagaggcaatatagaatacaattgaatattggagagatgtgccatgatttacttaaccagctccattactgagtattgtttacaaattattactattacaaatattattataatgaatatcttaatgcataaagttttatctgcatttcagattatttggttaaattagattcctacaaagagattctgttgaccagcctcyaacaatatggtccccttttctgttattactgctgttgtgtaagtaccaccacctgagcccacccctattcccacttcccactgaacggagsttttttgtrataccagtatgatattgcaaaaatgatgaagtgtgatttctgcggccrgccattgtggctttctccttgatctctctgtgctggttcacttgttctggcagaagacttcagcattcctctggagaggtccatgtggtgaggacctgaggcctccgccaactactatgtgaatgagctgmcttgggagtagatcttccagccctggctaagccttcagaccgccgaagccctggccaccaggtggaatgaaacctcatgaaaaaccctgagccagaacygtctaggccaagatgctcccagattcctgtctagtagaaactatgtgagataataaatgttatggttctttaaaatatttaaattgctaaatattagggttctttattatgtagcaatatattagtaatacatagataaactgggttaaaaggtagagtatttaaacatgcttgatagtgttaaaaggctttccagaaatgttatactaattaactcttatagaagtatgtctattatagtcatgcctgtaatcccagcactttgcgaagccaagggaagaggattgctagagcccaggagttcaagaccagcctgggcaacatagtgaggccacatctatacaaaaaataaaaaaattagccaggcgtrgtggcacacatctacagtcctagctacttgggaggctgaggtgggaggtcaaggctgcagttagctgtgattgtgcctgggtgacacagcaagaccctgtctcaaaaaaagaaagaaagaaagaaaaaaaagtagtatgtgagaatgtttatagtattgtaccttcrttaccattgagtatttatatttgtaacctttataatttcatagaaaaagtagggcattttgccatttaaaagttttgcttttatttgtttcctattgaggttwatttttttttcatgtttctttttatatttcctcttctgggaaacctctttacatataatttgctcaactttctattggggtcttagtgtttttcttagtgatttgcataagctgtttatatataaaaggcattaatcatttgtcatgtttgttataaatattgttttccaattggttgttgctttttggtgtcatgattatatgtaggtgttttaaatttttatgcagttcagtggattatggtatcttcttttgtgtttaagcttggaacgtgctttcatttgaagagaagataaatgctyatgatatagtttttggttttattttatatttggatctctaattcrkctgggatttatttatttatctttagagacagagtcttactatattgtctaggctrgactgcagcgactattcacaggtgtgatcatggtgcactacagccttgaattcctaggctcaagcgatcctcctgcctcagctaccgagtagctgggaatacaagcgtgcaccaccrtacyygacttattatttattttatcaccaaatagcaagccaatttctacaatgctatttatgcaataaatagaacaatttcmttctttcctgttgattggtaattattatatgttgagttgttttaaaatcttgtgactttctgtgctctctattctatttcactgaaagctattcttgtcaatatgactccattttaattattgcagatttataatttgtaataactggaaggactagttagtagaatgactttaagaaatatgatctttcagcctgggcaacattgcaaaaccccatctctaaaaaaaatacaaaaaaaattagcagggtgtggtgcatgcctgtagtcccagctactcaggaggctgaggagggaggattgtttcagcccaggaggttgagactgcagtgagctgtgattgggccactgcactccagcctgggcaataggatgagactctgtcaggaaagaaaaagaaagaaagaaagaaagaaagaragagagagagagagaragaragaaagaaagaaagaaagaaagaaagaagcaaggaaggaaggaaggaaagaaagaaagaaggaaagaaagagaagaaagaaaggagagagagagaaagaaagaaggaaggaaggaaagaagggagggagggaagaaggaaaggagggagggaggaagtaaggaaggagatctcatggtctctcagagccacagagctttccagaatgcaatcaaatgtttaagagttgggtggcctgtcactaaaaaatatgagagaaggcaaaatttcatcaaaatcagagttttgtggagctggccagaaaaaaacattttaatattctaagaggcaaagaaatgaaaaatccaatcaagtgttctatcagaggcaggttagaggcagacttctaagaataaatggaagaaagagggaattatgtgatgtagatgagttctgctgcataaacaatatttggcccataaattagtcttcatatttttgtgtatttttgtctagctatggaaagtttaaaataattaaacagtaaaactatctgagcctgggaaatgtctaacaaatatttctttgataacttaaataytttcttctttcaccataagttttaggttttcaacttgttgagtcaattttggccattatatctttatgttaatcatctagtttactgagatttctgttttatctgcatatacgaataattgttattttatcattaaaaatttccagactgttgtatggttttttttttcgtgtgtgtgtgtgtgtgtgtgtgtgtgtgtgtgtgtattgtagaatgaatttgacagaaagatgcttatttcatttgtattcccccccaaaacatctgctattgggtttatcatttttactgtttttattttctttaaatttattttccttttctcttttcttagattcgttttagctattctaattttttgagttgaagagttagattttttctaagaagaaaaacatttaaggttatgagttacgctgtagcttgtacaacccctaaactaagttttctatgcattgttctcattttcattattattgtgatgtttttgagacatggctggactgcagtggcatactcattgctcactgcagcctcaacttcccaggctcaagtggtctttccacctcagcctctttagtagctgggactacaggtgtgtaccaccatgtcccatgaattttttgtattttttgtagagatgaggtcctactatgttgcctaggccggtcttgaactcttgtctcaggtgattcacctgcctcagcctcccaaagtaagccactgcccccagccaattttcattattttgraaatagtttgatgttatatytgttttcctctttgacttaatattattttatttttttaaaaagaagctctgaccaagcaaattactagtctgtctctttattttttttygtagaacttttttttggttcttttttgtcctaaaatagtttctgaaaattaggccatagaagaattttagattcttctatgcaacaacagaatgcaacaacagaagtcattgcatttgaatcatttacttcacttatttgatcctagtcttatgtgtctcagattaaatcaactggctttgaaaatccgagttttatgccatttaactctgaatgaagagtgcaaagtgaaagacttgggaaaagggacgaacttacccctagaagccckgggctccttgcctggcagatggtcagaaagaactgcactaccttccattttcaagtccctaacagagaggctcagtggcagaatgggaattcttccatgaggactcgacagtcaaccaaagttgaacaattacatgtagaagagagtgagcaaatagagggcttgctgaatgaaaaatgattctgaattctacaaaaatgtaaggtctttaatctggaccctactctctgaattgtgcaggctgcactgaaacgccctggtgatctgacgtttaggaagaaagttaaagagttggtcagatggatagttcataatgggtrattccaktccaagagcccattgcccagctttggttttggttgtatcataatctccaaccattaatcccattgacagagtggaatatttcagttaacaagacaatataattaatagagctatcattgaacycaaaaagggattaccaattttaacataattattayaaaacgtatgctaacccccaaataatactatgcatgatgtgacctctctttgatttggaagakcctgtagaayctcagagggtgtcaaggcatcactttgagtatcagttaggattatttggaagtatagatgtatcagatgatagaaatgacaagcagtactgcccagaagggagtttcaaagaggatgacccccaaacggaacttcctgcagctgcatttaaagaattgtgttcatgtgtggtacatgcattttaaattcccaacattattgacatctggtcacctcatctttgcatattgtccattttattccaaaagcccttggcattttatctgggatagcatgggtaaactgaaacatttgacctcgactttccccttttgtctttcatctgtttctggttcattggctgggagttgcacctgcgggaggacgtctcatgcagacttgcacatatacagggagtgttgcattgaaggtctttgctggaccttctgttcagaaggtgattttcaaaagcgagcaatgctgccaatgcagcttgcttctcttgacagattgagaagtccagcttcaaaagttacctgccatttaagcaaggagtttgtcaagagatcatggttcattttattgaaaagactttaaggagttgtaggatttattcatagattgctgagaacaatggcaatatttttatttttacagagtttgcacttctgatttcaggttaaacgctaacttgtttttagtctgcttaggggattgtgacttgaaaatttttatattctgatgagcttttttgtagtgtccacaatgtataaaatatttcctaggtgagatctatgttctccatttattgatgcattgcagaccaatttgagtgatgtgtttaaggaaaattcttcctagtttaataagtaagctaaaaggttttttttttatatttaatgtttaatctctgtctcgtgttatttaaaattagcctgcagatactttccctcacttctgtaggctcctggaagataaacattcaaacagcggaacaaacaataaattaaataaaaaataagaattatattttcttaatttctgcctcagaatttgcgttttgtctttctgcctttttttttttggatgtcaaaatagatgagatcgtatactctatggagtataaattgttactgaagtctttatttttggtaatgaatgagtaagaataagactatctctgtgattattaaaatacatggaattatccaggaaattttccttacaaggaattaaaatattcctgtattaaagagaagaaaagcctttcccaagcggctggcgaagacggcagaggtgcaggtcctggtgcttgatggtcgaggccatctcctgggccgcctggcggccatcgtggtaaacaggtactgctgggccggaaggtggtggtcgtacgctgygaaggcatcaacatttctggcaatttctacagaaacaagttgaagtacctcgctttcctccgcaagcggatgaacaccaactcttaccgaggctcctaccacttccgggcccccagccgcatcttctggcggaccgtgcgaggtatgctgmcccacaagaccaagcgaggccaggccgctctggaccgcctcaaggtgtttgayggcatcccaccgccctacgacaagaaaaagcggatggtggttcctgytgccctcaaggttgtgcgtctgaagcctacaagaaagtttgcctatctggggcgcctggctcacgagtttggctggaagtaccaggcagggacagccaccctggaggagaagaggaaagagaaagccaagatccactacgggaagaagaaacagctcatgaggctacggaaacaggccgagaagaacgtggagaagaaaattgacaaatacacagaggtcctcaagacccacggcctcctgatctgagcccaataaagactgttaattcctcaaaaaataaaaaataaataaaaataaawaattaaarawaaagaagaaaaatattwaaaaagtatttatttgtaactagctccatctagtgagaattgyttaaaattacatgattcatttatgaatctcctttgaactagtaacattttttgagagcacttttccattttaaagaactataaatcctgtaattttatgttttatagaacccccaattatagactagaagagttttggtaattatagagcctattttagaaattaatttatggtgaaaaataaagatatacctaatgaattagtcacttctcaacatcatcactgcaactttttggagaagcagtaaagtggacagtaaagctaaatcctggtagaaaagtaaaatactgayttcttgagacgagaagtgggtgtggggcataatagaaagatggtgatgagattgctccagactttaggatgagaagaataaccttgttaacagttcacaaattgcttgcatttgtttttgcatttgcttttttggacatctttgaggtagctatttcagtcgactcttgaacaacatgagtttgaactgtgtgggtctacttttacacggagtttttctctttrctttttttgagacaggatctccctttgtcaccttcgctggtgtgcagtggcgtgatcatggcttactgaagccttgaccttccgggttgaagtgatcctcctgcctcaacctctccagtagctgggactacaggtgcacaccaccacacccagctaatttttctatcgtttatagagaggttttgcattgttgcctaggctgtgcggaytttttccaacaaatgttaccccgagtgtgcctgcctcgcctgcctccccttccacctcctccacctcttccacctctactacctcgagacagcaagaccaactcctcgtcttcctcttcctcctcctcagcctactcaatgtgaagatgatgaagatgaagacctttatgatgatctacttccatgtaatgaatartaaatatatattttctatttttttcttttttcttttttttttttttttgagacagagtctctgttgcccaggctggagtgcagtgccrtgatctcaactcattgcaacttctgcttcccgggttcaagcgattctcctgcctcagcctcacgagtagctgggattacaggcgcttaccacacctggctaatttttgcacgtttagtagagatggggtttcaccatgttggccaggctggtctcgaactcctgacctcaggcgatccacccgccttggcctcccaaagtgctgggattacagacgtgagccaccgtgcccagcgtaaatgtatattttcttcyttataatttccttttctctagcttactttattgtaaagatacaggatataatacccaccacatacaaaatatgtgttaatcgactgtttctgtgggaaggcttctggtcaacaataggttcttaggttttttgggagtgccccctagccgccacactgctcaagaaccaactgtgttcccttattttgcaggtcaagaaacagtctcagaaaggtgagggctgctcccagtgctgcagygcattgtggatgctgtgggtgctgcccggattcccctccaggactgaggcactgctcattctccagccgctggkggagccgctgcctgwcacctctcacctgtgctgctttcccagtgttgcttttagccaaagaaagacactgcccaagattaagctccctccctagggaccgtgcacatccaatgactggttcctgtgaggtaccaagacttgtccaccatgcctcagtttgcaatatctcagaagggccatcccagatccagagctctccatggacccactgaggctcagctcgacttttctatctgccaaattctttgtctttcaacacttacaggtgctatttctgcgattactctccaataacttctgtatagaaatctcggtgtctcmgagtgtgtttcccagtgaactccacctgtgacagctggtactggatgtggtcctaggaactgactctaaaataggatgttgttgctgcacctggctggctgtaataaggcccccatcactggtagagcgcyagcccccatcataggtgaagcgctagttgccccaggcatccatgccagtgccagtgttcacatgtttacaggtggcaaactgggacaygaaactggtagaaggggataggctggcaagtgacacatataggaggttgagagtttcaggggaaattaagtaaatacaagaattttggaattagatgactgttgttggaggctatgcatgcattggagaaagacaatgactgcctcggttggttacttaaccatgtgaggggaagtatgaagccagaacttggctgtatataaatagaatctcatctccggttgcctaagggccgtacagctaaggacttatatgaatagcaaagttccagaaattgttgaattcttaattctcaactccagccagttctgctatatgtaggtcagggtgctgatttggaagcagtaagattctgagactttggatggrgacacttggtccaagcactaaaaaatcttgaatcatcaggtcccgctggacctgtgggcctgcagaagtgacccactcctctctggtaaaggctagagcctctggcttatttgaaggrcatatggaggatcctgtcttgcaagaaaaccctagtttgtttgggatggactgtagaattgcgtaggcgaataaagagtaccactctggtttgatgtggggtggagtgctgagggggtttgctggggtgtagttgtgagggtctcctaggaggtcagcagaattgataagagcaagagaagtagaattaatatctttaattgtgtaataagaataatatatttaattgtgtaataaygaatatctttaattgtgtaataaattgtgtaatatatttaattgtgtaataaagaatatctttaattgtgtaataagggtgaaaagggattttgtcagaatctgatgaaattcctgaggggttaatagatcccttttcatgtaggaataacaggtgaatggctactagggctgtaataatgaaaggcaagattaaatgaaaagtgaagaattatgtgaaagtggctttatccaatgagaatccacctcagattcactgtacaaggtcagttccaatatatgggatggctaacagtagatttgtaattactgttgcatctcagaatgatatttggcttcatgaaagtacggagcctattaatactgttgctataactgcaaatagaagaatactgccaatattccaagtttctaggaaagtaaatgacccgtagtataagcctcggcctacatgtaaaaacaggcagatgcagactatcgaagcctcattagcatgtagcataattataattcagcaataatttacatctcagcagaagtgagtgactgaagagaaggyggtcagagtatctgacatgtagtgtatagytaagaaaaccctgtgatgatttgaaggaccaggcagatacctagaagcaagctgagattttaccatgccgagatgtttgattgtgcaggtggctcaataaacagtggttaataatagagaatgtgtttttcggatgttagtcattagagttcttagagttgaagcacaacaatgatttttgatgtcattagttatggttatatcccatgtaagaattatgacatacactgtattcttattaagtattattcttattataggctttatgggattttcttcaaagccttctcctatttatggaggcttgggattaattactagtggaggtgtgggttgcmgtactatgttaaattgtggtggggcttttgtaggtttaatagtttttttgttttgttttgtttgtgatggagtcttgctctgttgcccaggctggagtgcagtggcacgatctcagctcactgcaacctccaccctctgggttcaagcaattttcctgcctcagtctcccgmrtaactgggattacaggcacgtgccatcatgcctggctaatttttgtatttttartagagacagggtttcaccatgttggtcaggctggtctcgaactcctgacctcatgatccgcccgcctcagcctccctaagtgctgggattacaggcatgggccaygtgcctggcctggtttaatagttttaaaattttatttagggggaatgatggtggtttttggttatacaatggcaatggctactgaggagtatcctgagacctgagggtcagtgttgttatttgggatgcctcactattagggttgctgttagagttggtgataattatgtggttaattgattatgatgaggtgggaattgtaactgattttaaaaatatggaaaactgggtgacttttgaggttggggaaatagaattactttgtgaggattctatggatgtagctgccttgtgcagttatgggtgttggtgggtggtggttgctggttgatctctgttagtatctttattgtgattgagattatgtgagggaatagggttaaataattaagaatagagttaggagagatgggataaggaaggagaaaaagtagagcataattagatctttctggttagatacaatggtggaggctatcatttgaacctgggcagtattttttggtgttgatttttctaatcaaatcagttctagtngaagagaggttaggttttgtcttgcatggaaatttgagtgtggtgttgtgtggtgtattgtgattgggtaaaatcctaatatattggagaaattaaatatttgtgatgggtgcttgagtttgaggttgttagttacaaggttaagttctattgctagtgagaagcctaaaatagttacgctgagggttgtgagttttaggtgaaggagcatagtcatttggggaactgatattggaataatattgttggagattaaaaatccagcaaaartactaccaattgttaggcatttgattgaattgattaggaaggggttgtttttgttgatgacaattacagccgtgaagtgaggttgtcctaacagtgcaaagaaaataattcgggtgctgtagacagctgtcagggaggaggcaatgacagtaattaaaagggctcagacgttggtatgcgacatatttgcggtttcgataataagatctttggaatggaagcctgtgaagaaaggcattcctgtgagtgcaaggctgccggtaataagtggggaagagggcctgcagaagtgatccactcctctctgttagaggctagagcctccggcttatttgaagatcatgtggaggatcgtgtcttgcaagaaaactcgtgctctgctcaggattcagctctgcctcctctcttggccatcagacccgaagctaagggcaagttagaacataacccagccacagaagtgctgggcccgctaagaaaacaaacctgctaagaaaaaaaagtagttgtaggcctggrcaatgtgaaccatcaggaactgggggaatatgtacgggactggatcttgagggtgctgaaccaaaggaaacaaaatacaaattggaaaagggagaactttcttttacggtacggaatttacaccctgacgaggaccccgggagatggcgccaacatactactacatcacaacctctaagaggttgcctcttagaggcctggaaaagtattgacccacgttaagtgaggtagaattggaagaactgccacagcaaatggtgaaggaaggaatcaggatgtccagagcagtgggcatgccaaactggttagactatagaggccagaaaayccaccccccacagtgttccctaggagggcccagagcatactccgtttaccggcgtgctaagtcatggcctggtgaggagggcaccagcatcacagagaagccctggagttgccgcccagcattccaaagggcaggctgatggcaggagatgctgttacagcgctgggcttgctgccagcaatggggatgatagggtcccgaaataacagaggccggggggcagagcccaatgctgcaagccaggtaggcacaactgagaccgtgttggctgtgaacactaatgacaggatatctgggtcagaaaaggctttcactccactccagaatcataccacattgcctcagtgaagcttaaaagtcccctgggtgagatctctatttttattttaaattttagttgctgattctggttttctggtattatgattttttatcaaacagacatcttaacagcaggccttttaaaatctggattctaagccccagtgcccgatgtcatctattgcatggaattgatcaacttcaccctccatgcatctagatcagtgccatccttctggattctagatttgccttttttttttttttttttttttttgagacagggtcttgttctgtcacccaggttggagtgcagcggcacaatctcatctcactgcagcctccgcctcctgggttcaagggattctcttgcttcagcctcccrggtagctgggattacaggcgcctaccaccacacctggctaatttttgtatttttagtagagayagggttttgccatgttggccaggctggtttcaaactcctggcctcaagcgatctgcccacctcagcctcccaaagtgatgggattacaaatgtgagccactgtgcccggccaatttgccattcttatgggaattaagaaataatcactcgaattatgtcatgtactctgggtcagatgaggaataaggaaccctgttcggatgaggaagcccagttgagaatagttgcaagctacctatatccttaacctttcaaacgatgtttcctttgctttctttcctctgaagactcagttccccttcaatctcaggtttagtttttgttgtggttgccattctcatttacctttggtttctcaagctttaaattgcgctgttgtcctttccatagctttcatctctctgttctctcaccctttggcaaaaatccttcctccctttaggatcacaggaactcccttgaattgtcttctgtttatgaaaccttcttttttagtttttttcgagtctcggatatgtattaattagtgtaatctccaaaataatacrtcaagatgatttcatgtattttagaggagaaatgtttcctggttaagtgggaaattgtgcggatggctcctggaagagcttcattctaagcagctttagagtgaaacatttcatttagaaatctgggccttcttgcttcagtttgctgtaatccacattcaccgagttgaacttgtactgatcattggcacccagtttgtctcagggtttttgggttattctttctgcccctactaacatctgatygaacagtgccagatgcaagacatacagtgctgctccaggacctccagctccaataaatattaagaggaggatcaagcttggaagcttcttggcctggccgaggatctggtggaggatgtttgccgcagaggtctgattggaaaggagaaatgctatgaagacttcttaagagatgcctcccctgaaggctgtatcttgactgagccccttcccattctccttcctagttctttctttgccttcagggcactgattattttgtgacactcatataaagacatatacataacctagttaattatgtatatataaaattttatgtaattatttttatgagtagtggatataaatctcattcctcagactcaggtatgcaagaagtacaacttaaagtttttattttaggccaggcgcggtggcttacacctgtaatcccagcactttgggaagctgaggcgggtggatcacctgaggtcaggagttcgagaccagcctggccaacatggtgaaaccccatctctactaaaaatacagaaatcagctgggtgtggtggcaggtgcctgtgggcccagctacttggggggctgaggcaggagaaaggcttgaacctgggaggtggaggttgccgtgagcagagatcgtgtcactgcactccagcttgggcgacagagtgagactctgtctcaaaacacatatattttttaaaaatttattattatttttaaacagggccttgctctgttgcccaggctcgagtgcagtggaatgatcacatcttaatgcagccttgaccttctgggctcaggtgatcctcccacctcagcctcctgagcagctgggaccacaggtgtgcaccaccacacccagctaatttttaaattttttgtagagtcagggtctccctatgttgcctaggctggtcttgaacttctgggctcaggcaattctcctactttggcctctcaaaatgttggaatcataggcctgagccaccacacctggccaagaagtacaagtttaaaatttttctgtaacagggaacatttctgactctaagccttcattcagcccaggtatgaagcttaatcccagtcatatctgtggctccctactgctgcctctggggttttgtcaagttcagatggttctgcagagctgccctggtggcaactgctcctctgcttctgccaggcccctccatctgggctcaggcctgggtcgtctttcccacctgcactccctccgtggctaatcttctgcaattcttggatgctaagtgtcatctttgcgtagatttgtccatagcctctagggcagacttctcctcagaactcaggatgggtgtatccatctgcccacttggcatttccacctcaatatctaatttctcttttcttttttttcttcttttcggcatgttgtccagacatctaatttcatcttggatttacctgaaccaaagagaactcttgatttcgaccctttgccttgcccctctcccatcttcttccgtagctctagctagacactcatgagctctccctggtgcttgttttccccatccaggcattcagcaaattcttctggccctactcccaaaatatatccccggtccatccactattctttattaccagtgctttcaacctagtctagagtatcacctctcacctagaatactggaagatttcccttacttgtctttaaacaaatttttttttgagacaagcttttgctctattgcccaggcgggagcgcagtggcgtgaatatggcttaatgcaacttcaaccttctgggctcaagcaatcctcccacctcagcctcctgagtatctgggaccacaggcatgcagcaccatgtgtagctaacttttaaattttttgtagagacggggtcccgccatgttgcctaggctggtcttgaactcctgagctcaagcaatcctcccaccttggcttctcaaagtgctgggattataggcatgaaccaccgcgcccaggcccttacttccctttcggcttcatgcttgttttcttataagcgttattccacacagcagccaaagtgttttgctaggactaagacttggactaaaatggtgagactatgtcgtaactcagcttaatagcctctgcttcccgctaaactcggaataaaaacctaagttcttcctcaccgccttctgttatagtgaactggggtctgcttgcctggtgcagtaaaaccagacatctaccctgaggttttgcagtgacagaaaagtgttcatttgcagggcaccaagcaaagaggaccaagcagttaaatgctcaaatcctgaccttcccaatggtttgcaggcaagggtttttaaaggcaggagtaaatttcaggaaagcagaagctacaggcaaaatcgtaaatcaatacatggagattacacattgacttaggcctaaaaggggaggatatcttgaggggggcttacaggtcataggtagattcgaagattttcggatttgcaactggttaaagaagagaagctttgtttaaaaatttgggatctgcagaaaaatgttaactggctgggatggggtgtgactttctctaagccccatcaggaagaagttttatcttcagtttcccccttatctgaggtctaaatgccagtggatctgttcggtgtggttcctcagtgggggtttctgaaagacaactcaaggacgtatgttcagctgttgtctttagttcctacagggaaagcaaacatctctggaactcaaacgtccttggctcttgttttaggctactattaccttcttatttacttctggggatagtgaggtgcctggaatttctcttgaaggaacttagggtttttctttattttcatgcttggggtcttcaggctcctaagaaaggggcccctgttgcagctcagttccatccttgtcactccacaatcctgaggggtataggggaacagaccactctggctacttcctgctgaatyggggcaaagatcggggactaggatatgaagagagaaagtttctataatagcytggagttcacaatattcacgagtcccaggcatggcaccgtggtgctgaactatcattgtattagttgctttagtcacagcttcactacaacattttaatgcacatttggtcataatagaaagcataagcacaattaacaagactgacatgcctagttttagccacccagaaaacatagactgttttccacgaggaatccaagaaaacaraaaagaaaaccagtcctcagagacagtctgggaggctgttgtacccaagtggcttgctctctaacttttcctagatgagtttctacctccacggattcgtttatgtaaatatagcacgcggtatttgcaaccatacatactcctccctgctccgctaagatgtaatctagggctatcctattatctaagacaacctgacccaatacrttaattcctctcttctgggctgcgattgcaatttccttgacaagaattcataaagggagagatttctaattctgcgctcatggggcaccgttctccgccaaggtaacaaagtttatctgaagaaatacccagctctgtcttcttggtaccaggcaagtatgaatctgtatatctcgaaagtgagttgtggaccatttagttttaccaagtaattttagggagcttttccagtgcttggtttcagcagttttgtgtacagaaaactgggataaatgagtatycttacaggcaagttcctcctatatgctagctgtcaatacattcatacatccagagggtttcttgttatcccctacaaacaaatagatattctgaggatgcacagaggaacacagaaagattgtatagattaagtttagaatcttgtagcagggcttcgtggattggattaaaccaaggacctggtaggtctatttccgagtgttgctttgtagtaaggagttgctgaatttaactcgatccaagatacagcttggaggcattcctgaacaggctgttagggaatsacagtaataagagtaagggcatctagaattcccatcaatctgatagtaaactaaacaaaggggaggcatatgattccttcttcggcaaacttgatcaaggtagctcctagaagcaagggacatgtaatggtatttctctctctttttttttttgagatggagtttcrctcttgttgcccaggctggagtgcaatggcrcgatctcggctcacagcaacctccgcctcccgggttcaagccattctgctgcctcaggctcccgagtagctgggattacagrcatgcgccaccacgctcggctaattttgtatttttagtagagatggggtttctccatgttggtcagtctggtctcgaactccggacctcaggtgatctgcctgccttggcctcccaaagtgctgggattacaggcgtgagccactgcgcccggcgctatttttctgttatgcagtaatttgtagttgagtcagaaaatgagaaattagacagtgggttaattatggtgaaatcaacaggcttggggtggctgaggctggagcattgcttgagcccaggagtttgagaccagcctaggcagcatagtgagacttcattcctattaaaaaaaaaattagccagacatggtgygtgcctgtagccccagctacttgggaggttgaggtgggaggatcctgtgagcccagaaggtcgaggctgctgtgagctgtgattataccactgcactccagcctgggtgacagagtgggacactgtctcaaaaaaaagtggcaataaagtggcaataaaggcactctcgttatcactgtgtatggggaatggaaccccaaatctgaggaaaatttctttcagtaaggcttttgaayccctctcagtgtggcagggaaaggcttgcacctgtccaataaatgtgtccaccatgactaacaactaactaaaattttctttagctcttggctttacgttaaagatccaaatcctggctaccattccccaggtcctagggaatattatagccaggaagcattgcaataaaaaaaactttttctttttcacaagctcaaagctaaaagcagcccaattctgcagaatacatcctaccgggccacaaggaggaatagagcacacatttcccattttagatgacaaccttaggtgacaaacccttaatgcctcagctgggctttgaactgtgtttaaaccaagtcaaacaattttaaacaagtccaaaaattttaaatgtgatttcccaaggtcccagtcccttcagctgtctatggggtatctcccacccaacgctctgaagaagcagagcgtaatatcttgcccaagcaatgccaagatgtcttgccaaagtgggaccaaatgtctgaaggaaaaataccttgaggccgttgtccatgagcctgccacttaacggcagacgtcttcccagccaagtgccttgtttttaacactgcaatagtcatagcaccccacgggccagtggtgcctggttatcagccaaacacacagatccctgaatgaaataattcgggcagccgctagrtggggtctgagggtgactatgactagaggctgatgtgccataagcgagatgcccacttcggacttttgtcccttcatggttgttaattgttttagaactgaactaggacccttaccaggcacaataaaaccagatttctatacggaggctttgcagmgatagaaagaaaagctaagatcagggaaggagagaccaaggcaggctttttcattagcaatggtgttgagcaggcagtttgggtaatttcttttctttttgtttgakagagtttcactcttgttacccaggctggagtgcagtggtgcgtgctcggctcactgcaacctctgcctcctgggttcaagtgattctcctgcctcagcctctcgaggagttgggactataggtgtgcgccaccacggctagctaattttttgtatttttagtagagacggggctggtcttgaactcctgacctcaggtgaaccgcccgccttggcctgccaaagtgctgggattacaggcgtgagccactgcgcctggcctgggtaattttcttctataccatcccaggtttaaattctggccatccttccctgtctagctgaaattccatggtctgaatgaaatttttgtgtccccacttgcaggcaccttaccatcctctgaatttctcaagtacactttatatctgtgttgtctaagcagatggttcctgtctttttccctcaaccagaccrtcagccctttgacggctttctttctattctttttgactccctttgtgccctcccctattccctgacccactccatcccgtaccaggcacagtaatagatactcaacaaatatgtcattaaattgactaaacgatcccctgcagccacatgcacctgcctgtgagctgggtgacaggctactttattatctttcccattctttatcacatgccccctccaaaaacaacattctaagtgctgtatttctgggaggctcagagaccatttatttatttttttaaaggtttttasctgcattgtgcagtggaggggcaaattctaggccagacctgtggtcagagcagaaacgtagagtggtctgtgctgctctcaacactcattccaggatcagctgctgatggctgtatcatctctgctgcaaggctttgagaagagctgtattcgggcagctctacaggaaaaaaaatgtgatcacagtctcccaggttttctcaggcagcagcagaaggtagtagcaaacaacccagacagtggtgacctgtagctgtttaggraaaaatataggtgagtgaatgaaggaatgagtggaaggaaggatggatgaatgaacgagatcacaaatgaacagcatgctgtagtggaargaaacctggagacatggggttggcaycctaacattttccttatcctttgtgtgatgttggaaaaattgcctgatgtcttctcagtttcctcrtctgtaaagtggggcaaaagtacatactcctcagggtggttgagaagatcaaaggagatgatgtttgtgaaagtacctacttcctttgaggccatgtctaacgtaaccagggtctcagtggacacgtaagactgggtgtgatgggtacgtgtgtgtctgtcccccacacgtggggttttaattgagtgggtttcaatgtggaaggtgcccactgcatcctgtctcccacccygtgatgatcgccagctatttcagatgtggacagcggtgtccctgggggctgggcttgcactgcagctggagttttagagattctgctttcctggtgagctcaactgtgtgaaggctgatggcggggttcrgccagtggcaccatccgtgtttgcctgtgtgggaagagcaggtgccaatctgatgagctctagggtccagggcaggcggtttggcccagctgcctgcaacaacacttaatctgggagatcccagctgattctctcaaatggagacttgctgaggccatgcctcatgttccaggattcctggggagctgctgaacctggggaggggtggaggtacctgacccaagttcccacagctactctgtccctgtgacttgaggttgcaaacttccccagggctgagggcacgctctgctgctctgtctgaacccccagctctgcctcctgagcagatactgtgtggctctgaaccagttgcttaacgtctctgaccttcaccctcattggtagacagaagacaataatacctacctgaagagattggtatgataatttcatgttaattaccattattgagtactttctaagagtgctaaacactttataaacactttacaaacatgatttcaacagtaaacctgagaaaggcggtatacttgccattttacagctgaagcagctgaagctcagagaggttaggtagctttctctgggccgcacagctggtaggtttcagagcccgttcataccagctgtcttcctctttgctgccctcaggttgcttcctgcagtagataagatgagatgcgaagagcactcggcctgcagttgactggatctgaatctgacagatcctgtggaatttgctgagagattgattgggactttctggggactggaaaaaatggggatggggtagagaggagattagtaagcctgggactgtgctccccagcctttgtaggcgaatcatccgagtccgggctgtgggggatttttggtagcaggctgttgactcttctccaggttcagtcggagggggagggcaggtaatgatgctgaaggacacagcttgttctgcaaatttgtgaaaagctctgcaggctcacatcccaacgtcattggacgtgctctgggttccctgtactatagggaacatttgagaaatgtcatatggatgtgcttctgccattagggagcgcccagttgtcagacagacatgggcacgcatatgagtgattgggagcagcagccaaggcagtgagcagtacggggtgaggatctgcaggacaggaggttgctgcaggtgactcatcagggrgggcttcctggagtaagtggggctgtggctgaagcatgggtagaagtgaccaggagagggatggcagctgaggtagtgagatacatcaaaagagagggcccttcccaaatttgggccaagggctcattgtattatcctgatcgacgtctccttcttcacatttttaagtatcccgtgttggccactctgacaggaagccactgacagagacctgggtcctgcctcctgatgtctttccatcaaagacagacaggctggtgcccacttatgtgaaatgtcacctgcaaaacattctatgaagccataagcagcagagaaggttctggtgcctgtattttccaccttctccttataccagggctacctgttggcctcagaacagagggttcttctggccgagagacttcagatgtggctttgccttctttcctccctcaccaaggacactcccagtggacagccagagccactgcagcctgtcccgcccgaggcaggctgccgtggaaggactcgtgctctcagtccactcttctttctctgagcttggcccgccctcctggttgggctggaattgaaaaactggcttttctctctggaacaaatggcggttttatggcttagggtttcagctctctgcaagtctcccctgtccccaggcacagagagggcagtcagcttgcccccgccttccaaagctgggggtgggcattagcacaactccttccagctgtccctgagtccacacagccagctgctgcctgctgcaaaaggacattgatgccaccgccatctgcagctcatttccctggaatcagctttgcaaacaacctttttaatcacgtttatgacctcagcatataattgctgcaggtttgagtttccagtgatgatgaaaagcttggctataaagccagcaggttgggtttcaaaatctcagcctcattktggatcctttcctacctttttctcttccttccctcctcttccctccccctctaatcctcaagaggactaggatattccttcattttcctgtgctgtttatggtttacaaagcacttctattgttcctgtaaggaagatgcattatccccactctataggtagaaaaactgagagtcagagaggccaagtgatctgtccaaggctcctggttagaagcagctgagctaagcctgtgatcctggtcctggatctgcatcctttgttgctctcactctgcggggcagccttggtctggctggcatgacaaatgtccttcccgggcatctcagagtcctctcctgccccacccccgggacatattgggctgatcagtctgcagctgccaggatccagcctgctttgtgttgaattgtggtttgtggcttttatttgttcccacgatgccctgtgtgaatgtcactgagtttgtcagggccggctccttctccttggctagctaggaaaaccgaaccccagatggtgctcttccccagaaagcttggccaactctcccatgtctcatggggagagccctggctgggagtcgggactcctggctttagatmccaaggccaactagtctatattccctattttagggtaaaatcccttgcccttatttcctcactcaacaatggagttaaaggttacctcttcaaatcccagtccctagtggggcagcgtgagggtccattgggagagttagcagggagcagcagcggatgcactatttagtgcttagctcttaggagcagggggcaccgaaggtctttcgcccatgggtgtgctggctgtgcatagtaaacatgagtagcyggcgggactggccyggtgtctgtacagcaccttcatccccaagctgtttcctcacttcaggttctctctggtttcccccaaaacatgaccaccccaaaggaatgacctcccaaaggaggtcaggtgkccatcttctcagcctggagaggggtatgtgggttccgcaggcacccagtatggcaggacatggctggcattagacctgagggcaccctgatttgtcccttggtcctgccttctgttttccaggcctgactgtcatcctgggagagaagagggcgagcacactctcctccctcatgaaaaagagggagaaaggcaaggcatggaggggtgtgggtggaaagcgagtggcagggctgttttcacatccttgctgggaacgcgtggcaggagactgtctgactgggacgtggcccctgtctgagccaggcctgcctgtgcatgctgcctccctgacttcagcctctattgtctgtgaaaggcacacacttgtacacatgtgcagaggggacrtcccctgttggtcctaattttyaccctcattaatatgatcatcatggcatctatattcccatttccccagccctccgtggtgccctgccaggcagcctggtccatgtcccygttctgctgcctgaggtggatcccagcaaacaggttctgagggatgggggctctcctttgtttgccttgtagaagtagcagcagcagtgacttctgaacatctctttgggggctctgctgggctttcatgtgatgtgaactgggtaggggttagttgcataggtgcagacagtggcgttgctggggctgaaacccaggagtcctggttcctggtctgctctcttggacttggtcttcttggagggttatcagagcttctgacagggtcgtgacaaggagggtgaagaagaaggcgataagcaaggagctgagtgggggtgaggaaaacagccagggatgtggaaattgtgaaatggaataaaggcaaaagaatgctggctgtagggcaggaacagggagggcatctccaagataagaggtacagagaagtttgacaaagagggacaggcatcatgaccttatgtagtccccctgtttctattactcgcctttttcctcttagcttttatatattgtgggaatatttaaacatgcacaaaaatatggtgaataatgtagtgaacccctatgtcaccctcacctgatgccacattctactgtgactttattccatctactctcactccttttttttttccctcctggagcattttatttatttgagctgaggtctcattctgtttcccagtttggagtgcagtagtgcgatctcagctcactgcaacttccacctcctgggtttgattcttgtgtctcagcctcccaagtagctgggattatgggcgtgacaccgcacctgactaagttttgtatttttagtagagatgggtttcaccatgttggccggactggtctggaactcctgagctccagtgatctgccagcctcctggaagattttaaagcagatttasggagatacgcaggtggggtatctccctgcatctttccccgcctgcttgtgtctggctgggtggattcacctgttcctgggcctgagttgatgggggtggtgctgaggaatggtgctttcttctggtgggaggtaagtaggtgcagaggccctgggcttcctgctattagccagctctcattttcggaggtatatacactccccactgccagccctcggaggagggaggcaagagggatctaagccacgatgctgctctctgtgtcttgggatttctctraatgactttcttctctcagtcacgtagctgcaggcagagccagccaccgctgagagcaccagcctttccctggtgcggcatgctagcccctcccagcgtctctcctttccccagctctgcattaggaaggaccctcttacaaagcaagagaggtgttagacagccagcttcctgctgccttcagygtatggggatgctgagcttatccctggtctcctggggaggaaaagccaggatctttgggtccagttccctgccttcccacggtcagccctcagaggatgaggccctctgtaaagcgtactcgacgggaagactcggtctgacaggcacacttttggatgccacactggactttagtgacctaacaatacagcccagtatcactggcatcatcctcttccccccttctctccgggatgggagctctgcatactcagccctttagtagtgtcccctgtggtcattactgccccctgctgagtcccctcgggtgtgtggccgtgtgtacctgcctcccctgtgtcatcctcacctgattctcatggggccctggaaggaagtgatgaytgtttcattttatagctccacagcagatgacacccaaggtaagagcggttmagttactttgccaaggtcacatggctggtccatgagggaggagacatttaaacccagggctgtctggcttggaacctctgcttctcacgctatgccagcctgtctctactgcactgtggtattaaccacgagcacaatattaactgctgtggtttaatgtgtgttttatatattacagcaatggcactaagatggcaaggatgtttgagagttrtggcttgctggttgktgctgtaactaggtttgtacatgaaatattagcaatcaataaacatgagaaggaatgcagaacatcactagtaatcaaagaaatccaaattatggcaacaatagtatactactttttgcctttcttttttctttattattattcttttttttatagagataggatctcaccttgttgctcaggctggagtgcagtggtgcaatcatagctactgcaggctcaaatttctggcctcaagtgattcttctgcctcagcctccctagtagctgggactacaggtgcatgccatcttgccttccaaatgtgcacagatttttaagctgataactgctaacatgatgcagccctctactccagcactggtggagtatagcgtgtcaaaacctttgagaaaagcctctttgcaaagggtactacaagccttaagaactaaggctaagggyactaaaggcatatctttggaccagtaactgcacttctaaaactccatattaagaaaataataagaaaagctatcaaatatcttatgtgttagagtgctcattaaagagcaatttataataaaggaaaatcaaaaacaatttaaatttcttacattatgggaacattttatttatttactttttattttttgggacagagtctcactatgttgccaggttaacatgcaattgtgtgatctcagctcactgcaacctctgcctcccaggttcaagcaattctcctgcctcagcctcttgagtagctaggattacatgtgcatgccagcatgcccagctaatttttgtatttttagtaggcatggggtttcaccatgttggccaggctagtcttgaactcctgaccatgtgatccacccaccttggcctcccaaagtgctgggattacaggcatgagccattgcacctggcccattaggggaacattttaaataaagtatggtatgtgcatggatgagtgggtttgggaaactattaaatgacacagggaaaatgttctcaatgcactgtgaagtttacatactatgtatatatgtataattatgtattgtattaccaacatacatgccttaaagttttctctttttatttatttattaatttattttttgagacagggtctggctctgttgcccgggctggaggtgcagtggcaccatctcagctcactgtagctttaatctcctggactcaagcctcagcctccccagtagctgggattacaggtgcgcaccaacatgcctagctaatttttgtggtttttgtagagacaggtttcgccatgttgtccagacttgtctcagactcctgggcttaagcgactcacccacctcagcctcccaaagtgctgggattataggcgtgagccacaactcycagctttaagtttgctctttttggtgtacagttcttggagttttaaaaaacacatacagttgcaggtgtgtccatgtaatttcaagtgaggaaaaatagaatacagtattttcctaagttttgaaaacatatatgttttcctcatatggctggaaggagagcactaaagagtaatcaaagtaagtggacctggcttagtggccctggagaaatggcgtgcaaaattttaaacaaacattttcctcctgggcctcagtttgttttccatgagataccatgagtgccctcagtccygctgtagtcagkgtrgtaggtgtgggctccaggccacgataggccctgactgtgggcagaggccccagmcttaccagtgtgcccagtggggctggagaggcggtggggcatggccagcctggggctctggtgtgtgtctcttggctcagtatagaatgaaaggctgccagcyggggccgtgtcctggctggagagcagtggaggrcaaagtcctctccctgcaccctcctcactgtctctgccaggcagctgcttcagagttggggcccaggaggtagagggctcctagagaagaagtctgccagttcccttaaagaactagaatcctccgtcttcttctgggtggggtcagctaatcaggcgagccaacattctgctgcccagccctctcgccgcccccctgcctcctctggttcccgaggctggcttcatggatcccctctcagagcttccttggtcccgtgagggtggcgttattcttactttgttcccagtagggagaagcctttgtgtgtagttggctgagcatctagaagctgctctttcaaagtcactagccggggtgggatgaggatgggctgctttagggccagggggcccttgccagcagcctgggaggggctctgccacttgccctgcyctaggttgttttgggcatygcccaggccctggacatgccttctgtccaatgcctggagccctgggatgccacccagtctgtcccctgtcccctcctccatccaccagtgagcacggctcccattctgcagataaggagcaacagcctagacatgcgacacagcctgcccaagctcccatggccagttctggaaagagcccagagtagaatctgggtgccccgatggccaggagttttctttcccctttgcctgccagcagaggatgtaacagacgaycaaggggctccagtagtcgctgggcttgacccaggcccggggcctttccttctatggcggccgcacccgtacctcacgcacattcccaattgcgcagaagtgaagtgtgggcctgtcctagagggactctgaggcagggtattcagccaggagttctgtggagaactgggtccccagaggcctcgtagcacagcctctgaatcagcctgagaaagctggggtgtgggtggtatatttgggggaatgaaggaggctatcattgttgagtcttaaaaaccaaagcagaggccgggcatggtggctcacacctgtaatcccagcactttgggaggctgaggcgggtggataacctgaggtygggagttcgagaccagcctgaccaacatggagaaaccccatatctactaaaaatacaaaattagccdggyatcctgtaatcccagctacttgggaggctgaggcaggataatcgcttgaacctgggaggcggaggttgtggtgagccgagattgtgccactgcactccagcctggacaacaagagcaaaactccatctcaggaaatcaaacaaacaaacaaacaaacacaaaaaccaaagcagaaaaaaataactgaatacagaggcgtccctgcaagcctgtcataaggatgtttgtttctcatgagcttttccaccttcttccttgttgcgagtggctgcrcagtggttgatttccatgtcttattgtctgctgggctcagccatcatgtggtggtgaccccactgccatcamagccaccgtttgtggagcatctctcataggccaggcgtggagcrgggtgctttaccacctcactgaatttccgatacaaccccaggaggtgggagctcctgtttgttgttcctattttgcacataagggggctcagagtagttaagtaagttgctcgcgttccacagcagtttgtggggcaccagctctggctgacttgaggycctcactcttcctcagggctgyactgatcccttcctcctcacatggctgagccctgagcccaggagatagagctgttgkctaagcagcttagtgtgtgcccagatcacagcaggagaagcagccaggcctctgcccctccactctraccctccctggctccctttccatgggctggccttgcatgggtttggctgaggagggcagcgaagkccccgttggtttcctgtttcctctgaartgagctgttgggcagacggagagcccaagccaggtgccagcaatgggcggcaraggggcgagargtgactgagctcaagggcaccgcctttgagaagccagctctgatcgtgctgtcctgaggctccactgtgctcacaggctctctcgctgggaaccaagggcttaccagctggccttggctgtcagttgtaagttctctggtgcctggcacctggggcgaggctgtccttacagcttgtccatcggaactgctgggtgtaagtgttagcaacagggcctgtctgggggcaccttgccccaaacagtgcactccaaggtggagggtgcttacgtgatgctgtttttgaccccagcagtctgcgcagaggcagggagatgactatgtctatgacttaggcttcttgacccagagtcccgtcccctccccaagagactgtcagccacatggaccctggtccctgtggatgaacaagtccaggctggcctcatcctcttcctgggcctccttttctttccctgaacttccaaagcccctcaaccatttccccaaagcctgtggacatctcgggaggtgaggaaggtagaattcccacccgctacctctctgtcccagtgggcaggaggccaggtccttctctgccagccgcagccctggagctgggtcccagccctccctcgatggcacgaggtgcacagttgggaggagcagaggcagctggtggtgtgggctggggcctctgaggagtggcctggcgagctctcctttgggaagacatgccctccagtcacctcctgcccaccagaccctgtgctcacagacagcgagcgccagtggcagcaggtcctgccagatggcaaggccccagcygcccctgtaacygggaccatgtggtggctggtctctttagtcacagtgtgagagccggctaatgtgggaagagggttcacagcggccagttcctgctggagtagcaragaaaggagcgcgtgtggttcactaggctcacaccaccccagccaggctcaggagatgattcctgtggagtcagtagccttgggggcttccttgccagggctctcccctccccttcccctcctagggcagttgacctggcctcatctctcagcatccagcagcctgccttgggagcttagggrcctcttctgctgagcctctctccctctttgtgcctyccttcttgaccctaagaagaagggcactgggtctttccaaggactccggtagctcagctcacctaggtgctcagtgatcctgggaagaatagcaaacaccacccacacccccaggccctgctcccctccagcctaggcaggtgcattccctctgctgctcactggcagtgcctggttctggaactcagcacacacaagggcagggctggcttaaaggttttcattttaagtctcttaaaattaaaggattttattttaaagaaattaaaatttcttccatttctctgaaggaatgaggcctacccatgctaggtaggcagctccatcaggcytggtggtaggggccgtctgtggaggtcaggagtgtacccgcatgcctgctcccctccacagcacattgtggttctcccacgagtttatctgagttctcctggtctcagccatgttttatcctgtgtcatccccacggtaaggaactccttgcctttgcccgttgtgtaaaactcaactgccgtttatttgtccttagatcattcttttgagcttcaagggatgcctggggtcctgtttcaggtctgtgtcagttctctttattgtcctttgtgattttgcagacttgatccaatgccatcagtcctgtttttccagaatggagttcctggctttttgtattcacccgtcatgtctcaccatttcatgtgcctcttggatgtctggtgtgcttcatgtgtcagagtgagtctccccagtagagttggggtgccctgaaggcagggcctttatccccctttcctagatccacctgcagccacacacacaggaagaccttcccaccgcacagatagactcgagaagccccgtctctgctcccattctagtcccagccggaccatgctgaggtcagcttcttagtggccacagacattgcccatcccaggttggctcaaggcaccaggtccatgacaccagaaccctttcccgctgctgtgacaggagtgctgaaggtgtgcagagctgggctcttggacttcttctgtgtgattgttggctgccaggctcagggagcagccaggttagtggccgtgataggcacagcagccctgaggaagggccttggatgctgggagggactgaggtgatagggtagcctatgggggtggcaccaggctctcttccatgcaccgcctcatctcctgtctgcttcccctcccttctcagctccctttcttcctcattgttctcctcttccttcccygctgtgctttgggagttatctcagtcgcaggcatgccctccygccaccccatctccaggrgagagctcggaagaaattcctcattgttggcttcatactgccatgggttacttagaggctggggcatttttgagatcaaaggctgccgttagagatggtcagagagcattggtggcatgcagagccacagcagagaccacctccaggactaaggaagggagatgacagtmagtgtgcacctgctgtgtgacacatgctgtccacagggcctggaatctggcagcagagggagctgggtgctgtggccttcccagcaatgagctgccctggggatgaaacccctgcactgtgacaccctccttggtgtgagtgtaccatggggtctgaaggaggagggggcaaggttgagggctctgagtggctgatcttgacagatgatggatgtgtctgagaggggagaaggcccagccttgcattcttgggaacaggtgctgattgccttcagggctccagcctcttttctyrgccttttcaaygctcagacaycctcttccttgccctcacccctgctcttcccacatcttcaaagctgaaggagtctccttattctggaggtgaggagcagtgagggagaactgcctgtragtcagcagagaactggacaagggtgcctagccttgcgcctgggtcaggtctgcaggtgccttctacaccaaccttgtgcctaagtgccaggtttccagctaaatgctcaacacatttcttcaccaaaaagagagctgaaatgaatgactgtggggttctgtctrgtccattctgataatgatracaatgatgacaacagcatccaacacctgtagaatgttcactagccaccaggcactgtttcttatgtkaacttagtttttctttgcaatgatcttgaagggatacatttaacatatatgaaaaatgagttgcagatgaattgagtcgccaagggctctgtttacaagcatgcctccccrccatcctgtccttaaaatagtgattccaagtyagttttcattaatgatccatgagtgatggccagcatgcagcacmtagtttcatgtggacatttctctctctggtttatgaccactgcacggwgtggatggttattattattgggaataaccgtgtatcagagtgcagytcttagcctggagaatgggaaatggaaaggaccagagattcaaagaaggcaatttaccyaaggtcacacagccctttaaggccaagtagagcctcctaagcatttcttgccacactctcccaggcccacccacacctctgttgcaatggagggccccactamccaggagagcaggtctagggcacmgtgccaagcctgatgaatgyccttcatacccttttcaaacaacaggctacgattaggcctaattataggggcctggtcccttaatattcttcctggcatgtctcttgccaatcaaatcagtgccatctgcagtgtgattcctgctttagtggcatcaaggggaggagttaattcaacccaatgtaaatagattctgccctcactttgcaatttaaggagtgtttttccctcctgtcccgcacccccacatgcacctccttccttctggctccctaagctctagcctgggtgagcagggtctggacactctatacctagagtcactagccactgcccagtctgtgtcagaagcaggcctcgaattcctcagggttagagtgggaagaacccatgtgtgcacatttgcgtttccaacctgggcaccatttggcagctgattcgggcaattctctcaccaccaccaccctgcccatgtacccctgtttccagcctctatttccctcttcagccrgggatcctttcttgtgtacccaaggtgaggagctgaactgagatcgtgtatggacagggttcctggcaggtacccagcaccttataaggrttgaagaaatgttgcctcttctccgagctcctccattgtccctaccaaatccccagtcccttgtcctgccccctccctccctcattcactcagcaggcatcagcagaatcccatctcctatgagctcctggcctcccaccaaatgctttgtctcccatccccctccccacctccccgaagctgtgcacacagttgggatgagggctgtgctgtctcaacaccatgctacctgtggtgagtgggtgccggtgggcgtgggtggctctgatgctacccacaggcaccacgactcctgcgaggacccagcattccctggcaggtcagacctatgccttgcccgtcatcccaccagacctgcagtgagaggagaccgtccggcaggtggcagatgcctggcagtgcctgcagaaggtctccagagacatcttcagtaggtgggagctgccacccacccccacctgatcagagggggtggttctgggcagtcctctctccagtcccagcaatacaccctctgggagcagcccctttggggattcctggtcctggaagacccagctgtcttccctgggtgggaggggccaaggtgagagcccagcttggaagcttttgctcctgagagcctgkgagctcactgccttccaccccactttgccccctggtttcctgtggtggctctgctctcccaactcaccctcttcctcccacggagagggggctagtccttcacagtttcctgcagccagaaaatatttaccwaacagtgactgtgagcgaggcactgagcaaatctctatagatccagtgatgaataaggcagcgtccctgtccaactggagtgcatattctggcaggagagacagacctaaataaccaatgcatgagcagttgtttagttacagttgtgataaagcctatttataatattcactaatatgcatatagcattaaccatgctccaccattgatctgagtgccttaactcatttaaccctcaccacattttatgagcaggcactgctgttatctccattttatagatgaggaaaccgaggcacagaaagacagagacttagctgagtggcagagccagggttcaaagccagggatcgtggccctgggttctgtgggttatgatcacctctgtggaggggagatgaggwtctgcgaggctcatsatggggggyctggctgggtcagggaaggtggatgtgaggaaatagcatttgtggtaaaacctgagggtgagtgggtaggtcagggagaacattccagyaagaaggaagcacatgacctacagccctgaggtggaggacctgaaaggaggccagtgtggctgcagcgcagagaggccgttgaggaagccgagctggagggctgcagttcttgtatcggcagcgctgaccccgcacagtcctttggctccagtgacttttcactcagtgtttatctaactcgagtgagtgaatagtgtttgctgtttcctgcaaaggtcccaggggttgttgggtacacaggtcctgtctttggccgcaagcaacctgaaatgaggcttggtcttcttcccggkacctcaggctgtgcctcttgagggaccccagcacgaagtatgtgactgcctgactcagatccctctcctgatgcaagccaccctcaccctggcccacacctgattgtcaccagacctggagtccctgctccttcactgtgcagcctcctcttctgtcatgaactggaagcccacctcttcctggaagccctcccaaactaaaaaatgggggatgaagcatagtcattgcctccagatcctcttaactattctgcctctcccctgcccactgactcactggcctgcttcaagcctgtctagaaagtccctgtaaacaagaggctttgcactgaactggctgagaggttgccttggagctgatgccttggctcaaatctggcttccctgtttgcttgctctgttcccttggcaacttactcaatccctctaagcctcaatgtcctcatctgtgaaactgtggtaatcatggcatcttcctgatagaactgttgcaaagattacataaattaaaacatgcaaaggaatggaacagtgcctggcacctaggaagccttcaggaaatgctagctcttgcctgttgataatctctactcgttgactgcccattgaatggtggccattcatcaacttgctaccaacagttacagaaagtgttggacrctcctttgtgcttattgttatgctaaatgtgcccaagggatgcctcggcaagaggacggaartctttaagagccatcagcccctgattatggccgcctcatgtccaacgcttggaatggaggggaaaactattccctcagaaactstttcctcatcaagatgaggactgcatgcttgcccttctctgagggcagccttagattttggtggctttcctttcccatcctggtactaggcacctgtagacagttgcatgtcccctgcccagggatgggatgaggagaaggcaggaaggcatatcctggggaagggagtgctgagttcgtygagagtgggtgcaggttctccaagtggctcgcayggcccagggaggggaggatgtctctcaggaatcctgggcctgtgtcccagctccctcacacctgagttccaggtcaccacatccrtctcccaccgtgtgctccccattgtgctggaccctgagagacaccaaagatgtggccaacacggtgtccttaggagcttrgaggcyggaatgggagagcacagggcgaggctgattcttcattgcatagcatgaatcrcacaggcttccaggggtctagaggggagagaaatcactaaaaattggtggcaycctgtcagtcggaactctccagaccaggttgagcaaaaagtaactaatcagtagagcaggcttcggagttccagggcttacacgacgtcatccaggcctggtttgctttccttccatgtcagcttgcttcttttgggctggctacattcccagacaggccttgctctcgtggtggygaggtgacaaccagtggggctggactcatgacccagggttaggtctggcaggaaagaatgctctcctttgtccccacttcctccagaagccacactcactcatcccacctggcttggtcctcgtgtctgtcccagaatccatcactgaggctggggactatgacacactgattggcttagactgaggagctctgggggcagtctgatctgatgctcatgaaytgagatggattccccagaggaaacagggccattgcttgagtaaggaggmaatgggtgctggagaggaaaaccatgtgcctactccacacagggcaggctcctggaggagggggctaaggtagcgaggctggtgtgcaggtcccggggtggggtctagaaatggaggccacaggcttggagagaagcctgaaagtggctgggaactcggagtatgacaggctgccggggaggccggcctgcacaggggctggggctgggacttctgcacgggaagcacagacagcgctgcctctcccttgcactcagctccttccctgcagagcagggggttggaggctgactttccacatgcctgtgggcctggtctctctggatggtgccacaggagctttgccttggttcctctgcgtcctccacggtgccatgggaggctccctggcagggtgtgggscaaggcaatgagtgaagttgggatgagtragttaaggcccatggggtactcaggacaggacttcaggtttgattcaggagggtgagggaactgtgattgggtcctgagcagggcagggatgggtcagaagagtttggggaaggttcatcaagcacctgtcacaaaggggacaagaagggagagagagagcagatggcagagacacccagaggctgttgctgtagtcaggacatggcggggatgaggctgcaatcaggggacttgcaagcaaggagggctgggtgagacattcaaagggaccaaccacaggatacactgacagattgggaaggagaatgaaggaaagggaggagtcggtgataattgggagtggtgtggggagcacccaccgctcctcctccacctgccccctkcctgtggcaatggaatgggcgagtgtgtgggcttttcatttcccatgggctttttcaatgggactgtgaccagtttagaacctccccctttamatgtgcttcacctgctcggaaaccacctgcacagaagagacaggtgggtagaggagagactgtctctctcctccccaccaccccatctcatgccccagactggaccctggcctcattggcacctgtgccttgtgacgcaggcaggtgagctcctggcaaattagcattcctggctatgctctctcctcctgctctgtcgcagtgggggagcttgcagagactggagggaatgacaagcacctcccaggctctcttcagccccaccctccagcccctcccagccgcttcttcctgtccctgcatctgccccctccacacctgggagaagctaggccccaaaatattgggccagatatgtcacctgcttcccaagatatagatgacaaggcagggcgggggatgggggttgttgagacggcacggggaagaggaggggacagacttcgtgtgtggaagtttggatgctgttatctgccttttcccgtcagcccctgcccaacatcttcacccaagaagctgcaccactgcccagcacctttccttagaaaaagggggaattttctctgcaaggctcttggtcctttcctccctctctttctccttctttccccactccccttcctttcttctccctttctcccttcccctttccccttgtccttacttcctccatctgtccttctctctccttctactcattggcatctggtggcccccaagtggcctgcataatgagcagatcattctttattttttatttcaatggttttggggagcagtgtacactacatccaatgtgtggtcttttatcccagaatggagaaggtaaaggtgaaggcgagagccccggttcagggtttgcttccctggggtcatgacagaggcaggggaggagaagcagcgaatctgggtcaggagtgggcgctttctgctcccttctcaccatcagcctctagggactggcatgatgatgggccagggycagtggcagccctgcagaggtcaagggccagcctggcttcataggaaacattctcatggggaatggggatgtcgtctttggaggcggtggaacagggagcccaagcatggtcctgcccatccctctgccaccccaagaggagcgtggttcctactgcggctccttgaaaggcacagctccagccagaggcgctgcttgctgttgctctgctgtttcgtcctccgtggcgttctcttgcagagtgtctgtctcctaagcctggagcttccctctccaggtgatctgctctagaccgcctcctccctgaaatttygcctactttgccctgcccacttgtgggagttctgggtttcctgagtgcctgaagcccctcactrctccccgtcttgcaggcaataatagccaatgctgaggacctagctgtgtcagccaggacaggagcaccagacatcaccagctccttttcaccttcgaggtaattcagtgagaggtaattcagtgacgcagaagtgaccattcctgtttttcagtggaagaagctgaggcgttgacctgttagtgacctccttaaggtcatgctgctgctaaacagatgtgaaacccaggcttgcggggygttgtgcttactgatgttcctttcttccctcctgggatccctgaatctctttgagagtggttgtgtgttgtctgattcrtctctggctttcacggccccagcactgtgctttacaaactgaatgcactcaggttatctgttgaacagtgaggggtggggaggaaaggaagaaagtgaaggacgcattgtacagattattttgaccttggagagtcgacgaccatgtgrcttagggatgatcttcttgtgaagtatttttcaggggtctgtgcatttcctgattttgaaagttggcctctctagctagcttgtggaagttctcatgaatgatatcctgaaatatgttttctaagttgcttccattctcctaatccttttcattaatgcaaacaagtcatagatttggtctctttacataatcccatatttctcaggggttttgttcatttcttttcattctcttttccttattcttcttgactgtcttattcagaaagccagtctccaagctctgagttctttcctcagcttggtctattctgttgttaatacttgcaattacattatgagattcttttaaagcattttcaggtctattcggttggttacatttttttctatactggctatattgtctgtcagttcctgtatccttttattgtgattcttagcttccttaggttcagtttcaacgttctcctgaatctcagtgatcttcattcctatccatatttctgaattctatttctgtcatttcagccatatcagcctgattaagaactcttgctggaaagctaatgcagtcatytggaggaaagaagacattctggctttttgagttgtcatagttctcatgctggttctttctcatttttataggctgatattccttcagtctttgaagttgttgtcctttgaatgggattttgttccttttattctatttgatgactttgggggtttgattgtggtataaggtgggtttgatttactggcttcatttctggaagatattagaaggccaaggctcagctcaggactcctgaactgcatgcactagtgcaaagggacaggtctcaggtcctgactttgttccctggctcctcaaggttaggaacctgatgtgctggagggaccaaggtgctcccagactgctggtcacagcattctgatgggtggtgccagccaaagcattctgcagtgcagtggcagcaggattcctcctcattcacacatgccaccagcagcagcagctcacacatgccaccagaagcagcagcagcagtgaggtggggtgcatgcttgtcagcttcagcaaggtactagcaggtgctgaggtgccagcctctgtgcaggtgttcccagcagcagtagtggcagcacaattctatgggacagggggcccctgctggtgactgtatgctttcatgccgattgtgatgttagcatggggataggggactggtgggtgcaggaccatgtgtgccctctgcacattcatgtggatggcagtggccactcagggcaggggtgagtctgctgttctccatggctagtgttacgtcagcaacagtgttggcacgggcacaggagcaaggcactagcaggagctgggctggtgggccctctgcctgcaaacrcttcaatgacagtggcagtgtggcrgggaggaggggcgtgatgtgcactcatgccagcagtagtggcatgctagggtgcgtgtgcacatgcacattggtgggggaggaatgcaaacaargcaaagtcaggggtgatcatgggtgagtgtatatcagcaaaatggtatgggagaggctgcacttgggagggaacgggcaggctagtrcatgtccatgagggctgctctgttggagcactgtattggtcaggtgaagtccaccagctcaggagctataatgaaggctcccrggaggtacttgggggctgcactgcaagcaagtgcaaccagtctgggccccagaagaggccagcagacaaagggatgctcaggttggactgacctcatctcattttcaagactgccccgcagggttcgggtctaatactttccctaaggctaaagtctcctatgggagcaagtaaagcctaggagtgtgggggaccctggccatgctccattacagacactcctgcagcacactctatgggctccacactggctgaaattctgccctgcgatggttaatattaagtgtcaacttgattggattgaaggatgctaattattgtttctgggtgtatctgagcatttctgggtgttgccagaagagattaatatttgagtcagtggacagggagaggaagacccaccctcaggaagacctacccacaatgtgggtgggcaccatccaaccagctaccagccagctagaaaaagcaggcagaagacggtggaaggagctggcttgctgagtcttccagccttcatcttttgtgctggatgcttcctgccctcaaacatcagactccaagtttttcagcttttggactcttggacttaaaccagtggtttgccaggggctcttgggctttcggctgcagactgaaggccgcactgctggcttccctacttttgaggttttaggactcagacttggcttccttgctcctcagcttgcagacagcctattgtggcatttcacattgtgattgtgtgagtcaatactctttaataatctcccctttatatatacatcaatcctattagttctgtccttctggagaaccctgataatacacgctgttcctgtcatttgggcttatcccccaatccccaggaactgggatggaagctgtgttgttataggataagagaataaattttattgacaaatatatagatatactgacagtccagctagatatactgacagtctctctctctctctctctctctctctctctatatatatatatatatatatatagagagagagagagagagagagagagagagagagaggaagaaagaaagaaagaaagaaagaaagaaagaaagaaagaaagaaagaaagaaagaaagaaagaaagaaagagagagtcttgcacttttgcccaggctggaatgcagtggcacactcacggctcactgcaacctctgcctcccaggctcaagcaatcctcccaccccagcctcctgagtagctgggactacaggtgktcaccaccacactcagctgatttttgtattttttgtagagacggggtctcactgtgttgcccagctggccctatctcctagactcaaacaacccccctgccttggcttcccaaagtgctgggattacaggcataaaccaccatactcagactgacttatatattcttaaagtaccctaggccctgtggattttcagagactccacttcaggaaaatgtgagtgactcttctagtacaatttgtgataaaggttcaaggaaaatgaagggagtgtactttgtggtacataacacccctttatgggaaaccttttttttctaagtaaataataaattttcagtccccattttacttatgtatttagtagttaacctgattacataataaaattgmtcctcaaattataagcaagcaaggaaggcataatgaagtcagctatttggtataactaaaggcaaagaaaaagtcttggatttaaggtttatggtggaaaattctcagtgtcacaatgagtatgtaaggtattaaggaactgagagaaaaataccatctaaagaatagatgtgggtagatgaacaatacagctctcttactcgcccttttcttttttttttttcttttttttttttgagacagagtctcgctctgtcgcccaggctggagtgcagtggcgcgatctcggctcactgcaagctctgcctcccgggttcatgccattctcctgccctcagcctcccgagtagctgggactacaggtgcccgccaccatgcccagctaattttttatatttttttagtagatacggggtttcaccacattagccaggatggtctcgatctcctgaccttgtgatccgcccgcctcggcctcccaaagtgctgggattacaggcgtgagtcaccrtgcccggcccttgcccttttcaataaaacctttccccagtttctttttgaacagagtactgaagtcattttccgtgtccagatttttatagtaaataatgaacattttaattcaggagtgttgaatggaaagtgccaagctttgatgtgattatattcatgtrattgtgtatgtgtgagtgtgtgtgtttaagaagaggtcttcagtaaactagactaccacggaatatttcatggaggctgtatagctctgatttggagaaggtttgtgctattgaagcatcacatggcacttttatgtccaccattcctgctccatgcaaaagtactttgaacaatgggaataataattaactgtctctatcattttcttatacagtaatcacatacttttttgcaatttgaaataaactttgtgtgtatatatatgtatatacatacatacatgtatacacatatatacctacaatatgtgtatgtatatacatatatacatgggtgtatatatgtgtatatgtatgtatacatgcacatacacacatatagtatatgtaagtatacatacacatacacatgtatacacatgtacatgtgaatatatgtatgtgtacagataggtgcacatgtgtatacacatatgtatgtgtgtatgtgcatacgtatacatgcatatgcccatatatatacacatatatgtgtatatatgtatgtgtgtatatataaatgtagatatatatatttaatgagtagctgaaacccttaacactracatctcctttgctatgttctagaaatctcatcctgtttcgccaccttctcattccatcaattttattgtctttctcttctttatcctcagcctctttctgtttattgttttcttttccttccaccatcacatataatccatatcctaaagatggattatatccatatcctagagagatggattatattcccataataatcacattttccttctcactttctggatatttaatgatcttcattttgacctcactttctcttactattaaataatttttttatgattctattgcaaaccctcttctcttctcactatacacattaaatatcctgcatttcagttactgtctgtatttttgtgtatcccaaatatatgcctctatattcacacttcagttccacatatcccactgcctaaggtgcttctttaactgaatgtcccacaggcacttcaataggatccataatctactccaaaccagtttctccaacttagatcccckcttcrgtgtgtgacaatatcatcacccatcacctaagggtcaaatttacctccttctctctctcatctcattttctctcagtgttgataattgacaattgttgatctacctcctgaatgactcatagacctacatgattttatccagcactgccatgctgctttagttcagacctccagtcttgaatgctgatagttgccaaatactcttcctggtgtttgggaaatatcaatgcatgaaaatagtaaaaacagctgcccttgtggtgcttgcattctaatgggggagacaaacaatacgtataatacaatcaaacgaaatrcgcaaacataataatgaacataatgggtaagcaaagtctaggaaattaagaggctataagtgctrtggaaaatataaaatgaagagaagggcaggaggatatagaacactctgggaggtgagaagactggaaagctaaacacaaggcttaggattgatatcattgaggcaacgacatttgggcaaagtcttgacggaggttatggagttggccacatagacatctaaggaaaatctaggcctggcagtyagatcagctagaaaaaaacaaggcccataaagttaaagtgtgtcttgtgtgttcaagaaacaacaattaagttagcatggcactagagcagacggagcaaagaggtgcatacagtagtaggtagagagataagaaacatgttggggcaccaaaccaggaaggggatcaagggtcattgttagggctttagatttcactctgagcaaaactgggaatgatttgcagggttttggatagagcagtgacctgatctgattatgttttaaaataatcagctagctgctgtgttgagtataggctgtaggagtgcaggagtagaagtgaggagacctcgtggaggttgtgaaaataatccaggcaaaaggtgattgtggcttggaccagggttgtagcaggggagaagctggtaagaagcaatagactctaggtatattttgaaagtaaaaccagtatgatttcctgatggactggatacaaggaatgagaaaaaaaaagtgatcagagattattcccatgctgttggcctgagctaattctatggaaagaattgccattacctgagctatgccatggctgacataggtttggggtagaagattaataattcatctttgagcttttgattttatatacttaagtggagacatcaggttggaggctggacaatcagtataggagtttgagagaaagagagagctctgagctaaaaaaaatatatacattgtggaattgtgagcacatagactgtgggatgggaagagattactcaggcagtgagtctgaatagggaagagaatttgggccttttctgtgaagctcttgaatatgtggaggttgggaggaagcagattgcgaagaaatcagccaaggagactgggtaagagagaaaccagtgaagtcagaggaagaccaaaacagtgtggtctcctggaagccaggtcaaaaactgtcagggaaaaaggagtagtcaacagtgtccagtgctgcaagtgtgtcaaggaaattgaggactgtaaattgatcatttacttacttaggcagaaaaaaagttacccatttctttcatcccataagggacagcatatgccaaaataagctggatttgttcttttaaacctctagcacaagtgtactagaaggtcacatttttcttgggtggagtttccttgaacatgctaggagcctaggtttttttgtttgtttgtttttaatgtgacgtctcacttcgaccaacttaataggattgccgaagcaaggcagtggttctcaaactctactgtgtgtcagaatcacccagatggtgagattgctgaggctcattcctggaattctgactcaataggtctggctgaagcacaagaacttgtatatatatattatactttaagttctagggtacatgtgcacaacatgcaggtttgttacatatgtatacgtgtgccatgttggtgtgctgcacccattaactcgtcatttacattaggtatatctcctaatgctatccctcccccctcccccaaccccacaacaggccccggtgtgtgatgttccccttcccgtgtccatgtgttctcattgttcaatgcccacctatgagtgagaacatgcggtgtttgtttttttgtccttgtgatagtttgctgagaatgatggtttccatcttcatccgtgtccctacaaaggacatgaactcatcattttttatggctgcatagtattccacggtgtccaaaaatgatagactggattaagaaaatgtgacacatatacaccatggaagaacttgtatttttaagaggatcccaaktgatactggcactactagccccaagaccacaatttaaatcccttgatctaagggcatagcttggacatcagggttattccaagcttccccagccataggtaatggtgaactggggttcaaaggctccagagccttgctactctaagtgtggtcagaagagtagcagtacttgcattgctgggaggctgttggaaatgaatgcagaatgtcaggtcctacccacatatgctgaaccagaatccacatgttaacaagatcatcctcagattgggtatgtacaaattaaagtttgagaagcactgcttagaccatctctggattcttcttttaggaaactctgcccatgttaatatcataattgttcttgctgttcactgatctttgggagctctcattttctttttactgtaccaaagaatgacattttagtatttttatcctgctcacaactttctgttctctccttcccatccttccaacacaatgcaatagtcaaagtgtcttgaacaatccacttttctctgtttgtggttgctcacacatgagattttcctcttctttgtaagtttagagaatgtgtattttgctcaggcctcaagtgctctcagatgaatcatgattttgttttttaagtcaatcatattatcacagtcccctcttacagtgattggaatccacagatcaggttccacaaaacggagactctgagatgaagatttgtgggaagagggtttattggagagaattctaaagatcaacacctgtagaggatgaaggaagcaggattgtacagaaaaaggagctgtactacaaggcagtcacaataaagttatcagtatatcccgtggggagctgtggggttggggtgattgttcagagttgtcctaatttaaggcaacagagctgtgcatttatacacacatagtacccattattgtgcactgagctgcccctagaaaggaagaggaacctgggtgaaatgtttctctgatgctgagggaggttctcagaggtgaattcatctgacagccaacagccaccaacattcctagcagctagggtcataagtgcctctgccatgaaggggattatctagagggtacaccacagcgttcactactttggcctagcaatgagagatataaaccaggcgtggataaggagctatacaggaaaatttcctaatatagcatctgcaatagtttgtaaaagaggtggggggcaggaaaagggaaagagagaaggtggaggaggaggagaaggagaaagaaggagagaagagaaaagaaaagaaaagagagatgtaggagaagaaaattttttcctgctcactcttttcattcagattgagatattgctgggaaggaataatctttgctacgtcaggagccaaaattgcaaataatactgacacatcaaggaagtagggtggaaagaatttaggaaactgtttgatggcatgcatgagctgctgaaccaatgccagtcctccattctcaggatttgtgccaaatgagattataaatgtttgattttttaraagtctgtttaggtattctgttacttgcacctgacaaagatgttcttacttttctttttcaattcctttcctcctttattctatagcatcattatatagaacttacgacatctcatttctttttagttgtttctatattgatttcaggaaaatcattttggagagcgcttggctgacatgagtaatccattgttcatactaatgctctttatgactagaattttgtagggtgtgtttggtggttaggggtgtaatatttagtctctgtagaggcttacccagtgtttactgtgtcagtaactgttctaatcactttaaatatattacttgttcaatttccacaacaagcttataaggtatggtattgtgattattcccatctatagacaaaggaagggaagcacagggaattcaaataactcatccaaggttgatcatctgagaagtggtagaaccaagatccaaacactcaccatgaggctccaaggcctttgtcyttctctgtaactaccttacaaggaaaggaatgaatgttttacacacaaaccaaattcttaatatgttaatattttaaagtcaggttgagtaattgtagttttctgaaagctactgtctatgaaaagagtcaaactctgtaaaatatttggagagagttattctgagccaaatatgcatgaccatggcccatgaagacacagccccaggagatcctgagaacatgcgctcaaggtggttgggccacagtttgaatctacatgttttagggagacatacgacattaatcgatacatttgwggtacacgttggttaggtctagaaaggcaggacasctcaaagggggcagggaactgtgcttccaggtcctaggtggattcaaagattttctgattggcacttgattaacatagtttatctaaagagctggaatcgataggaggaagtgtctgggttaagataacgggttttggagaccaagattcttattatgcagatgaagcctctgcgtagcaggcttcagagagaacagattgtaaatgtctcttatcagacttaaaaaggtgccaaactcttagttaagtctctcctggatcaggaaaatgacctggaaaaggatggcgattctctgtagaatgtagattttccccacaaaagacaactgtgcagatccatttcaaaatatgtcaaagaaatatattgtgggtgcggggcttaaaacctggatggcagattgataggtgcagcaaaccaccatggcacatatatacctatgcaataaacctgaacattctgcacattataccagaagttaaagtaaaatttttaaaaaatgatcatgttcgagtaaaaaaaagaaagaaatatatttgagggtaaaatacttcaatttcttttaggccctgttatctgtcatgttgatgtcttattgctacaaagagtattttgtcttaagctctctgttttgatgttaatgctgatcagcagtgcctgtattccaaagggggaaggtgtaatcagatacatctgacctcccactcctatcatggcctgaactagtgtttcagatttactgtaggatgtccttggctgacagaaggggttcattctattggttggggggcttagaattttatttttggtttacactacaacaaaagtataactttcttgtgccaaggtgttgcatttaccacaggcctttcccaacagagtgcattcggtcctaaccacactctgcctgagagactacctctgcttccactagtaagaagctctggaaatgtttataacttgttgtaacggctttaatgccaaataaaacaagtttacacaccctgattatgttcagtagtggtaactcagaggagagcactgtgagcctgccctcatgacacagccccaccacagatacttatgcttgtgggtcttyacacaaagagaggccttaagggagagaacagatgagcattgcttaccattggttggtatgaaccagctgcctactgaggctctgracaaagggcttctcaagaacaggttttgcagagggaatgacgggttcccatttgtcccatgactcatggtaagttcctggcaaatttccctaaacccttcatcaattggctacgaagaaacactgcatgctttgcaaagtgatcacagccaaaagttgcaaaatgatttgaattatttccagaagctttgtattttcttaatatcaaaaatgatcaatactacctaaagattcatactttaaagaaagtgaagcaagaaaggtggtgaaaacacaggagagaagttatattctgaaaatgactttggaagagtgaatagatcttcactaagcttggaagcataatttattctttttcttatttttctttttacttttcatgagtatatattaatttttattttttaatagtatatattacctataaacttcagttactttgcattgtagggaaaggcatcttgaatataaaatgttttcttatattaaatatatgaatattcactgccataaaagcagacaatgtttattaataacattattccaaagtattcacaatatactcagacttggacttatgtcttacttgtgttttattttgacaattactgaactcatttttttaatttcataaaataaattgctgctgttaaaaaattataataaaaggcatcccagatgcatttttttaaaacattagagcaatgatcttaaagttagaagcattgatttagattttgtttagaatccttttttgtagtaatggtaaggaggctttagcccagcattgcacttttatagttgtaatgaaacacatctctgctttacaggatgaggaagtgaacattggaatgtatgtgaataaagagggatttttttcatatgctggaaacggcattcccagtttgcytaacagacaacccacaccatcatttttcccactctctccacaccyttaactttatgaatgagatccttcttgtctagtaaatgatgaaatcttttcccacagtagaaggggatttcccatgcgtagactgagaattagaaacaactgctctgtatcctgtatgcaaataacattgttattgtactgtaaaaaacttacgtatgtctgtgttcatgtgtatatgtgttctgttattcttactgtttcccatttaaacagttagaagacttttaccaaatttagaaggtgtattagggaggtctatatttatatctatctctcaatttggataatgtttatgtacaaagttcacttttgagatctgggggaaaatctaaaaaaatgaacaatcatacyttaagtcagatgtaacttagagagttggaggcaagtataaataatattaatagaattactccatatgtattataattccatggaataagaaaataaatcataattctaaacatgagtcccagatagaaggttagggcatttactccaaattttagstgctaactggcaatctagaaaattctcatatgtgcaagtcagtgtagtatgctcatatatttatttatcagaggggtattattcaaatatttaatagttatgatttcttcaatcaaatcagatagatgagattgtatgtgtgtttataaagatgaatttaattctccttataaaagataagtgcactgcaagatccaccttctactcaacaaattcaaacatttgtactaatttgtcttttggaaatttcttatattaactttcctgttatcgatgttagatttggatttctaaattgtaatgggttaataaagtctgagaaagcatttgatctccagatgtgccctactattggtatgatttatattttgcattttaattagtaaagatgctctatatgtaagtacatgcctgactgtgttcctcaaatagtaagtgatcattttagattcacactttggaatgagtgttgtagcaaggggtaacgaaaccccaaggaatcagtaacaggcaaacataaagagaggtaggtttgggtgttgcttttcacaaagaacaacacaagtagtcactaatctgagactgttagccaactgggatataaagaggaaggagtagattgaaagcataaagtccattgtcttagtcaaatgattaagggcaattgtctttagatttggccaaaatttcataggtaaagaagtgcatgataacaggctttttagaaagggttatgtgaaaatagagtaacaataaaataaaagctaatgyctcattaagttgaccataccctaaatacagatactggctttaatcttttctagttctctgtaatatatagcagtgggaaaccagcagaagacattattagtcagaaagatgcgtctgcttctcactgcattacaaaacctgtgtaaaacctctggatagaaagctagcaccccaataatgggtttgctttaaaagtctgggagtcaagagtgcttacttcaaatgcagcataggatgggttgaatggaaagaagtgaatggaaagaagctctcctcctgggagggttaatattctcctattttgctccccaagaatatggttagttgtacacagacacaagattctatggaaaacctgagactgactaaaagtcatgattgactcaagaagtgcttgcattcatataccacccattggaaattcaacaatgaataaaacatgcaggctgtatctctgagattcccacagccaagtggcatgtattacataaaaactaaatatttgtagtgtgacatgacatcctgtaatagagatgagtacctgtgttatgggagctaaaagcagcaacaactaacttcagcttgggaattatgaaagtttgaaccgaatcacaaaagaacaaggaggatatatgtacctggtagacaggaagtcatataaagagaggttctagacagaagactgagcccacaaatacacatgtagagatgaaagggtgtggcacattgctggtgttttcagggaagaaagcagaacgtctgtgggcaagcagtgggggctataggtagataagagccttaagaaacttttttttctaaagagtttggaatttatcttgtaggtaatagtggaccattaaggatttttaaagaggatatgatataattaacttgaattttaggaaaaaacagttggtaaatagatttcctgctgttttcagtaaaagggcaatgtcagaggctgagcccaatgaaaccactttgtgatacttgataaagtcacagcaatcgtgcgattgtcttctaagagcatcttatttagtcaaaactctaaagacaaagaaacacaaaatacctggcaataattttggtaaaggaaaagaagaaaatgaaatgcaaaaaaagaaaaagtaatgcttcaataaactttcctaccaggatacttttatataaaaatatgtcgtatggaaaatacaacatcaacaattagtaataaaaaagacatggtaatatttaattttttttcaattagagyttccttaagcctttgttatttttacattgcttccattgtaataactatacagagcattgccaaccagaaattggtactgagttctcaaaatagatttagctctcaaccaagaaataatagtgagatacaaattaatttacaatgattgaatttactgaaatgggatttaatttgttcttgaaattttcactcataggcattgtaaattatgtctaggaaatgctgatgcaagactgttttgtaaattagataacacacctaatgacatgtaacacactgggagatggctaaaatttaaacatgacttaaactttaagaatgactcaggaaatactggcaaaatctcctgcatggatatatagtcccatactcggcttccctgactagtgagaacgtctgggctcctagaacactgacctgtatgtggatctagcagacacggcatattgactttttcttcatctcattggatcatgatgtggaagataatacatctgggtgtttttctctttcatctgtctctttctcagtctccaaacttgtcagtgattacacagtttattatttcacatggaaggcaaatagagcttggtattaaaaattcaggctgggcacagtggcttacgcctgcaatcccagcactttgggaggctgagatgggcggatcacctgaggtcaggagttcaagaccagcctggccaacatagtgaaatgaaaccccatctttactaaaaatacaaaaattagccgggtgtggtagcatgagcctgtaatcccagctactctggagtctgagactggagaatcgcttaaacctgggaggcggaggttgcagtgaggcaagatcgtgccactgggcactccagcctgggcgacagagggagactctgtctagaaaaaaaaaaataaataataataataataataattaaacattacatttttattgcagtgatttgattttaaataattttatcattttacaatataacccaaaatatgctcatgggactagtaaatttcaaatttggttggcatcatcatctctgcctcgtagatatccagaatgctgagtaagagctgtaacagtgctatatttatgttgaggaagaggtgtctgacagctgctggggaaggaactggacaaacagtaggcaaatataaaacagaatgtgctgtgtcagtttgggggcaaaagcattgtacaagaacactgatgatgttaacctttatagaactaatgacaaattacctgctgatttttaattgggatttcctttttgacttttaaaaatttaattcatatgccaacatctttctgtttcatacagatttagccatttgatgtatttctaacatttaaaaataacatacttctcttaaactcaaaaattcttcaattaacacaataattgctaagtaactaatcacacattcaattgtaatggtcttgcttgaattttgtaggcagtatgttctgctgattccttctgttctacaagaaggctctttggataaagcttgtgcccagctttttaatctcactgaatctgttgttttgacggtctccctcaactatggtgaggtccagaccaaaatatttgaagaaaatgttactggagaaaatttcttcaaatgcatcagctttgaggtaaatacttctttctgcttaatatagaaaagaatattacaggtgcatgaacaccacccacataactgattttttagggacagagatcaggctatttgactgtatgtgtaaagttattttaatttttaaaagaataatatagtcctcagtatgagatgatgttaagtacagtcataaatggtaacaagggcaagagccaaaacatttgattttatgatagaaaaytgttgaagggaataagacatatagaaagaatgactcttgtgcagaaaagggaagttttaagaaaggcaaaagaatccatttaaatggtgagataaggaagtgacaaagcaagagaaataaacaaggttggttattgaagaaatagatatgacaaattatgaattaaaacttttagtgataccaacacacagtgatagagatttcttaacaaaaaatcagtttcatggagtatttatttgttccctaggttcctcaggccagatctgacccactggcatttattacattttctgctaaaggagccactctcaacctggaagagaggagatctgtggcaatcagatccagagagartgtggtctttgtacagactgataaacccacctacaagcctggacagaaaggtgagtgtacctaaatcaggttaccctcaactaatgtcacttatatgatatttgaattgatggtacacaatacaagctcagaaattttattgtattaaagtttattagagaacctgcttaaaaatacaaaataaaaatatagattacatagcctaaatgttagagatttcatttccatgagtctggggkggggagcctcagaaagtgyatttttaaagagcaccttattctattctaataatatccatattattctaataatattctaataatatccgtattattctaataacattctaatcacatatttggggattttgaatttaatttacacaaacttacaagcttatggttgaaatagaaacaaaagagcaacaaagtatgtcatgaacatgtaatgagatacccctagtgactagagaattgcccaagtaatagaatgatcagcatgatgttgaattaagctgaaaagcctcctctctcctcctgggtacagaaggagttgatgaatacagattacagcagtcagaagatagacatttctgatgagatgaatggtacataaaaaagcactgaggtagaattaatttaaaaaccatgccgtaaaatgagaagtagatagacttatttggagtaaagaaacccaaatgtccatcaatgatagattgaatgaagaaaatgtggcacatatacaccatggaatactatgcagccataaaaaaggatgaattcatgtcctttgcagggacatggatgaagctggaaaccgtcattctgagaaaactattgcaaggacagaaaaccaaacaccacatgttctcacttataggtgggaattgaacaatgagaacacttggacacagggtggggaacatcacacaacaaggcctgtcgtgcagtggggagagggggagggatagcactaggagaaatacctaatgtaaatgacgagttaatgggtgcagcacagmaacatggcacatgtatacatatgtaacaaacctgcacgttgtgcacaagtaccctagaacttaaagtataataattaaaaataaaataaaatgtgatataataaaagaaaaaaaaaggaaggaaaagaagctgcagtgaatagaagagttaaaggaaatccctgaatatagaactaaagaggcattttcatgtagttaagtaacacccatgaggagtcactacagatgtggggatcatggcttgaggaggcagtcgtggatgaactgggaatcacagtaatcagagcctgcttaggcaccaacacactgtgatcccagaacaacacaagcagagggaggtgagggatatgtgctggagatggaggaatgcactgcatgcattgtgctatccccagccttccactcctcttcccctgaccctttgcctccctccctcacttcacaaaagagggcattcaggtcagtatttaggcaccagagaaagaaggactagacaagaaagacagggcatggctgtacagtttgggctggcaccaacaacggtggaacaaacattacgagagcatgcatgctggcgtgggaggtgcttatgagggggaagagtatatgtgcttgacacaagaggatgtccaaggaaggcttctaggattcttgctaaggagagctatagaaggcagaggtggggaaggtggctgctacttcaaagagcacagaaacattaaaccttaatttaaaattgcttttttaaaatttcttatccatccacagtctagtaaagagtctaatgcacagaggaaaggttataacatagcaaagaaattgagccaggagtcttacacaattgagagatattcagttttcaaaaaattgatcattacaatctgagattataatgctacaaatattcataatctacycagcatcatgcttctttttgaataaaaatatggtgtgatattaactatgattgctaaaacctcattgcacagtttattgttgcttcatatttataatgcartatattaactactatatagtggcatgaacaaaatatgaaaaagcatagtaaacagataaaatagaaagtgagaccagactaayatggtgatggtagtctaagacagtatttcagcagaagactacaatctagctagcgacaatctgagaaccaaggcgatcaacagtgaaaactgtcaaaagacaacgaatyatgacctggacttcagtctttacaacaggatacctgacaaatttcatttcatgtagtttagaaacctgttagaactaagcattcttttgtggtctctcagatcaatctatcaactgagcgcagttacgaagaagcttctgaagcttacagaagctgtgcagatggtttctctgttagtgccttttcctccctccaaattgtacttcatccttaagacatcgtcacttttaatccacctcctttccccatcttctatagttatgctacattcactagactgttgcttaattttaatttccagagcaggaatctaatttttagtgctccaaagaccttgtagtaatctaaatccgaaatcacttcngtaagatagcatgtggttcctgttctccttggttcatggttgaagcttctatttctaagaatgcaactcctctatttaaccaangcagtgagaatttctactgcaatcctttgacaatcatccttgattggaagcaccatggggaagtaaaggncttcttgaaaatcaaagcagctgcagcattatcataactcccttattagttctcaccccccgaatgttgacttattattgtcaattaggccaaatatgattanccaactccctgctttagtaataactacatttgcataagaacaggattaatggactgttccctcaaatatgggtcatagataagaagatcrtttgtaccaaatgtttatggcaaggagtttccatggcacaacaaactgcatgtgcttatgtatagagatggaaattgatgtagcatttccaaaaatgatggcagctaagagattatgtggttttatctttgcaagccagtgtttctaattgctggacattatctggttcagtattccatttagataaatagattcaatgcatggctggcctatgagatttgggyattcataataaatttgactacataataaaaatatagtaatgatgcaactgggctcattatcaaatgagccaagatatrgagcatatacctagtttcttctgcccaaatcytacatcggtcttttctttcattttctgcaatttcattgctgatggtgcctttcttttcctttaagtcagtgttttgtagartattcaaacatactttttccagaaagtttcatttgcatcaagaagtttcagatctttctttaaacttatcttaagacctggaactactagtcctctaaaaagaggccctgtgtatggacagggagagatagtatgaaccagaaggggacatgaaggagttgttgtattggttcttggctggtttatacaagatttagtgcagacagtcattagtgactasagcagaatcagcctcattttaataattgtttttagagaaaaatcaagcagcttagaacaatgaaaatgtgattttactaggttcttgttcactagttttttgaaatagaccaagctgagtttaaaaaaaaatctaaaaaaaaargacaaattaagtaataaaaactaaatttgttgaacacagttgaagccatctgcattggaagtattacaaatagcaaacaaaaagggatagtactctaggttcatttctcattattagaatctcatccaaatggttaacgtcttcccatggcacctttgggtaatatawtcattttcttcctatgaggaaatctcatgagaagctctacctctcttaatgcttgagttaatgttgcagcagtagctttcttcaataccatctcaatatttcatcaagattcaattccatgaatttagaataacaagtaggcccttaattcaactgttatatttctcagttccaagaattctggacaaggtttatgaatcctgttcytatctccagacacattacgttttattagtgaatgaatgctgcaattagtgggaaggagcacttagcaacttggggagtgggcaaaggaccctatgtactcatttttaaaattctcatcagcctattcacatgagggcttctggcctaggagtctttaatttcaacttgttagttttaaggtcctgagagaaaacactaagagatgaaagtcaaactgttgactataggtttagagggggcaagagtggtaaacatggagagaactgagaggagatacagagaggtggaaggagaaggaagaaggagaggaaactctgcaagggaaacttgggcaaatgtctacrtttatttacttgtctgataaggaaatggtggagtataggaatggccaataatctaagacaaaaamaattagtgctagatacagaaatcaaaattgaagcatttcaaaaagaggcaaccagcagtgtaaaacattgcaactgtcagagtgaagactgaccacgaatttgttgataaggaagttatkattcatctaagagggcatttttattatgttggagagacccaagggcaggrttgcttactgagactgcagggtgtatgttgtgaaagagagagaagtaaatgaaaattcttgaaaactaggcagatgagtttcaatataatcaatagatattcaaactttcagtcagaaatcagtatttgtttgggttgtcctaaatgtgtttatgtttctttgcttmataatagatttataattaacctcttcactcatctagaaaaaaaaccttgagttcatatattaacattatttttatttttatttcagtatccagtgatcacccttcaggtaagataactaatagttgaagaattgttttctcattttttgaacatctctcyaaacctcaaaatcaaaaggcagctcacagggaagattgtctatttaaattgtygcagaattattaatttcatgyagacagccycaagaggacagaaataggtttccacccccaccaccatgtgattcatattagcatgcacccattaatacagacaataataatatagacaacgggcaagtatgattgtatttaatttaatgtttagttgttgaatgtatataaatgtacacttaatgttttatgcactggggataaaatatggctcgcctttaagaaatcagagattgacacagaaaataaatgtaaaaaaatcacagctagctctaaaatatactaagtrctgtaatatgcatctatgtgacctcagataggagagtaaccaattctccttgggtgatgtgaggacgcactcatgttttgaatcctaagtaagttggaaacctaagtaggaaacaccttgctgaaactttataatgaataaaaacatccagcatgcaaaaatacgctttcttattctcaggatccagaaggcartcgaatacaacagtgggtgaatgaggagtctgtgggagggattctacaactctccttccagttaatctcagagcccatcctcggatggtatgaaatcaccrtggagatgctcaatgagaagaaaacatatcactccttctctgtggaagaatatggtaaataatagcaatgaaaatattacctatyaataaaaaaattataaaatmtttccaattttgcaagggcargattattaaataatgaattttcaagtgagtatctcttcctttcctctttccttgtcctctgttactattttagggttctccatctactgtgatttttatctcctagttcagcccataatcttcctgcaattctctgttaacctaggctatctatcttccttttgtagtatctggattctattttatatgatagtttctgggatgtaaagcacttcttatgagaagaatggaattaacattagtcatatgttagccattagtcccttcatattttctcctaaaatcttcataaaatttctattgtagtatctttattactattttaaagatgaagatattgagaaacactttcccaagttcaacacctgaraagtgatgaatttggaattcaaaatatgcatttttctatccaattccaaaatccagtcttaggcacttcarcgtcctcctcacactgtttattaatggcaaacataagcaaaggttgatggtttgtaaaggagaaacaattgttttgtatgaatgtatttatgttaatatgtatttatgttaataatatataatatacacattataatataatatatattttttttttactggcagtgttacccaaatttcaaatgactgtggatgcaccagaaaatatcttagttgtggactctgaattcaaagtgaatgtctgtgccttgtaagttgaaattgtacacaatagaataatgtattcatagaaagatantagaatgggatagatggctaaaaagaagtaaaatataaatgtgtagaaggtaagggaaaaagaaggtgtkaaattnttttgctgattttatgaattcttccatgcatctataattcttttaatgcatgttatgacacgtggttttatgtaacagtttaagacaactgactactgtctttcttacatcataagataacatattgttttgcaccagccaatacagtagccrtgaccacatgtggttatttaagttttaattaaaactaaatattcagttgcgttagccacatttcaagctgtcacatgtgactagtggccactgaattggagagcatagacataaaacatagaacattccatctcccagaaatttccattggacaatatyttctgtttatgaygatttctcaattcaatctttatgtattacatgattataaaagaaarctgaagctcaagatgtatcacagagaaaactgctgtaagagttacaagtggctctagggtaatggcggggcacagtgtggaggatactaagggcagacagggacttaggggcaaatagtgaggattaacgtgtggcaggagtagcagtgaagcaggtcaggttgttttcccctcttgtcactaagktaagcaacattcacrgagtttatataaccagcaaagagagccagggtrcaaacattaaaactttgtctcctcagacctgatgtgtactacttttccctgactcatgtgtactacttttccttttaattttgcataattaaaaataaaaaagtgacctggwaatttctagttattaggagagcttcaytacagtaatctaaaattccatgccaaactttaaggtgaaagctttgcctgycctccttcctgtgtctactttaggctggaagtctttaagagtcaagaagaagcatggctaactttttgatgtcactaccttgtgcttcacctccagagktggaagaatacagaaaaggcagagactgaaaagtctcattgtagttgggtcataraggcagggaattgccagcattgctggaaaatcccctgagtaacagaaatccccaaagcccaaatgtctaggtacttccctrtcacagtggctgtgtgttggctcctgtgtcatttttactggagaagtattgcataagcaaaataaagcactctaggacaagccagctgggaatcccaaaacataagcatgaatcactaaatggttgaagattctaatgacttgaaatcaaggtatwatataaacaaaaaaaagagcaatatatacctgagaaaactgttgaacatcaatcagaaaaaratttagaaataagtaaaatgtgtatactcagatatgagtcaatagtgtaactttaaaaataattaaagaccttggaaktaggcatattattaatttaaaaatatatgtgtagaaaggctgactagaaggatcgatgatrcttaagagagaattagtaatttggaagatgaaattgagaaattgtcmtaaaacgtagcccagaggaatctactgttattccttacaagcaattttgttctttgctctttctacctatttaaaattttttaaattatactttaagttctagggtacatgtgcacaacatgcaggtttgttacaaatgtatacatgtgccacgttgctgtgctgcayccattaacttgtcatttacattaggtatatctcctaatgctatccctccycactgcccccaccccacgacaggccccagtgtgggatgttccccacccggtgtccaagtgttctcattgttcagttcccacctatgagtgagaacatgcggtgttcggttttctgtccttgcgatagtttgctcagaatgttggtatccagcttcatccatgtccctacaaaggacatgaactcatccattttcatggctgcatagtattccatggtgtatatgtccatctatcattgatggacatttgggttggttccaagtctttgctattgtgaatagtgccgcaataaacataagtgtgcatgtgtctttatagcagcatgatttataatcctttgggtatatacccagtaatgagatagctgggtcaaatggtatttctagttctagatccttgaggagtcaccacactgtcttccacaatggttgaactaatttacagtcccaccaacagtgtaaaaatgttcctatttctccacatcctctccagcacctgttgtttcctgactttttaatgattgccattctaactggtgtgagatggtatctcactgtggttttgattttcatttctctaatggccagtgatgatgagcattgtttcatgtgtctgttggctgcttaaatgttttcttttgagaagtgtctgttcatatccttcgcccactttctgatggggttgtttgattttttcttgtaaatttgtttaagttctttgtagattctggatattagccctttgtcagatgggtagattgtaaacattttctcccattctgtcagttgcctgttcactctgatggtagtttcttttgctgtgcagaagctctttagtttaattagatcccatttgtcaattttggcttktgttgccattgcttttggtgttttagacatgaagtccttgccyatgcctatgtcctgaatggtattgcctaggttttcttctagggtttttatggytttaggtctaacatttaagtctttaataatctgtcttgaattaatttttgtataaggtgtaaggaagggatccagtttcagctttctacatatggctagccagttttcccagcaccatttattaaatagggaatcctttccgcatttcttgtttttgtcaggtttgtcaaaggtcagatggttgtagatgtgtggtattatttctgagggctctgttctgttccattggtctatatctctgttttggtaccagtaccatgctgttttggttactgtagccttgtagtatagtttgaatcaggtagagtgatgcctccagctttgttcttttggcttaggattgtcttggcaatgcgggcttttttttggttccatatgaactttaaagtagctttttccaattctgtgaagaaagtcaatgttagtttgatgggaatagcattgtatctataagttactttgggcagcatggccactttcacgatgttgattcttcctatccatgagcatggattgtctttccatttgtttgtgtcctctcttatttccttgagcagtggtttgtagttctccttgaagaggtccttcacatcccttggaagttggattcctgacttcaaactataccacaaggctatggtaaccaaaacagcatggtactggtacaaaaacagatatatagaccaatggaacagagcagtggcctcagaaatagcaccacacatctacaaccatttgacctatgacaaacctgatgaaaacaagcaatggggaaaggattccctatttaataaacggtgttgggaaaactggctagccatatgcagaaaactgaaactggaccccttccttacaccttatacaaaaattaactcaagatggattaaagatttaaatgttagacctaaaaccataaaaaccctggaacaaaacctaggcaataccatttaggacataggcatgggcaaatactttatgactaaaacgccaaaagcaattgcaccaaaagccaatattgacaaatgggatctaattaaactaaagagcttctgcatagcaaaagaaactataatcagagtgaacaggcaacatacagaatgggagaaaaattttgcaatctatccatctgagaaagggctaatatccagaatctataaggaacttaaataaatttacaagaaaaagcaaacaaccccatcaaaaagtgggtgaaggatatgaacagacactgcttaaaagaagacatttatgcagccaacaaacatatgaaaaaaagctcatcatcactggtcattagagaaatccaaatcaaaaccacagtgagataccatctcatgccagttaaaatggcgatcattaaaaagtcagtaaacaacaggtgctggagaggatgtggagaaataggaacgcttttacactgttgttgggagtgtaaattagttcaaccactgtggaagacacagtggccattcctcaaagatctagaaccagaaataccatttgaccagcaattgcattagtgggtatatacccaaaggattataaatcattctactataaagacacctgcacacgtacgtttattgcagcactattcacaataacaaagacttggaaccaayccaaatgcccatcaatgttagactgggtaaagaaaatggggcacatacacaccatggaatactatgcagccataaaaaagaatgagttcatgtcctttgcagggacatggatgaaactggaaaccatcattatctgcaaactatcacaggaacagaaaaccaaacaccacatgttctcactcagaagtaggagttgaacaatgagaacatatgggcacagggaggggaacatcacacaccggggcctgtcgggggttgggggcaaggggagggatagcattaagagaaatacttaatgtagatgatgggttgatgggtgcagcaaaccaccataacacaygyatacctatgtaacaaacctgcaccttctgcacatatatcccagaacttaaaatataataataaaaaataatgaacagttttacttctttccaaaacaaacaaaaagaaattaccccaaaatctgatgrcttaaaatgacatttataaaaaataaataaataaatataatttacattttaaaagtaaaaaccataaaatatgctcataatagcagtttaaaaacaaaaaaactaaaagaagcaaaatgttattttatttyattttttgtttttcaatactccattgctatcagtatgcaaaaaatattatttttaatgaaataatgactgatgtatttttttgtttttttgtttacattgtattttagtgacttagatatataacgtctacatgcctatttcaacctttttaattaaaatatatttttgcctaaagcattcaactcaattttagtccataccattgttttagatttcctccagaaaataaaatttatggtaactagctatttaaatgttgttacrgtgctggtttcagctactaaataaaggtttcaaaaccctatacagattaaaaacgaccttgacctctgtaattgtgttrttgttatattcttctattagatatacctatggtgaacctgtggacgggaaggtccaacttagtgtgtgcagagaatctacggcttatcattcatgtgctcatcttatcagttcactctgtaaaaattttaccattcaggtaagaggtatatcagcaaaattataaataggtttscrttaactttttatcctcaccttccatttaccttcctttcttcytgttttcctctttacagttaaaatatatacttttattctatatttctattcctatttgtaaattttatattcctcttttgtcatgctaagtttcattttctattgactgacaaaaagcaaattatagtatcagaaactgagtagtaaatttcgattcttaattaaaaatacatttggtttcatatcaaaatctacaccctatcaatttactgggaacatatgtcctgttctttattttatactttgtgaatttagtcagggagatgtgaygtttctgcatattcaagagtattagatgtataattattttcctctcaacctattctcactggaaataagtgtatataggagctccrgatgggaaccctatcagtcaggttcttaaccactaaagagaagaatcaacttttccaaactgacaaaggaggaatttcctaaaagatctacttggaaggtttgagaaccaacattcagaaaacggacacaaacaggctggtctaggatgtagcaaggctttcagctataatcatgccagatctgactgtctaatatacaactgccagctgcaatccccatactayagtgtgataccatttatccacacacatgtgtgcacacacacacacaggtgcacacacacagtgtcacatattcctgtccygtttagagaatactttaggttggaaataatkaagaaccttctaattcttaaattwaaaaaatgtggacaataaacgctaacaatagtaacaattataataataataattgctaacatttaatggatgcttattktgtgtcagtcactgagctaagtagtttatgtgcatttgattctcaaaacaaatagtaccctatgagggggtactattatcgcccccttaccgatgagtggattaaagcagaaagaggttaaatacattgctcaagatcatgggtgcagcaaaactagatcataaatacatgtcaatacatatatatttttagacagtctcactgtgtcgcccatgctggagtgcagtggcgcgatattggcttaccgcaacctctgcctcccgggttcaagcaattctcgtgcctcaacctcccaagaagctgggactacaggcgtgcaccaccacgcccagctaattttgtatttttaatagagacggggtttcaccatgttggccagcctggtcttgaactcctgatctcatgtgatctgcccgcttcggtctcccaaagtgctggggttacaggtgtcagccactgcaccccaaccaagtcatataaatatttaaataactagtggggctgtatctttagggatatcagggatacaaaaattttctccacaaattcattcaacagataaatattgaggtcttttaatatgcaagaataattttatttagaagcttcattgttgagcaagacagatcaggtactatcctcatgggttttgcactttatgaagcagtcataatctttaaagatgcacactctagaagagactaaaccaatataagccgagtgcacagggtaggtagatcccagaatgcattatcgaaggyggctatattatagratgcccttcaggagatttgagagmtctggaaayttaaaatgtacatgtagggtgggaaggggtgaggatcaaaaaaactacctattggatactatgcttattacctggatagtgaaataatctgtacaccaaacccccatgacacacaatttacctatataacaaacctgcacaggyacccttgaacctaaaataaaagttaaaataatcaaatgcacatgtaaagcaggagtgtggactaaataatttatctmattattcacctttagtatagtggaaatttttctagatctttaagcttctggaaatggttctagaccttcttatagtttcaaggaccccctgaagtagcacaggattttgacatctcacccacatcttgaggactagatttcctcatatcatcataagatgaaggagtagaataagaaatcagtttttccccaatattaaagtccaggaacctatgagcacaatttatcccacattttaaaaatatttgacaattcatcctgtttaattttggttactaattgtgacactttaaaaatttcacttagtgagacattgtcacttgactagacactgagagaaatgtaaaggaatctaattwaaaaatctactacctactgaatgtttactaagtgccaggccctgtgctaaataaacactttccagttattrtctaatgtaatacarttctacaagctctttattaagatttcattttgtatgaagtaataagtrgtaaagccagggttcaaattctggtgtttgactgtaaagcctgtgttcctaactgctgtgtaaatagtcccataaatgtccaaggcatggtaactaaatartataaaactcagtttcaaaactgtaaaagaatatggctgaaattaccaaaattgcaaatatcatgtgtgaatacgtgactagtgatggatgtgtttattatcttgtayaataacaaaataatgtcaccatgaagagttttttaaaacacaatattgtaagagttaatatttattaaaaaataaatagttataggtaaatacatgaactgaaaatataattatagaaacacaatggattattttaaaaaactaaaacttgggtaatacaatattcttaaagttgcttcagtgaggtcacacattttccctattatattatataggtatttcttacagtcttcctttamaatataacttttttttattgttcttttcagttggggaaagatggctgtgtctccaagttyattaacacagrtgcttttgagtkaaatcggtaaggatactggagtttcctcaaagtgcatgctcttgttacagagaacggaacaggtaatgctctctaagaagccagaccccaatggatatcactgtctcattcgaattgttacctgattgccaactatacaatgtyaatacaatcattttttccctgagggcttttcattgggttcatctgattcaaattctgaatgtttcatatatcaaccaaaattttcacacacatgttgatggatggtcaagtrttacattcaaataaggctacaatagaagtaagaatgccaatttattgatttataatgggagtatctggttttagatataagcatattccttttccttaatcattccacagataaatataattgagacatgtagttgtcgattataaaatttttttggtgagcatagaattagaacatgggaagtaaaatagtttggggagaatattttactaagcctctgaaaataaatccagtgaaaaatctttatctcatccaggaaaatctgtctccctccccctccctccctccctcccttcctcccttccttctttttctttttcggagtttcgctcttgttgcccaggctagagtgcggtggcgtaatcttagctcactgcgacctccgcccgccaggttcaagcgattcttccgcctcagcctcccgagtagctgggattacaggcgcccgccatcasgcccgactaggtttttgcatttttagtagagagacggggtttcatcatgttgtccaggctagtctcaaactcctracctcaggtgatcctcccgcctcggcctcccaaagtgcgkggattacagtcgtgagccacctcgcccggccaataatatttctaatgactaatttcttgtatctcctggacctaataccccttcttcctaaagcacaaaatggtaagtcttaatccttgaaatgcttttttctgtgctgaccactttgtgttactrtagtrcttttaaacttaygcatatgtaactgatatttcagcaaaatttctgttcstgaaatattaaattactaatgtacttatatcagtcttcaaagttttagaggtatctgtcacatccagaggaaattcaagtattaaacaaacatttaattgataattaggtatatttgtcatactgaactaaataaataataaaagaatagccaggcacagtggctcacacctataaccccagcacctggggaggctgaggcagaagaattatttgagcctaggagtttgagaccatcctcggtggcaacatagtgagaccccgtctctacaaacaatacaaaattagctgggtgttgtgtcatgcagctgtartcccagctactcaggaggctaaggtgggaggatcacttgagcccaggaggttggggctgcagtgagccatgatcgcaccactgcactccagcctgggcaacagaatgagaccctatctcaagaaaaaaaaaagaaaaagaaagagagagagaaagagagagaaagaaaggaagagagagaaagagaaagaaagaaaggaagaaagaaaaggaaggaaggaaaggaaggaaggcaggaaggaaggaaggagggaagggcttgctacatgataacatatgtccatatttatatgagaaataatgtagcaattaaaaataagtttttataaggttttacaaaaactttataaaataatgataaaaaacatgtaaaactacatayacatttgcacatattgagtgtatgtgtgcatgtacacatatacacacacaatctcaaacatattaatataaatgataaatataaaragaaatagaacttgtgggaaaaagcctaaaatgctaattttgrttctcttggagatatctgatatttggtaatttgtattttcttttttaagcatttccatttttaataatacacatatattacaattcttactattaataaattaaagcatatgttttaggcaagcagagagtaaaagaaatgttgttaaacaatcacttaggaataatgagaaatcaacgtttactaatccatcatgaagaaatggtaagtgaattggatattttataaaaagcagcaacaccagttggcacaagcattttgtgccrtcttgattaactttctttataaaagacatctgaagtacctayatattaaaactgcttaggaaagggaagggaaactattagaaggaatggtgagcttttgtggtttttttcagaagctctgtttgtctgtttttggaagtgacattttctcaataatacttaattgactgcaggtgtgcagcttacaggctccaagtacrtatacatagactcatcagtggtgaagattagttttgagaatatggatatgtcctacaaacagggactcccttattttggccaggtwagaaagcaatcattttttacataccttattcattcattcatttgttctttcatttatctactaatcttccaacagctattccctaagaaattactatgtaggaatctctgtgctaagcactgtagggtgacctacactgttgattttcatagatctgtcctggtgtatatgttttatcaagttgtaactgttaatagttacaaccacttcactctaaaagtgtccaagtttggacaataaattatatagtctayatcagtattaggaataaaatggtgatgtagagaggcacttttatcactgcttttatggagtttatagtgtaatagagataataaacattaaacagataattttacaaagaattattgtagtygtgataggtgctatgtcagtgaaatactgaccatttaactactctacatcaggagctgacaaaccacagcccataggcaaatcagacagaggcctgccttgatacagccagtgaactatgagtggttttaacatttttaaaagattatttaaaaaataamaaaatatatgagagagagaccatggtgttttacraaagaagtttgctaaaatctggactaaatgatcatggaaagtttccctgaggaagtaatatttaggttgacacaagaacactaaaaaagaaatacaaaagtgggtagcctggcttacatcttacaragcagtttctcaaactggcatcagcatcacctaaaggacttactgaaacaaatttcagtaaaagtcatttaatgaacaaatttagattgaaatacagctttggcagatagataaatttgatatatgttcacttcacttactgaatagtggtggataatgttaacataattttttctaacctttctcttcactttgtacatttttgctttatatatttccatgttctgttactaaatatataaaactgagagatatcttcaaagaatataaaattttttctgaatataaaataattttatctagacttgagaattctccatttcctccctcttacgttgttgttacccaagatgatttcttgggttcccatttgtctcttgtatcttttctgtgcaatttaaaagtgttttctgtgtaaagagcattttgtgtgaaaatgttatattttagcttcctttctgaacttaatcttctgaggtttttgttattagtttgttttattcgattggcaaagatctccaatwtgaatattagagatgatagtggacttcctggttgtattttgcatattttggggaatgcttttaaaaatgtaatgcgtaaacctactaagtaactgtagcattttgtgagacatactttatcgagtcaaaaaattttccttttttagttcactaagaattttctataatatgttagtttctgtatctagatatttcttattaaatttaggttttaaaatagagggcataaaatatgttcacttatgatttgaaaaaataaatctatcataatttatttccccttttttattactagttgtgtttgtgtttttttcccattagtttttggatttgttaattatctttatttttaatgttattttaaatgattttcattacatcatttatttttattatattttttcttctacctcttttggttttttttttctagcatcttgttataaatacttatgttaaacttccatgttttcaratttatacaatttttcctgaatactwctttcctcctcacaggtgtttttctatactatttttattttttaaattatgaaaaaatgcacatatcaaatttaccatcttaacaatttttaagttcaattaaaatcatttytgatgatttcattatttttatttttatttttacctaagaattacttagagttttaagttttcttctctagtatgtgtgattatggttgtatatttttttaaaaagtaattttttcttttgtagtaacagctacaatttattgagcacttactaggtcttaaatatttgctaaatacatatacagtactcacaatagccccaggaaatgatagatgtatttaagttttggatcaatgattaatgattagctgagtagaaagctcttttctaccctataataagctagacattagagaccgacattccaattaatakaattaaccctgaatttatagaactgttttctcataataatgcacatctactgctaaatgactactctcaaagttgctttctttttcatgtccaaagaaaattacatttgctttcctccgagttttacaatagaatactcttcagtgctactatagaatctattaggaaattctttgaaatataaatcaatttaagccctataatcagagcttctcttcttgttgaactgctttgcaggggggaaatggcatacatatacaaaataatactctcctgaaacacacaacactgactcccaagaatattgatgacttactatttgtcgaacactgttacatgctaccagtgttagatgaatcaggaatcccttttcagtaactatggttcttggagtcctggataacttaaaaaaatagagaccagtctggctaaagaaatttaaagttctctaactctcagctggacaccttgggaactagaatatggatatgtcccacccagttcccaggagaacaccatgaaaaagtttatatacatcccacatcctctgcagtatctcaaaactctctcctagttccagcatcctcccatcaccacaaatatcaagagtattaatcaaggagggacaagcctgccactatatccttcactcacaattccaaagatgtttgtcctggaaattctgtcttattttcatgagctcttagcatatcatgatagcatgacatcttcacatcaagtatactgcttggctagcattgataatagttcaaacaaatagcaacaatttatatacttcacatcaactaggggaaaggtgacaaatattgtaagacagcttgaagcacaggttatcaccaaggtttgtgtttgggagataaaacatacaagataaacagaggactaacattgactaattctggagaaacataggaagaactataaacagcttagcagagagaaaacagttcactgatttttaataaaatccattcacaacacttatttgtagttacttttatggtagataatattcaagttatattaaagtgcttcaagcaaaatttagcaactcctgtaaggcttcctgctgttcatcatcaagttgagatacacattccaaccataaatcttcaggagtctgtacttgaggcacgacatcttctaggcgtttggcacagggatcttcatagttaatagtcccattaattttttcttctgcaattattctgattattttgggaaaattggaattatttggaccaattacaactgggtggttactttcagttaggtcacagagaaaactcaaagtctgaatagcttcctctttatcttcatgcagtggaagccatgatagccagtatgaaagaacttcatctacatttacacagttaggcttaaacttcaaaatcttccctagtgctgagatacagttctctgtagcaatgacattttttttttgttttggaatttgcacacttaataacttttaccacagtgggacagcttctgaacataaagaatgataatcatctccactaagctgtgccatgacacccaggccataagcagcagcttgcctgacttcagggttgttatctcacacatttagtagcattggccaccaaaaatagtctacatatttaaatgaagttggactacatatttaaatgaagttggattgcagtgctctgcgatgtcatcaaatatgcacagtccccactgtctgcctagccatggcctacttgaacaaattagatttacaattaatggaagtagttgttcaaatcatggtaaaatcttttccttataagtactaaataatgtgtgcaaaatatctgatactttggtcagaatataaacatcacattcatcctcatcttgcagagacatctcaaccttttgatcatagttttcttcctgacttttaacctgtcacaattcttcgtttttaaagtgcccttcaagttttgctctcagtgtccctcccagttcttccaagtattcatcattaaggcaatcatctcccataacttcagtgaactttgcaaaagaattcattatttctgagagcacatctgtatctggttcagtaccaatagccttgattaaggggttacgtatgaattgccacatctgtgcaagatactctgggccacaaattcttgcacattccaggagaaaaggcatggactctgctgctgccactcgaacattgtcttggaaataaaatttcagtaaaggaaccatcagcttcacaacttgttctgtatagttcacaaacccttcccttaactccttagcatagtaaaccaacatctggcaagcagttacttttgcttcaagtcctgaagttttaattccaaaacgctgttggtctccaagatttacatgttgccagccatcatcatcattcatattctccacatcctgtgtgtctaagagagcarcatsaggtttagctgaagcagtcttaataagaggctcgataaccagggaaagctactgttgaaaatcttttccaagaattttacactttctagcccatgctgaaaccatgtaagaggtctgggggtcattatcttccgtattatttaagtctgattgtgtcttcaacaagagctgcatcacatttgatgcatcttacataaattttttcttcccaacagcaagaccaatatggctaatgcacgcaataatttttcctctcagaagcttgagttccttctgaacagcaagctcaatgatgtgctttagtgagggcatgaatatatcataatatgggacaaatttttcttctattgtatctgcaaccgatgcaatggttgccacaagttattccagggccaacttagttccattccgaatcaactcttcaagcttaatcaccaagacagaatgtagatttttcaccatactatccaaatatagaactaggaatgatttggggcagtcttcaataaaaacagtaagagcagaagctgcatgtgattgcacacgctgattaccttgattttgcatggtacgtaacagagctggaatcactgtttcatgaaatgtcttttggaaattgggtgcaaaatctgtagccatctgtccaagtgtagtacaggctggagcccttacccttagatgaggatcctgggatattttcacagatttcctctgcttgcctccgcaccatacagcttggattgatcaggttcttcagaagctgataaaactctttgcttttctgacaagttcgccagcacccctgtggacgtggtcaccgccattatgctctgtcaaagctaccatgactgggaaggaaaataagtaatttttaaattgcggacaacacatatattaacaagaaaaataacactgtaaattaaagtatgaagaacaatgagcacctctcccctctaatccgttcatttcgtgaatacttccccagaagcaactactttcagtccactgtgtttcctataaaccagtagtgaggttcagaagcttgatcagattcaagttcatttttggtgggtgcagtaggcaagaatataatgtaggtagtgtcatgtacttttcacagagagcactcttcctctcttactgagatgttagcagacattgacaataattacttagatgcattgtttctctaaaccattctttcttagccttggcacaactgaaattttgggccagatgatactttgctgtgggggctaccctgtgcatggtaagagtttagcaacatcccaggtctctacctgggatgtagcaccatccccttcctatttgtgatagcccaaagtgtttgcagacattgccaaatggcaaaatttattggctaataagttaaaaagtgataaattagaattttgccactcttagaatagtgattctcaatgaagggtgatttgagatatttttaaaaagattacctaaatcctattatcccctctaaaaaattagcaataatccactgaaatctgccagtcaatcatgctccagattaactcaggggttttatttctgtcttctctagcataagacatggttgagaggggtgtgtgtgtgtgtgtgtgtgtgtgtgtgtgtgtgtgtgtgtgtatgtgtatgtgtatgtgtatgtgtgtacttaagccctagcctagtcattaaggcccagctccttcccattccctctcaaagcttcttgacactttaaggtatagtattatcttatcctataatcaggaactccaagacaccttttcctatagaggagagctgggaaaactagctgaggttggtaatagtttatcagggaggtaggggataggtggtacctacatgaatcaggcatccgtggacaaagtagtctgttattaatatattgtaatacagtacagtttcctgcctggacacaccctcttcattagcatttgaaagaattagttcctgaaaactcatatataagagctcttatttccttgatcattttagggagaccagtggcagctataaacagatgtgagtctcaaacaataaaatgctttagttcaaaaacatggttgtataaagtggtatcttttgggtttttggccatttcacagtggtgaatgctctgatcacttccgggagatgtgccaggagaaacaagtcattcctgttctacttttggaaaagggactggtttctctgtgatatagtgagtcactacagtagctgcattactggaaattaaaaatggtttatctggccatgtgttgtgtcataaggccatcaaacacgtggctcagtattgctagggagcacttttaaagagtaagctttatttccagaatgaagatactatctgcttttttagtgtcccctacaaatttcaagacctcagagctatgactccaagagtaacatatgtgaacataggaagctgggcaaggcggtgggctaacaagggtatttcttcataagtgacagtagcagcatccgtggatggctgaaatgatactgtttaaaattgtaggatatacgacaaatacctttgccacaagaaacatctgctaatgaagtgttgcatgcctggccccggcagttgataatgggcctggtgtcatcacttggggcactatttgggtttggggacaaagaaagaaaggaaagtgcccagaaatcacatggcttgttcatctttctgtgactggaagggactcaaaggatctttctagtctaggtgtactaaaattagagcaaacctctgtgtgatcataaaggcatggtgtcatgtgtctgtggcctgtggactgctgagacaagttgaatttttcttacaagatcaagccttgagatgaaactaagttcaaaatctgcgtagatggtgcaaataaggcatcagtctacagatgctgagcaagaaaaaaggattgtgtttgcctggaccagcaggaaaatgataagtggcagaaataagatgaaaggctcaaagcagaagttgttttgcagaaactgactgagctaaaaaaaggatgkctcagacagtcttcttctggttgttgtggccttagatgttgttaagaaggtgcctttaaaggcttcaaactggcatagatactgatgcaggcattgtatctactrcaaatcatacaatttcagaagggactttttaaagcaatcattgcctgtactagtaagagaatgagaaagagatttctagcraataaccatggcctatcagagcagtcactacaatgttttagggaggataatgctaaattttgcattttagaaaatttgstttgatgccagtatagagaaagaacaagcaaaagcaatacaggagagagagactggatagaaaaaaatagaagaygtatgagggaaaaaagataagctattgatacaaggaatagcaacaggaacaaatgtgataagctggaaacagaaaatgttaaaaagatacaattgaaaatattttatcaacaattgaaaattataggagaaggaaaataaaaagtctaagatgtctctagatatttgacttcagtgactaagtgaatggttgaggtattcactgagataaataagagaaagagaaaaaaaaggaaggttgggcacagtaataaatcattccaatttgagggtttctgtagcatttttattataaaaaatactcaggatgattaattctatgggcctgagttttcagagatcttcgtgggcaggagaaacagagtttaggctcattagtatattaatggtacatgtcatacactcaacaggaatagatgaaaccacgcaggaagtgcatacgtacgaaggagagcgggggtccccatgatagaagcttggcaaatgccatcaaaatggattcccaaatttactacatgcttccgaaatgtattttcttcctcttgtacagattaaattgcttaatccagacaactctccaatcccaaatgaagttgtycagttgcatctgaaggacaaaatcrtgggaaactacaccacagatgtaaatggcatcgctcagtttttcttggacacatatacgtttacatacccaaatatcactttgaaagtaagttaaacgaaaggcaagtaaaataaaaacaaacaagcaaacaaaaaactgcactggctmgctaaggtttaggtctrtgcgaaattatatttatggaacagaaatgaaaagwtacaccttggtgtgaatctagagtactgaaaaatagttaaatattaagaatataggccctatgaaaagtaggttaaaaattattttaagagtcccgggaaaagacagaaggwtagcatacatactaaattgtataaaggagaattagctgaaaataagcaacgcttcacttttattaaggaaatagaaagagaattgtgtttttatagaaggaaatatttgagaaaccctgtaatctattaccttggaataatgtaaagaatttctctggatatattcaagagagaagtraactactatctgtaataattaaatatcaatccttcctagatatttttaaaggactcctcagactttttgtgttgataatggtaaattactatggtcagagtaaactccttgctgtatttcataaaaactttcccatctttcagcaaaacttcatattatgttatcagtagcaaggtaaacgtttgcactcatgggttcttcgtattatagtgagggagatatagcaatctacwtgctagcaaaagtaataattatagtaaagaatacagtaaaatattkaatgtaatattattgaagtaggacttgaatagactaaattgtaaaaaccatagtggtcgctctagagtataactagaaaatggggaattgggttagatttaatgtagaatggctataaaatyttcttgcagagataaagcagcatgatgataaaccatcttatcaaatattctttcactcatcctttctctttatcctaaaatacccgtaattttgattttttgtctaggcagcctacaaggccaatgaaaattgccaggctcatggctgggtgttgcctcaataccctcagcccgagtactttgcatatcgattttactccaagaygaatagcttcctaaagattgtccaagagatggaagaactgagatgcaaccagcagaagagggtgctagtgcactgcattctcaatatggaagactttgaagacaaaacctacacagcagacttcaattatttggtatgagctgaaaayattcttccacaaycaaaattgyttcttttctttaaaacttctttgaacctaatgaaatccctgtacctatatgccacgaggaagctcaaagttaacataaatgataaaacttatataactggtatctatttttaagaaaggagggaaaaggccatgmcaccacaacccatatgcactctgtcattctcagaccctttcttcagagttacccatttctatttggacattgctgggatcaaaccagagttctgatatgtactagctttgtgttactttttgaaagccacttaaacctctagagaatcttagttttttgtaatatattgtctaatcatcaagataattatttaataatacatataaagccctttgcccaacttctggcacacaraagatattaagtattagtttgattttaatatattgctattatggattattttacactgtctaaatrgrtgcatgatacttcattgagatttakgaagatgatataaaattaatgaaacatgaattaattcaatcagccaacacttattgaatgtttttcatattccaggtgctgtattagcaattgtmacaatagaagaaatagaaaaagtataactggggacaaaacatrtattagaattacataagtgttacaaaygaaacatgtatggccactgaggtgttacagaaaaatgaatgattaactctagctggagtttaggacagtgattatcagagtatatttcctagagtagcagtatcagcatcacctaggaataatttagaaattctgggaataagtggccaggcgcaggggctcacgcctgtaatcccagcactttggggggccgagatgggcggatcacgaggtcaggagatccagaccatcctggctaacacggtgaaaccgcgtctccactaaaaatacaaaaagaaatcagcctggcatggtggcgggcgcctgtagtcccagctactcaggaggctgaggcaggagaatggtgtgaacccagcaggcggagcttgcagtgagccgtgatggtgccactgcactccaacctgggtgacagagcaagactctgtctcaaaaaaaaaaaaaaamaaaaaaamaaaaaacataggaataagttagaaatcttgtcctccgaagcacattaaaatttgacaaccactagtttaggaaaaagatatatgcctatatatttacatttatatgtatatacatatttttaaggaaaaaatacataaagagaatatgcctaaataggattttgtgggatgaataggagttttctggatgattagaggatatgagaaacacatttaagcttattttaggaaataatataagaggtcaaagatgtctgaagtgtattattctgagaactaaaggtgtttgagtctatctatgtgaagaatgaaagtagtaccacatgatttctcacattttgcaaacttagaattctggaatagtcttttgatacttctttttttcgtgctatttactgcatcaccaatttctatcactttttcattatattatctctcgcattttttctttccttcatcatttccacaaacattaaaatatttcaaaccagcaaggtatggacaccaaaccatcagaaaaggtatgagtgataattccactgaagcccttagctaagccaagcatggctcatttagactgggggcaaagtggtgggagtgggaggagctggttgtggaggagaggttctagggaagcagggaggggactctggggagctcagggaagtggctctttaccaaccggtacagaaatccttcaacatgtcaacaataatattgccatactgsggtgtgagaaataccaagcatccttgaatgagaagctgaacctcttttttttttttttttttttgagacagagcctcgctcagtcgcccaggctggagtgcagtggctcgatctccgctcactgaaagctccgcgtcctgggttcacggcatgctcctgcctcggcctcccgagtagctgggactacaggcgcccgccaccacgcccggctaatttttttgtatttttttagtagagacggggtttcaccgtgttagccaggatggtcgcgatctcctgacctcgtgatctgcccgcctcggcctcccaaagtaccgggattacagggaagctgaacctcttaactagtttttataaagacactcccacatgcccctgacttttgccttcttttctggccacacctctgctcgacttaatatccaatacttcctaatccagagctgagccattttgcaggtctgtggtgtgaattgatctacttgtcatcagcttccctcttgaaatagcgtaggtttgcccccctctgatctgataaggcctttacaattactttacctcatttccattttaaatgagtctgctaatagcctttttcttcctctctcccttcttccttcctccctccttttcttctttctttctttattctggaaatctagagtgatttttaaaaaaagcaattaggattatttatttcactcccctaattgaaatacagttaatgactgcctatttctattgaaacaaataccagactcctttcttttgcctgcaacactgtatctgctctgcacctgtgaagctcgcccgcttcattttgcatcattctacacttcagccttctttattgcagacacagagggctttcattttcttggacaagccatgtgcttttctggctccgaagcctcccacaggttttcccttctgcccataacaatcttcgttcccatttgctaccrcagttcccaacctgcctgcacctcattttccgagctgattcctcctcagcattcatctcttggcttaaatgaaactttctaatctcctagacaattccagtcttctacatattctttcataataggctgggtggactttaattctgcctagcagggtacacatcacagagagaaccctcaatatcatattttagaatgaatggatagaggctgaattaatttgattctcaggctttcagtaattaatttgatactcagtcttttaagcttttttcttaattgtgtgacctgacaaatatcagtacctctgtgtgcctcttcagtttactcatctgttacgagagctgtctttccattttgagaagtcagtgagctactacagccaacagtgctgagacctctcaggctcattaaactttgagctttatgcctttttgcaaatgttctagttcccaaaacaatattttccagctagttgaggctcagttctttttttatgarctaataacccaaacttggcacttcagagatttaaagcaattttaatattcagtgaaatattaaacggactaggagtaccagctcctgcaatttcaagctgcaagatcttayggaagctttaaattttctgcaagtctcagcatcttttaaaataatattctaaaactgtaatttaaaaattcaaggagtttgtactagatttcaagtctccagcctttgtttgcactttagagatcataacaaaagtctgctgatgcaaatttgcacacagttgctgataaaggtgaagtgagagaagcttttttctggagcacccccagcttgctactttattytcttttctttaaattttgggtggagatggatgaacaggccttgcttataccttgcatatcaaacacacctttcagaaaaccagacaagcactgggagactcttaatgcctttgtgtaactttgtttcactgaactwaataaatttagatgtaattyagcatttgcaaatatgaataaaaagttgtttattggtcttagaaaactgttttggaatgtggaacattaaattgctttatagcaagtttatctgtgactcctaaattctcttgaatatagctrttagagtcatatgcttgtttactggtaacctgagtttactagtaaacatgtcaatagtattgctcagacaagaaaaggaggtaaatcacattcgtttataattaaatgaaatttagtttctatcctctaaactttaygattatattttcattttcctaggtgatttcaaaaggtgtaatcattcttcatgggcaacagaaaattgagatcaacgaaaatggtgaggcctctaattttagcatataatttaatacaaatagaatgctttaattgggatatattttacatttttctttaaaagtcacaatcctcccattttaggactgtttactgccccctaaactacccttggggaacatgtaaagacatgtgaataggcacaatgccaaatgaaaaaataattacttaattaatagtgcattaattatattccaaacactactataatgggaaagggycattgtccttccctttcttttccaagaaagacaggtaagtayttttacattcaaacaagaagggatttttaaaaagaaacaaaagtagactgaagtttgacgtaataagaaatgttcaactatttctttcttttataatttatggaataggttatgaactcctcctagaaatgcyttataaattaaatttggtgggtyggggcagtctctttggcagtgggtaggatggctagaaactcartggagggtttctgcaagatgacagtcagctatctcaccaaagcactttttcggtttgaaattttcttttcacagggaggaagggcatattttccatttctatagacattaaccctgaattagcgccctcagtasatatgcttgtctatagcttgcatcctggaggagaaatggtcactgatagcacccaattccaattgagaaatgcttcgaaaatcagktaggtgccaaaaatgattcttttttaatttgggggaaaactaaggagaacttaagagastgttgggtttaaactcccaatttttcatagaattgcaaaatgaaaaataaaagaaagctatggagaagttaatatgttggatgattgaagagtagcaggattatagcattcactttggatgttgttccaaatccrgytgttcctaataataatattattaggtgggtaaagcacagaaagcccttttaacttatgtgtgtttttaaaaaagttaagaatagtctaaaagatgattcttctcatatggcttgccrtccttttgcccttttattttcattttcaggtcaacttaaatttttctaaagaaaaaagtttaccaggatccaatgtcsatcttcaagtctcggctgcttcaaactctctttrtgctctttgggckgtagaccagagkgtattgctactaaggaattatggtcagctgycagcacaaactgtgagtgattaaaaccatctttgtttacyaccmacagtatagttttatgtctttacctttggataaaaacaggataccttaaataaactagaggagaaaaaaattgtccagagttccaggcataaaaaatattttaggttagaaatcatgtamaatgactctactccaattatactgattctcttatggaaaaaatgascaacacttttaaaaataaataacaattgctaaaggtctactatttgacacttgctctactgagtattcccrtatctattatttaattttattctcatattaatmaaccctatagaactaatgcagtattcccattttgattaatgtctaatcttaggctcagggagatttagtaaattaaccgagaacattctctaacaatgtccttgaatgagtcctcaaagagtattgagcagtgcctttatctggaatgtattaaaatccagttgagcctcatggactttttgttagttttaatrtgatttagycagcarttatttaactgattaaatagtatttcaaagtttttacagatctaagatcctatactttctcaatatgtgtttatttggtataggtatgatgacagttctacayaggatattcataggattatataggttatttatatactgcttgtggggaaaaatgaattgttttctatgaaaaaatacagttgaytctcttctamcatctaggtgtatagtcagctayattccagskwactacatggctattayttcagaggacttaacttagaagatggccttaaagtgccrtgtcttgaagatggacatatcctttacaatggaatttattacacacctgcatgggctgactttggaaaagatggctatgaccttgtgaaggtaaggcaactaagtcttaaaatggtgaatatatgtgacaatatataaataaatagaaatattcatggtgtgggtttttaatctcagaattcttagagtacaaatttacaattagtactaatgtctgagaaataatatctcaaataatgttataatagcaaaaagacttaataaagttcttatagttataattatataatagttataatattataaagctataatagttattctatatagttacaataaattatagttataatatatttttaaaagttgtattaatataattttatttaaaagttataaagttataattataaagttataaggttattataatgttataataaggttaagttataaggttattagaacttcattataaaactataataatattttaaataactaataatattataatattaggaaaagaactaatatgtgagggaattatcagctttcctgacataatattatgtacattatatactggtgtctaatataaatccccattttgctcytacgtctaccctcgaatttgatttctactattttaaagtattctactatatttaaagtgtttataagtgagatamtatccctagttcaacaaaaatgccaaattcaaagtagtgaaagtayagtggggtatgatatgagatgtctttttttgtcctctcttatttaaaggttttcatcaacagctcttaattaggaaaatagagcaaaagccattagaattagagaaactaaggaactcaaagacatgraatttaggaaaygtcagtgaagtatctctaaatatatgacaattagagatggagaaataaataagtggaaattgaaaatatacatagaacaaaaaaccagtccagactgctagtctatgttgttatgtgatctaaaattgattttatcttgaaaggcaacaggattaaagatttttaccaactctcacctccggaaaccagtattgtgcaaggattctaaccatcttgamtctactgattacatacccttaggtaagtcacagtataatgcgaagggcaggtgacaggttataatctcttaatgcttttaaactgattgggaaaagaggggagrtgattattttcttttgctttgtcttttaattcatttaatgtgcctgtcatgtcagatgytagaaatacagtgagaataatgcaggtaaatctttatattcrtgaagtttacattgaatttgggatgcagacaatatacaaatggctgcatattgtcatttgtatatttcttgtgttgctgtaaagaaatayttgaggctgggtaatttacaaagaaaataggggccaagtgcggtggctcacacctataatcccagcactttgggaggctgaggcaggcagatcacctgaggtcaggagtttgagacaagcccgggtaacatgttgaaaccctgtttctactaaaaatacaaaaaattagccaggcgtggtggtgcatgcctctaatcccagctactcgggaggctgaggcagaagaatcacttgaacccagraggcagaggttgcagtgagccaagattgtgccattgcactccagcttgggcaacaagagtgaaactccttttcaaaaaaaaaaaaaaggaagaaaataggttaaactggctcacggttttgcaggctgtgcagcaaacatggtgctggcatctgctcggtttctggggaggcctcagaaaacttacagtcatggtgaaagacaagggggagcaagtgtctcacgtggccagtatgggagcaagaagaggagaggcgtcacacacttttaaacaatcagatctcacaagaagtcactcaccattgcaagaacagcaccaagcaatgaagggtctgcccccatgacccaaacacttcctgccaagccccacctccagcactggggataacagttcaacctgagatttgaggggacaaatattcaaactatatcaatggcataatttcagatggtattaagtgctctgatagttaatctttcctgaattattgctacataccaagcaacattctaagcattttacaaatgtcaacccatttattcatcacagtctatagattggaagctattaactgcaacttatcaatgagaaaaatgaagcttaggcaggttaagtaacttgtccaatgcaacagatgctaaataacagagatgggattataatccagacgttctgatcccaaagaccatgtttctctatcgtgagttactatctctcaaagaactactgtaaggaaaataaaacaagataaaggaaaagagcagaacatcaggacgctattttattttatttttattttttttttattattattgtactttaagttttagggtacatgtgcacaatgtgcaggttagttacatatgtatacatgtgccatgctggtgcactgcacccactaactcgtcatctagcattaggtatatctcccaatgctatctctccccccgcccctgaccccacaacagtccccagagtgtgatgttccccttcctgtgtccatgtgttctcattgttcagttcccacctacgagtgagaatatgcagtgtttggttttttgttattgtgatagtttactgagaatgatgatttccaatttcatccatgtccctacaaaggacatgaactcatcattttttatggctgcatagtattccatggtgtatatgtgccacattttcttaatccagtctatcattgttggacatttggcttggttccaagtctttgctattgtgaataatgccgcaataaacatacgtgtgcatgtgtctttatagcagcatgatttatagtcctttgggtatatacccagtaatgggatggctgggtcaaatggtatttctagttctagatccctgaggaattgccacactgacttccacaatggttgaactagtttacagtcccaccagcagtgtaaaagtattcctatttctccacatcctctccagcacctgttgtttcctgactttttaatgattgccattctaactggtgtgagatggtatctcattgtggttttgatttgcatttctctgatggccagtgatggtgagcattttttcatgtgttttttggctgcataaatgtcttcttttgagaagtgtctgttcatgtcctttgcgcactttttgattgggttgtttgtttttttcttgtaaatttgtttgagttcattgtagattctggatattagccctttgtcagatgagtaggttgtgataattttctcccattttgtaggttgcctgttcactctgatggtagcttcttttgctgtgcagaagctctttagtttaattaggtcccctttgtcaattttggcttttgttgctattgcttttggtgttttagacatgaagtccttgcccatgcctatgtcctgaatggtaatgcctaggttttcttctagggtttttatggttttaggtctaacgtttaagtctttaatccatcttgaattaatttttgtataaggtgtaaggaagggatccagtttcagctttctacatatggctagccagttttcccagcaccatttattaaatagggaatcctttcctcattgcttgtttttctcaggtttgtcaaagatcagatagttgtaggtatgcggcgttatctctgagggctctgttctgttccattgatctacatctctgttttggtaccagtaccatgctgttttggttactgtagccttgtagtatagtttgaagtcaggtagtgtgatgcctccagctttgttcttttggctcaggattgacttggtgatgcaggctcttttttggatccatatgaactttaaagtagttttttccaattctgtgaagaaaggcattggtagcttgatggggatgtcattgaatctgtaaattaccttgggcagtatggccattttcacgatattgattcttcctacccatgagcatggaatgttcttccatttgtttgtatcctcttttatttccttgagcagtggtttgtagttctccttgaagaggtccttcacatcccttctaagttggattcctaggtattttattctctttgaagcaattgtgaatgggagttcactcatgatttggctgtttgtctgttgttggtgtataagaatgcttgtgatttttgtacattgattttgtatcctgagactttgctgaagttgcttatcagcttaaggagattttgggctgagacaatggggttttctagataaacaatcatatcgtctgcaaacagggacaatttgacttcctcttttcctaattgaataccctttatttccttctcctgcctaattgccctggccagaacttccaacactatgttgaataggagtggtgagagagggcatccctgtcttgtgccagttttcaaagggaatgcttccagtttttgcccattcagtatgatattggctgtgggtttgcatagatagctcttatgattttgagatacgtcccatcaatacctgatttattgagagtttttagcatgaagggttgttgaattttgtcaaaggccttttctgcatctattgagataatcatgtggtttttgtctttgattctgtttatatgctggattacatttattgatttgcatatattgaaccagccttgcatcccagggatgaagcccacttgatcatggtggataagctttttgatgtgctgctggattcggtttgccagtattttatagaggatttttgcatcaatgttcatcaaggatgttggtctaaaattcacttttttggttgtgtctctgcccggctttggtatcaggatgatgctggcctcataaaatgagttagggaggattccctctttttctattgattagaatagtttcagaagtaatggtaccagttcctccttgtacctctggtagaattcggctgtgaatccatctggtcctggactctttttcgttggtaagctattgattattgccacaatttcagctcctgttattggtctattcagagattcaacttcttcctggtttagtcttgggagagtgtatatgtcaaggaatttatccatttcttctagattttctagtttatttgcgtagaggtgtttgtagtattctctgatggtagtttgtatttctgtgggatcggtggtgatatcccctttatcattttttattgcgtctatttgattcttctctctttttttctttattagtcttgctagcggtctatcaattttgttgatcctttcaaaaaaccagctcctggattcgttaattttttgaagggttttttgtgtctctatttccttcagtgctgctctgattttagttatttcttgctttctgctagcttttgaatgtgtttgctcttgcttttctagttcttttaattgtgatgttagggtatcaattttggatctttcctgctttctcttgtgggcatttagtgctttaaatttccctctacacactgctttgaatgtgtcccagagattctggtatgttgtgtctttgttctcgttggtttcaaagaacatctttatttctgccttcatttcgttatgtacccagtagtcattcaggagcaggttgttcagtttccatgtagttgagcggttttgagtgaggttcttaatcctgagttctagtttgattgcactgtggtctgagagatagtttgttataatttctgttcttttacatttgctgaggagagctttacttccaagtatgtggtcaattttggaataggtgtggtgtggtgctgaaaaaaatgtatattctgttgatttggggtggagagttctgtagatgtctattaggtccgtgcagagctgagttcaattcctgggtatccttgttgactttctgtctcgttgatctgtctaatgttgacagtggggtgttaaagtctcccattattattgtgtgggagtctaagtctctttgtaggtcactcaggacttgctttatgaatctgggtgctcctgtattgggtgcatatatatttaggatagttagctcctcttgttgaattgatccctttaccattatgtaatggccttctttgtctcttttgatctttgttggtttaaagtctgttttatcagagactaggattgcaacccctgcctttttttgttttccatttgcttggtagatcttcctccatccttttattttgagcctatgtgtgtctctgcacgtgagatgggtttcctgaatacagcacactgatgggtcttgactctttatccaatttgccagtctgtgtcttttaattggaacatttagtccatttacatttaaagttaatattgttatgtgtgaatttgatcctgtcattatgatgttagctggttattttactcgttagttgatgcagtttcttcctagtcttgatggtctgtacattttggcatgattttgcagcggctggtaccagttgttcctttccatgtttagcgcttccttcaggagctcttttagggcaggcctggtggtgacaaaatctctcagcatttgcttgtctgtaaagtattttatttctcctttgcttatgaagcttagtttggctggatatgaaattctgggttgaatattcttgtctttaagaatgttgaatattggcccccactctcttctggcttgtagggtttctgccgagagatccgctgttagtctgctgggcttccctttgagggtaacccgacctttctctctggctgcccttaacattttttccttcatttcaactttggtgaatctgacaattatgtgtcttggagttgctcttcttgaggagtatctttgtggcattctctgtatttcctgaatctgaacattggcctgccttgctagattggggaagttctcctggataatatcctgcagagtgttttccaacttggttccattctccgcatcactttcaggtacaccaatcagacgtagatttggtcttttcacatagtcccatatttcttggaggctttgctcatttctttttattcttttttctctaaacttcccttctcacttcatttcattcatttcatcttccatctctgataccctgtcttccagttgatcgcatcggctcctgaggcttctgcgttcttcacatagatctcgagccttggttttcagctccatcagctcctttaagcacttctctgtattggttattctagttatgcattcttctaaattttcttcaaagttttcaacttctttgcctttggtttgaatgtcctcctgtagctcagagtaatttgatcgtctgaagccttcttctctcagttcgtcagagtcattctccatccagctttgttccgttgctggtgaggaactgcgttcctttggaggaggagaggcgctctgctttttagagtttccagtttttctgttctgtttttttccccatctttgtggttttatctacttttggtctttgatgatggtgatgtacagatgggtttttggtgtggatgtcctttctgtttgttagttttccttctaacagacaggaccctcagctgcaggtctgttggagtactgggacgtgtgaggtgtcagtgtgcccctgctggggggtgcctcccagttaagctgctcaagggtcaggggtcagggacccacttgaggaggcagtctgcccgttctcagatctccagctgcatgctgggagaaccactgctctcttcaaagctgtcagacagggacatttaagtctgcagaggttactgctgtctttttgtttgtctgtgccctgctcccagaggtggagcctacagaggcaggcaggcctccttgagctgtggtgggttccacccagttcgagcttcccggctgctttgtttacctaagcaagcctgggcaatggtgggcgcccctcccccagcctcgctgccgccttgcagtttgatctcagactgctgtgctagcaaccagcgagactccgtggggtaggaccctccaagccaggtgcgggatataatctcgtggtgcaccgttttttaagcccgtcggaaaagcccagtattcgggtgggagtgacccgattttccaggtgccctccgtcacccctttcttcgactcggaaagggaactccctgaccccttgcgcttcccaagtgaggcaatgcctcgccctgctttggctggcgcacggtgcgcgcacccactgacctgcgcccactgtctggcactccctagtgagatgaacccggtacctcagatggaaaggcagaaatcaccgtcttctgtgtcgctcaagctgggagctgtagaccagagctgttcctattcggccatcttggctcctcccctccacagtcagtaattttttaaaaaatccctcacaggtaaattatcagcctctatctaagcacatacaataatgaggcattttgattacagaactgctctgcaataaatgagagttttaacataaaaattgaaagtactcacttttcaatgtatatcttcaaccaaaaatttagagcaacctttctcaactgttatataagaaaattgctttattgtttaactccacagagaatgtttcgagagaccatttgatgcataaatagtaccattcaggatatataggagagaatggtactatttatgcatcaataaatgtaatattaattcattacattcagtagctgtattggagacttagagataattctgttacagaactccggatggtaagggctaatttaaagttcctagcttgtttttcttttctttaattttctcagaactcttagaagtaatcagcctggtatcgttctatagcagtggaaatttgtggtccccaaatgcttgctgtcaataggcactttgtcaatggtgaacaggagattatttgattatctttttcaccagtgcatgatagggagtgctgaattttcatgccttgatatttatataattttcactggagtccacttcagttaggcagacacccatccctaaggtctcacttctatctttctcaaagayattctgcctcattaccaaagcacatgagctcctggaaagataaatatctaaatattctataaaatactgaatattacctcactaataacatctgagatgagaggcaaagattatgactatcaggaataaccagaatttggggccaaattgtcttcattgtaggwctaacagagaccrgatccatcttctggttatttattcattttccaaatgtgtaggtataattgacaagtctagcaatgatcagaattcccactgtggctcctygtgtgtggaataaacacattggagtggatgtgaaaaggttctgcctatcttatcctmaatgaactagaagttgccattatactcacagttccctgaaaataaactcttccatggcctccccatttcactcccttctgattcccagtctcagaacagagcatctcaytggtcgagcctgtcatttacctgccccctggattcaaggtaatctgggaatggagtcttctaacttctttactggaagtgaaacgcatatgttgggaaattaccaaagtatatgacaagtctacaaatggcctgaggtaaagatgtacactcttttataagccttaacaaatgtgtggcaagatgatcagggatttagaacaagacacattaagggactaattccaaggaagttgaggaatgaaattatattaaagggcttgtttctgtctcttctagagatatgtctgggaaccaaggtacggattggtagtggcttttgcagaatacttgttttccatcctyargaataggagttgttttcatttagaccttttaggatccaggaaagaagtatattttcattaacatgcttaagaatagtttcactgaattggaagctgagagtattatctggccatttggagattcccacatccagkcstctgggataacacagccaaactgtcaagaaacartacatttactgatatactttggggacaggaggatgaatgcaactaaatggatctcatggagcccctccatgtcccacaatgcagtctttacatttcatggaargagaatgttaccctcccaccacgttcaagtggaaccatctatggatcagattcctcaatttgtgaaattaagaccacacaactggtaaagaatcttaaggatctacaggcttcactgcaagaaaaaaaaagaaaaggaataaaaacatcctagtaactttttartaaattcctttactcctcaagttagcaggagagacgtaatacatttcatctctcaacgtagatggctttgataatttacttcaagcaggatcagacatttttttttacttgtatcgattggtcttgtacagatttatagatttttatatttaaagaacaatatattctatgtaagtaacatggatttagatataaaaattctgcttggctcttctaagattatttctccgagcttctcacatacctaatctccarataagaaggatctaataaaaatgaatgtcaaaaatatgagggcccttcattgcatmacttttgtaacactcaataattcatccaatcaattttgattagggttgaagttctgatttcactctgataagaatggatttgcaattcacaattccagcagaaagaacaacctggagctaattatctctaagaatgacagtattacacaccaarccctgtgagtcttcaaggcctagctagttcacaaaacatctttaatttgtttactatacaagtactttattgatgtaccagcactcttcamtatcaaaatattgacgcaaaaggtagccctgtcttcatataaaatataattcattatggatcttccagaataaaaatctaycctaaaacagttgctaaatgaacttattatgacagcttgtgtgtgtttatttgtgtaaactcaatataacattttggcaaaatatatattgaactatccatcctaaacataatctaatagggctrttttcttcttgagattacttctgcaacaagttagcaaaactatagcagagatggccagttttattagtacatcaaaaaatagacctatcagaataaacttttggcctgaattcctcatgttatgtatttaaatatttagactaggactggtcacttctagatgtaattsttccaarggttcatattttttttgacttggcctgggaagagatagaattaaatatacaaggaaaatttaagtaagttttgttaacgtgtaattcaatttgattagaacaacaattattaagccaacactttacttagacatctataccctgattacagaatgtgaattgcagccataatgcaagaaaattatatgactataataacaaggagcacagtggcttaaaattttaagctaatatgggctgtgaacatgtcatatacatttttgtgccttgagcayttggatcagtccttggaacacatctgacactctacragtgttttaaaattttatttaatytgaaaagaatgaagaaggaatgagttctggtgttctattgcacagtaggmtgacaatagtttacagtaagatttagcaaattacaaaatagctagatgagaggtttttgaatgtcttcaccataaaaaaaaaagataaatgratgaagtactggtaacactgccccaatatgatcattatactamatatatagatatgtgtgtgtgtctgtgtgtgtgtgtgtgtattgaaacatcaaattgtacccccccacttttttttttatttttgagacaaagtctcactctgtcacccaggctggagtgcagtggtatgatctcggttcactgcaaccttcacctcccacgttgaagcgattctcctgcctcagcctcccaagtagctgggattacagaggcacacgccaccatacccaactaatttttgtatttttagtagagatggggtttcacaatattacccaagctgrtcttgaactcctkggctctagtgatctgcccaccttggcatcccaaagtgctaggattacaggtgtgagccactgtgccccgccaattgtatcctttaagtatgtacaattacaatactttaaaaaaagaaaaaagaataaaggcagtacaagtttktatgaccaaagcatagtgtataatcctctaagatttatagacattagggttcttaagccctcacaggctctaccaaaagctacttgtttgtttcataagagaaaatattggcctaaaataacccttgtgaaactatccgaaactatccgaaatatggcagcaaagggtaatactctcatacaaattctgattgtttatatttttttcattattttctaggatcctcaaaacaatyggatttttcaawggcaaaatgtgacttctttccgaaatattacccaactctcgttccaactgatttcagaaccaatgtttggagattactggattgttgtgaaaagaaactcaaggragacagtgacacaccaatttgctgttaaaagatatggtaaccagttgctatttgtagctgtcctrtgtagatgaagagtttaaaggatggaccaacacaacatttrtgttagacttaggcaggagtaggtgaagctagaactggttttctttgtctcccttccttgacctggttggcttygtcatcagcactttgctgctcctctctccttccccagtatccttattctgattcctgccttctttttcccctagaaaatatacattttttctagaatccccacagtcttctaggagagatctaagagattgcaatagaaagaaaatgtgaggccrggtgtggtggctcacgcctgtaatcccagcactttgagagactgaggygagtggatcatgaggtcaggagttsgagaccagcctcaccaacatggtgaaacccagtctctactaaaaatacaaaaattagcccagcgtggtcgtgcatgcctgtaatcccagctactcgggaggctgaggcaggagaatggcttgaacccygtaggcagaggttgcagtgagccaagattgcaccactgcactccagcctgggcaacagagtgaaactccgtctcaaacaaacaaacaaaaagaaacaaaatgtgaaattctgargatagggaaaagaaaagaaagaggaagaattaatcattagtgagacaccaccatgtagaatggtgccacacaatttggggcaaatgatacatagctcatacagatggagggtacaaggaatcatagtaarctatatgactgcaataaggtttgcttgcctgtgattgtgsaggctaacgtatatttctcttcgtttccagtgctgcccaagtttgaagttayggtcaatgcaccacaaacagtaactatttcagatgatgaattccaagtggatgtatgtgctaagtgagtatttattcagagatttaccttcacaagaaaacacaaagctcagagagaatgagaagtgagattaaccatraaactttaattatttatatgcttacattartgttrttagagaagcaatgaatcctcaytgtagaaaatttgaaaaatatagagaaraacacaagacattacctattattaatttgaccaactgccattaacattgtaatgtcactaacattgtaagtktcctctaattttaatgaatattttccatgactgcaatcatacttttctatttataataattaagaaaacatgcctwcrtattatgccaatcttttcatgaattccaattttctgctgcacatatttttatgtgactatacccaatttaattattttattatataatatgttggctgtttcattttgttttcctggtaattaataattttgcagtatatgtctttgtgtataacatataataggtagcttttgaatgaaaaattgtttacttaagaaagatttccagaaaaggaattaccaagacaaaatatgtaacattcttttagtcttctgattgccatactcctcactaaacatgttgtgccagtgtaggattctagcagctggtgtgaaattctcattgaatctttactatcatggcatattttcattaaaattagaatatgagctattgaaatggcaaagtgaagataaagcatcttatcaagttaatctgaattatttgaattctcttaatgtaaaaaaatctacacgatttcagaaatttgtattttgtttttggaaaattatttttaatttttttttcttttttactgccttttctcaaatttctaataataatttataaacaattggccaggcacggtggctcacacctgtaatgccagcattttgggaggccaaggtgggggagggatcatccgaggtcaggagatcgagaccagcctggccaacatagcgaaaccccgtctctactaaaaatacaaaaaattagacgggcatggtggcaggcaccagtaatctcagctactggggaggctgaggcaggagaattgcttgcacccaggaagtggaggttgcagtgagccaagatcatgccacctcactccagcctgggcgactgagtgaaactctgtctcagaaaaaaaataataaaataaaaaataaaataaatgttttttgaatgtcaactagtttgttaagctctgcatatatcattaccacagtgctatgagataggagctattgtcatctgtattttataaagaaagataataagacacagagaattaaaataacttatcaacagtaatggagcttgttgatggcagaactaggatttagacctaggtttttcagcttcaaagctactctcctaatcaataactgtcatatactttataaaaacagttaacaatattaatatttgccatatttgttaagcactttgtttaatttatgacatgaaaattacttgcctttgagtatttccagcagtctattaaagatacattgattaaagggctgtctaatgaacgtgcaagsgtggttcttaagatgcctttgatgccccagagaatcttgcaaaccagttttcagccttcttttttttttttcagtagcatttcaaatcttcttttgactttaggaaatgattataaatttttttctaagttttaatgaagagtagttgaaaataccagaatttaatatacgtaatagatgagagactgtgtagatcactgatgttaaaaatgatgaggtgataaattyaagytggaagaaatccagaatmctaaacaggtttcactagaaaagccaaacgcaaagccagagctttcagtggcattaacatctcatttatttatctgcacgatagtatgctaaaaacaaaacccacaacacattggaagaacaaaaatgtttctcaaacatggcctttggaaaatacttgcaaacctcatgctaacatggaactggtagttccttagcagtatgtcaggttacaatccatgatcctgatttcttgaaatttctttgatgttgtattttggatagagttatattaaggagtaaatcagtatcagcaataataatatcctgccaggaggccaggcagctagactggagctgtgcttgctacaaagttatttctgggcagattgtgagagcactgtttctagaaggttcacgtcagttgtatactgtgtctcaaattgtatgatactgtgtctgtgtttctttagccttttctgggatttagcttggaatggctagagaaaacaagaaaaaaattggattattttagcaaacaaagtcagagatgacttaggcttttaagagggaagaaaatttacctacagacgaagagattttaatacactgcattagcattcactgaaagcttttcaaatcacgaagggattattctgtcctgtttttaaaatttaagctacatgtcttataggcatatgttagcttacagataatacaataagacttttattktataaataaaaracattaagtagaaataagaagaaatgttcaggtataatatgtgtggccagatctaagtctggcctttatataatcatgaaacctgacacatgattttattggtatgawttgactcagaatctcaaaagtgttaggaatttttaaatagaaagagaaaaaggtgagtggaaagaaaagggcacaggctatggagtgaggcagatctgagttcgaattttagtttcatcaattacaatgtggagaagttacttgacctcattttacaaatcagggtcactgggaaaaataaatgatatatatcagtgtccaacarttagaaaaaagtaatataatctgtgaaaataatattcacttttattatatgctagttttacatttggttgtctattaacaaaacaaaaaactccaattgactggatttgcctttggttgaacctttacaaatcttgtgttgtagttttgtgttttaggagaaaatgagatactcaaactggttatatttttggtcaaagcataaccagttcatgccagccccatagcctttatatttagtgagtggtaaataaaaattcgtgtttaaaatgttgatctggaaatgtttcaggatcctgaatcatccaagttttatatacatatatatttttctgataaaagggaaagtgctgcaatgttatgatgtttctatcagattaaaatatatttttaaaaaactcaatttaagcattaaatcatattcaatgagattttagattattttagattctgccttaccctgaattcaattttttaaaggcagccaaatcctcctgagatgaaatgcccagtttaacctgaattctgtggggaacctaaaccctcaccaatagggagaattcctaattcaatttggttagactgggttactcacagtttagagacttcctatataatttctgaagaagatcataaaatattgctatgatattgcttatctgtaatcataactacaccttcccccattaggtacacctttggccaacctgtgcaaggggaaacccaaatccgggtgtgcagagagtatttttcttcaagcaattgtgagaaaaatgamaatgaaatatgtgagcaatttattgcacaggtacagaccatgatctttactccaaaaaaagttctcactcatttttcattcttattctttctttgatttcatttataaggggarcttaacaatactattttcattttattgataatggagtttgcagctaaataaagtgaagaaagagaagaaaatacagtgcttaaagcagttttttattccatagaccatgtaaattgttctccacctatagattcatgggatttttagaatatgaaaggtatcgtgggctttgttgttttrtatatcgcctaggtrgccttcctgatttttctttggagaatcgttaatcatcctttaaatgagtctgtgatattactctccatgccacctggatttttttttagtggaaacagcttacttkcaatcaactgcaattcagagtacccccactatrttactttagacttgcagttcatatgtgaagtcatcatttgctctatctgcagcatcctaaccttaagtgaacarctcttcctatctctttgaaattgtcttttgactccccaaagtgaagcttgtgtaygccacatagttcatattttaagtccaattgtcctaaagttactcatcaaatttagtgaacatcctctaggtaaatatcaataattgacaaagacaagcagaatcctacctttacataggaaatgcaggcaaagaaaactagggtggaatttytccatgtcagcagtacattctgatagagttcagtcaactgttttacacaatgatgggtgttccctcagcaaatggtttatttttttcccccatgtgaaaaaaatacccataaacaatctggtagaggctaggagcagtggctcacacctctaatctgagcatgttggaaggccgaggcgggaggatcatttgactccaggagatcgaaaccagcctgggcaacatagtgagccccttctctacaaaaattagccaggcacagtggtgcacatctgtggtyccagctacagggaggctgaggcaaragaatcactggagcccaggaggtcaaggctgcagtgaaktgtgttcgcaccactgtactcragsctgggcaacagagcaagacctgcctcagaaaaagaaaaaaaaaaaaaatctgtccggtggaactatctttatatatgagaggctttatttacttgaaataaatttcttagagtgagtttcctgagtcaaaggaaatatagataatgttcatagacagataattttaattttaataaatattagcatattgctctcctaaaagtttttaggcattcaaattcctgtcagaagtacatgagaatactatattttccaaattactttcagcaatatatttagaagttttaaaagtttttgtcattttgatagacacaaatttagcttgttttaacttgtgctatctaatttckatttagtttgagcaacttttcatatttttgttatcaatttggatttgagaactcttaattacccatgtttttctgttcatgtgaaatggaaactttcagtgtaagtactgccttccatcctmcaagcattttttttcaagccyrttatttaaataggcaactcatttactttgtcatatttttgacatacccaccttccttatgttcctgggtttccagccttagaaaaaaaatctcactggcccctgtgttgtacatgtggctatctaagtatgctcttaagattgtttacaattttctaatagacataaagttcacttccaatgatgttctaaaatgggaatttttcttccagatgtgggctgtgttgtgttagcacctatctcacaattttgttctctctcactctttgtcctaaatcatgcccacgaaagtttcgtctattttattggttcttatttttactattttctttcttttattattttgtgttcctaaataatttattttctctttcatcttattaattctttttyctaatatttgtagttgattttgttggggtttaaaaaatatattagctgtttcttttagtaataagcacattcactgttttacatttcttctgaactgcagctgaataccattgactttgatgcgaagtattttttcattactctaatatctggattcttattggtttactttatgtattctctttgtttcaaggattcctgaaaaaaggcttttctcttattttcgaaataattaaggttcttctgatcactttctatgatttcattttaatttgactatattatcattagacaaaataaaattgcttttgttgttgatgtaatggctgttaatttaagatagagaagcacatactctggagccagagcagctcctcagcaccaccgtctcttagctgtgagatcttggacaggttacatgatggacctagtttagtttcttcatctatatagtaagataataacagtacctagctcatgtaatagttttgagtatcaaataaactratatatccttataacattttaaatctggaataaacactgtgttrtaaaatataactaaatttatatttctctrattattattactgatgatagattaactatagattttttgttattttaaataagcaatataccttaaaaagtgtttgttttgttgttacacatgtgctgagcgcttctgttccatctgttttagtgcctttctagatgattagaatttcttcctcttaaaacactgtgaaccaaaagtatctgagacagatgtcaatcaatttgcaaagcttatgttgccaaggtgaaggatgtacctatgacagcctccagaggtcctaccaacatgtgcccaaggtggttgggctacagcttgcttttatacatttcagggagatgtgagacatcaacaaatatgtgtaagatgtacattggttcggtccagaaaggcaggacaatccaaactaagggggtttccaggtcataggtagataagagacaaacagttgcataaagaagaagtctttgaggccaggtgcagtgattcacagctgtaatcccagcactttgggaggccgaggcgggcagatcacgtgaggtcaggagatcgagaccagcctgaccaacgtggagaaaccccatctctactaaaaatacaaaaattagccaggcgtggtggcaggtgtctgtaatcccagctacttgagagactgatgcaggagaatcgcttgaacctgggaggcggaggttgcagtgagtcaagattgggctatttcaccccagcccgagtgacagagcaaggctctatctaaaaaaaaaaaaaaaaaaaaaaaagaataagtctttgtctttgatcagcctttcactgaatacacaaattacatgtgagaggaggatagaggaatagtcactcctgccttagtgtggctcagtaaatctgcatttttacataaactattaggcagaggaagcaatcagataaatcagatatgtatttgtctcaggtaagcagagggatgactgagtctgtcttttgtcccacgcctgtaaagataagctatgaatttatattgccagggtgaatttccaaagaactgttttaaggaaaagttcttgaggcccacaaagaatttccttgtgggcaaattgtgagggaggtatgtagtttttatctttgtagctaccttatttgggaataaaatgggagacagatttgcccagctgttcccagcttgccctttccctttagcttagggatgttgggctcctgagatttactttcctttcacaataccattcagcttcatttccatcctttaatcttttctcatctacaatgtttccaggagaatttccttgaaatctgtaaaatacagattacctccttcccttatttaaaatgctgatgtaaatattcgcctcctcctactcctcctttaattctttggccatttcaacaagtttatgaggtagagccgtggcacggggtggggatgttaatatatttgtgcaaaaaccatattttaaaagacacttaaaaaaacctcttggatctctaacattttaattataccttctctttatttttcagttggaaaatggttgtgtttctcaaattgtaaatacaaaagtcttccaactctaccgttcgggattgttcatgacatttcatgtcgctgtaattgttacagaatctgggacaggtaattactgtattttttggacgacctggggatatatgtatggcaacttactgggagaagcttgttgagttagcactaagtacaaaattcagattatttctaatttaatacaactgggaatagttgcaagtgcaaaaattattactgaaaaatttacaagattgcacaaagtgagtgttcaataagtatttgttaaaagaatgaaagaagaggccgggcacggtggctcacgcctgtaatcccagcactttgggaggccaaggcaggtggatcacctgaggtcaggagttcaaaatcagcctggccagcatggtgaaaccctgtctctacaaaaatacaaaaaattagccgggcatgatggtgaatgcctgtaatcccagctactcgggaggctgaggcaggagaatcgcttgaacccaggaggcggaggttgcagtgagctgagatcgcactattgcactccagcctccagcctgggtgacacaccaagactcagtctcaaaaaaaaaaaaaaaaaaaaaaaccagaaagaagggagaaagagattaattatttaatttggagtgggaaaatcagatttaactactaattatttcttgttatttaaaaaggagtttgtgattatgccattgtaaagtgctctatataagcatacttgatcaatatcatgatgctattcacactgggcaagctggtcacatttatattgctgtggatggtaacttagatattttcactctgctgtgttcatcattccttacaggtatgcagatcagtgagaagacctcagtttttatcactcaattgcttggaactgtaaactttgagaacatggatactttctacagaagagggatttcttattttggaactgtaggtttgactaaagaatacatgcttccatttcattttcttggatcatagattgccctttgaaaatttctggtcacttttttcctacttttgtaatacattttaagcactactatgtctgaggtgctagaaagtgtcctagattgaaagaagcaatagataacagtatcattttttccatactttatattatatatctatgtatttaatagagcatctttctgtctgttggaatttaggaaaatgactagggatcacatttatgagtagaaaactatttctctgtaaaaatgtaaacattttgtgttttaagtcatgttaattattcttttctcgtacagcttaaattttcggatcccaataatgtacctatggtgaacaagttgttgcaactggagctcaatgatgaatttataggaaattacactacggatgagaatggcgaagctcaattttccattgacacttcagacatatttgatccagagttcaacctaaaagtaagacatcaaagaacagaagaagaccattagacatcccacagaggatttggatatcagaaatgttaaacattaggaatatctcaaaagatagcttgtatacagaatmtattttaaagaaaatttaaaatgtaacttattttataaatttgcttgttcactaaataatacatgagaatacttgttcaagaggatgggaagctaaaagtctatcacgattgttataaatttgctaacaactaatattttcctytaggaaacaagaagtagctcatgaggatgatttgactttcttcctcagatcatttcatgcatagataggggagatcctatactttctgtttattttcygctgcttaaacagaattttgcagttaaataatttgtcagtgttcacatgtagctgaaagaaacagaactgaaacccaattctgtggcttcaattaaagtgtaaaaaacataacaattcaccatcagtctaatgaaatatttacacartctttcatggtcacgttttgtatacaaagagcaggtgctattattattttgattccaataacttaacattaaaacgtcagccacaagctgagattcctccctactctggagagttgagaagcctccattctcagtaacaactgtcttcggatgtcatgatactaagacccttcactttcttttgtcatctcaggccacatatgttcgacctragagctgctatcttcccagctggttgacgcctcagtacttggatgctcacttcttagtctcacgcttttactcccgaacsaacagcttcctgaagattgttccagaaccaaagcagcttgaatgtaatcaccagaaggttgttactgtgcattactccctaaacagtgaagcatatgaggatgattccaatgtaaagttmttctatttggtaagtctcagtcagtgggttcctggaatcctgttcaattgcacgtctgcttagcccagcacagcttagaaakcatgcatcagtcatgccacggtgaccagagtaagggcagccttctcactttgctggtgaatactgttcgatccattaacaacaaacaaacacatagaacgatctaaggcaattaaagtttccctaaggttgaagaacttgctgttcagagtccacttgtttaagcattcaaatgtaactcatatcaagtatttatgacactttgtaatagtaaaatattgggcagatgccagaaagtaaggtggaaagcttatkttgataagcagtaaaaggactttattctcttggttctgtccattttgtctttctaaggaggagcccccaacctttgtggcaccagggactkgcttcatggaagacaatttttccacagatggggtggggatggtgggatggcttcaggatgattcaagcatattacatttattgttcactttatttctattattattacatactcaccataatgtggaatcagtaagaaccctgtgcttgttttcctgcagctagatggtcctatctgttggtgatgggagacagtgacagatttttaggcattagattctcataaggagcgcacaacctagatccctcacatgtgcagttcacaccagggcttgtgctcctatgagaatctaataccactgctgatctgacaggagctcaggtggtaatgcttgctcaccgcactgctcacctcctgctgtgtggcctagtacctgacaggccatggataggtacctgccggtacacagcctggggactggggccttctgctctaagggctattgaagagtgataagacacagacctggaaattaagacattaacttgaatcccccaccctctcctagttagcatgcaagttagtgcatcttggacggattgtttgaactctttaacccttggcttcctcaggtgtacagtgtaattggagattataagacttacctcttagggtaagtgttctgtgtcaggcactgttataaagattgtatatgtgttaactcatttaattagccttatagatatctccattttacagataatggaacagaggcaaacaggtaaaacatcatgttttaagtcacaaagttaatgagcaggtgaaggcgtatttgaaaccggacagccttgacaatttcagagctttatgtgccactttgcacagtgcattgcacatagttcacaaagtttccagtacatgatagaatctcaatcagttttagtcactttctctgctcttttccaacttacgcaaagtctatttttaatatttgcttgtggaagctaccctatcttatggaacagaattaccattaagtaatgaattacctaatctcaatatgagaatatgatgacatcagataatatattgcatgttatgttttctttgttccacacagatgatggtaaaaggagctatcttactcagtggacaaaaggaaatcagaaacaaaggtatacataatgtattcattttaaaatatgtgctctaacttcattttttcttgttaaggatatatagacattatatatatgggaattatatatattaagaaaatatatttagtcaaacatatatgtgtgtgtatatatatgtgtgtatatatgtatgtgtatatattatatagtgaaaagaagttagaacgagcacttatttcaatttgtggatgaaggtaatagttagcacagcctgagggaagctactaaatgtcttgacgaaggagagttctacctgtttcttttattgtcagatcattgagtacattagaaaagaggtgtacaaccgcatattctcactcataggtgggaattgaatggtgagaacacatggacacaggaaggggaacatcacactctggggactgttgtggggtggggggatgggggagggatagcattgggagatatacctaatgctcgatgatgagttagtgggtgcagcgtaccagcatggcacatgtatacatatgtaactaacctgcacattgtgcacatgtaccctaaaacttaaagaataataataataataaataaaaaataaaaaaagaaaagtggtgtacaaaatcccagtattgttattatctaaattatgcagtcttctttatttgtgtatgtacttcctattatttgatttatttgtcttgaaaacagggcccaatttactctttctgtccatgagctattctcttttatctaagtgtaccagtgattcaggaaactttcagcatcgtatctcttcgtctcctatttacacagcctggaatggaaacttctcgttcccactcagcatcagtgctgatctggctcctgcagccgtcctgtttgtctacacccttcaccccagtggggaaattgtggctgacagtgtcagattccaggttgacaagtgctttaaacacaaggtgatgtttctcctatttctggcctgagaagtgggaacagtttgctccctgctgtcttctcgcctgactgctatcaccttcacgtgggaaacttacactcagtgctggcataattgaattattaggggatgtgagaatcaccaaacacaatgcatgatccttggcagcagtgccaatcctgagacggcagcacgtggtgaagggggtctcctgcaaagaaagctgagggtgagagtgggcaaaggaaatacmgtatagaaatctataaggatttattcaggagagattaaatgtattcagatcatctttacataaaatggtctctactctcatctcttttttttctctactttaggttaacataaagttctctaacgagcagggcttacctggttccaatgctagtctctatcttcaagcggcgcctgtcttattctgtgccctcggggctgtggatgggaacgtccttctactgaaatctgaacaacagctgtcagctgaaagtgtaagctctctgacttcctcgtttttcatgtttctctggactaccagaagtcttatccttcagatgatgtcttgaacatgttgaaaatattgaatgttttcttcctttgttccttcgtggattatatacgtatttttcttggctatcctaagagcatgcttataacaatacagaatttgatagataattataacagtttaggaattttacaactgtgatttttaaaaatcataggtgtaatcacagawgtggaaacttggaataaaatgaaatctctatgttcaaggatatgcttggattcagtgtaaagttattatctataaatggatattgtattttcttaaacatttccagacctggaattccagaagttcacatccaatttatttcgcttaacaattgttggatattttccgtttatttctaacacaattacatataaataactattgaaatttatgatcatatttaaatctaatttaaattgtgtactttgtgcaaagtatacaaagacataaagaaggaaatctttaaaatcatttatagtcctaacacttaggcatctttatagttttgctgtaatttttcaagtctcttttctgaaggcatatatattttacaaacttgagatctcaccaaaaaatagttttgtattttgctttcaacattctrtagtaagtccagttttaagtataaaattatagaattcagtaataatattgaataactatrgatcattatataaaacatttttctcaatgcaaaacataaatacatttaagttttctattacagrgagcaaaaatacttttagttagaagctttcagaatctgaggggrcatcaacaaataaaggataaatttatctataaatatggaatatggccatgtgctgtgctcacgcctgtaatcccagcactttgggaggccaaggcgggcagatcgtttgtgctcacgaggtcgagaccagcctgcacaacatgatgagactctgtctcccccraaaatataaaaaatgagcagggcacagtggtgtgcacctgtgatctcagaaacttgggagattgacatgggaggatcacttgagccctggcgggggcagaggttgcagtgaaccaagatcgtgccactacactccatcctgggtgacagagcgagaccctgtctcaaagaaaaaaaaggaatatgtatatatatatgtgtgtgtgtgtgtgtgtgtgtacatatatatgtttatatatgtacacacacacacacwccttttttttcccttgagagtttcatggattcagagtaaatagcttctgctcattctttctacagttggaggtggcaatatcttaggaaaactgcctcaagaaaagaccatcaagggacctcaaaaaraaaattctagaggcattwttcaggggtctcagaatatatcagagccaaaagagrttgcccttgtttattattgatagctatattaatagtataaatcaagtgaagttctataaatgagtgaattccaatttatattctataagtttrtgttattttttgtattatctatgtaagcttagtttttagttttaaataatttttaaaagtgcaagaattacacagagaactcccgtagacccttggcctgattcaccagtttgtgaacatttcrccrtacttgttttctctttctcactctctccamccctacacacacacacatacatacacacacacacacacacacacacacagagtttatgscatttcagttttttctgaatcatttgagactaggttacatacatcagtctattgtgaaagaaaaatacaaacaactccggaccccaattcacgatgctaaaaggacaaaaaatgaggctgaaaactgagtcatggaagaagttgtttttcttttgttcctaagcagatagctactttttcttccttgttagattagttrgtggtttacctattttgccgagttttccaaaaacatataattttaatttattaatgtgatgtaatatgatgtgaggttttttgctactccatcacattaatttctatttytatcttyattatttccttactggtgctgtattttgttgttatttttagctttttcacttagaaatttacttcattttcattaatttattttattgggctaggtgtttttaagcctataagtttttccatgatttstacttttgaagtatctcatagatcctgatacatagcaattgcaccatttttatttttcagaaattcygtaatttctgtttgtattaaccctttcactgaaaatttacttactggagtactttataattttcatataaaaaggaatttattttagagttttcttttaaatttcaagttctatatcttcatggycagcaatatttccaccrgtatatttttgtgcccaaatatataatgagtttttgcgaatatatctcatgtgttgagaagatatagtctctattatcagtttgttttctatccaygaggttggattattttgatyctttgtattcttacttattttgtaaaatttatttaaccttcttctgctgagtgatgtgttaaaataccctacaaatagtgctctgtttcttcttgcatcttctgtagtttctgcatagataatcataactgttgtgcctttattatgaattgcagcttttagcagtaagtattcttctctatcttgtttgatgtcttttggccttacttctacgatttccgataacaggaggattgcagcctttgcattcttattattttcctttacttttcctttggatttcaccttttgaartatgcacttcacttgttttttgtatgaagtacagcattrtgttttgttttaamtatgcatatctttgtcttctaaaggagaataaagtctattcactctattgatatgatgtatgtgttaggcctcagctctatcatactatttttcttatgattctgtattgtatttaaagctactttatttctttagcttttatgtttgtttkttgytatcttgcttaaagcttctttgagtattcaggctagcttgaatttttattttagtggttatttttatatttacatattttataatatcctaatatcctaatctcattttttcttgcttaaccttaatatctagtcagttatggccgggcgcggtggctcacgcctgtaatcccaggactttgggaggccaaggcgggtggatcatgaggtcaggagatcgagaccatcctcgctaacacggtgaaaccgcgtctctactaaaaatattaaaaaattagcygggcgtggtggyrggtgcytgtagtcccagctactcaggagactgaggcaggagaatggcrtgaacctgggaggcagagcttgcagtgagccgagatcgcgccactgcactccagcctgggcgacagagcgagactccatttaaaaaaaaaaaatctagtcagttatttttaatctttgagtcttaactgctacctacacaacagtcagtaatctctagtttccacttttctctccctcttctctcattttattgttgcatctttccttttttgtcagaatatataatgtttacattctgtattgtttctcctattcatcaagtcttactaatttcctgagtcatcttttggttacataaagctcattctccaggaggctgggacgggaagattgcttgagcctgggagatcgaggctgctgtgagccattatcataccactgagcttcagcctgggcaagagaatgagamcctgtctcagraataaataaataamaatttttaaaaagtgcattctctrctagagtcctcaggayatcacataagtatagaattctctgacattttcatattcagaattattttttctaaagccttaataaatgaaagacaggtatttgtatattaaatctttggtttatacattttaaaattttttgaaatgctaccttactattgacttgctttgaatatgccttttaatagtgctgacattagtttaattcattttccattatgggctactttatctctatgtctgaaggccttgaatgttttttcccctttatacttagtttcagtaagaatgtgttattctgtagaagttttgccaggtacacagtggagtcatgcaatatgtaaactcaaatcttcttttattttcagatagttcccctgaattataattgtaaatattggtctttccattttttttgttctaaaaaaatctctgtacatttgttggatcttccttgcctgctttccaattcaatcactttgtgacctgttttaattcattctttttcagttttgttctkttgtttttcctctrtgctgcttttaaagttttctctgaacaattttctcttgatgtccttgtactttagagtttatttatgatataattttgtctagttttcctgagttcaataaagcctcattttatttcttcttgggttttgtccatttctgtattttcttaatwgaatttctgactcatggtgccttttaaatacctcaaatacatgcttgagaatatttcactcatgttaaattattttggcatggcttttctttgtttacttatttatttacttagtgactttagtggagargtttcattagctgaagtgttttggtttgcatttcctattttctcttacagmagctttgtatggagttgattttttctagttcttgatattttgtgcagggtgttcataggtgaagagcgccctttctatttttttttttttagtaaaatgcattatttttaaaatgttggtgatggaaatgagggtggagggagttattttatcctatgacatcctttccttttttaaattccctgtmtccaaggatctgcatacctcttcttgtgatctgattatttccccttagccatgttttttggaagcttccacttccaggcccattcastccaagccctttccctgtgtgctgtactgggaactgttgagtccgaaaactatratttgtatttttaacaatgctagactttctcttacctggagttgacttggtgtgtgtttcttctcatttctccatgccattctgctctstttttctctgcagtctcttaagccttccctctgcaatagcagtagaagctctcttggcatttggtgtttgtttctctactaagaaataatttgaagatcatggtattctctgwattgtagtaatgttaragatattagtcatgagtatccttacttgttctctttgttgattttatgttttcttcagaagattatgtaagaagatttaaaatcaggcagctaagattattctccagacttagaaattctagcattataattgaytgtstgtacaatgggccttggattaatcaatagtcaggcattgctttcttacattctctcttaaatcctgcgcccaagctgagaaattctgtgaacatgacatcagttgcctaaaacaaaactggtttgctctttygaaaggaagagcttatgtgaaaatactggattaaatatgatggccgtsctcttaaagaaaagaacaaraataaatggtacagtagacaatttgccaattttgtaattttaaaagaagtgcttaaaattattgggaaatgttttttctcataggtgtataacatggttccaagtatagagccgtatggttatttctaccatggcctcaatcttgatgatggcaaggaagacccttgcattcctcagagggatatgttctacaatggtttatattacacacctgtaagcaactatggggatggagatatctataatattgtcagggtaagatcactaaggattttggaaaatatttcatcrcaatttttagtattcataatgcatattaatgttttcttaattatgtagttttcttcctatactttgagattcgtgtctgtaatctgccaatagagtacatagaaattgtcttataaaaaggagatattaattttgttgattttaaaattttctgctgaaaataaatcatgtagctataattacaaaacctcacttaaaaaaataagacagyctccaattaatacaataaatcttatgcaaagattgtcaaatcaagaggctaagagagtgtggactccagatatccctaggccattaatgagacatgctgagccttccatgaaataatctytataattaacatcacaagtgtgtaagaaaaggggtattgaatcagacaractttatcaggttccagttctttaatttactgagtgtgccgggtgtgtgtgtgtgtgtgtgtgtgtgtgtgtgtgtttgatgttaattagggtaatgatagtgctgatctcataagtattttccacttaggatgaaatggagaataatggaaaatacttagaaaaatgctagcacataataagtgctagataaatcatagtgattataattttttctctaaattagggattttccataagtcaaatagaggtaagttgacttgtaacttctcagacctttgttaacacagaaaatatggatacttatgatccatttatctttgcaatataaataataggccttttatagttcttgcatgaaaagaatgaacaatatttttgttgtttgtttctttaaagaacatgggtctmaaagtctttaccaatctccattaccgaaaaccagaagtatgtgtgatggagagaaggctgccactccctaagccgctttatctrgaaacagaaaattatggtccaatgcrtagtgttccgtctagaattgcatgtaggtaatcttacatttttttgttgggggatgaccaaaccgctttgtggaatttagtgtatttgggataaatgatgcaattttggaattttatgtgtgaattatgccatgtttttggctacaattagacatcctatagttggataaagcagaataagacagactagacrtgcttttggctataacaagaaattagcttcagatgtgagatgtagtttatttttattgataaaatacaatgtcagaaatacartcatgcttcacttagtgatggagaatttgttctgaaaaatgcattgttaggtgatattgttgtgcgaacrtcatagagtgtacttacgcaaacctagatgctgtagcctgcaacacacctakgctatgtggtacagcccatttttcctaggctacaaacctccgcagcatgtgactatactgaatactgtaggcagttgtaccacgatgataactatttgtgtatctaatcattgctaaacatggaaaaggcacagtgaacatgtggtatacaagataaaaaaaagttatacttttatatagagcacttcccatgaatggagcttgcaaggttaaaagttactctgagtgagtcagggtacaaatatattttctttgtttacattcttattctataagctttttcctatttttaaattttctttaacttttatacttttttgtttaaaacgaagatgcaaacacacacattaatctaggcctatacaaggtcaggatcatcaatatcactgtcttctacctccacatcttgtaccgctgaaagttcttctggggcaataacatgcatggagctgtcatcatctatgatagcaatgccttcttctggaacatctcctgaaggacctgcctgaagctgttttgcagttaatttttttgataagtaagaacagtacactctaaacagtaaacagtatagtatagtaagcacaaaaaccggtaacatagtcatcattatcaagtattatgtactgtacaaaattgtgtctgctatatttttataggactggcagtgcagtaggtttgtttacaccagcattaccacaaacccatgaccaatgcattgcactacaacgttatgatggctttgatgtcaataagtggtaggaatttttcagctccattctaactttatgggaccactgtagtctaagtggtctgtcattgatcacagtgtcattatgtggtacctgactgtgtagrggaacaggcaatgtatggtgatacaggaaaacagtcatagtaagtgactgtgatacaggaaagtgaggtgttttatggagaccttacaccctgataatatatagacyataatttgcagagtccaaggtctgaataaggtacttcttcctttttttttttagctagtggaatcagaggggagaatgctgactatgtagaacaggctataattcaaacagtaagaacaaacttcccagagacatggatgtgggacctcgtcagtgtcgagtgagttttaaccattttctctcctrtgtgtctttatttctattttctttttctttcttcakgtttattcctgggtatataaaacagtaccatatttgtaaaatatrtatcattgatttgcatgtacttatcatacattttattttatttttttctctagcattgttttcccttcaccaagagtttctcttctattcattttatgcagacagatttaacctgccccaattaaaaaaaaatgtggcgtttaaagaaaaatgacctttctatactcaaattttataaaaatccagctctcattatttttatctaatgccccatccaaacaatataactcacttttgagcttcagtcaatacttttctgcttgctctgcacttaattttaagttcttggttcagacaaagaatgtgttttacygataacctcttcttccagttcctcaggctctgccaatctttygttcctcattcctgatacgataacccaatgggaggcaagtggcttttgtgtgaatggygacgttggatttggcatttcctctacaaccactctagaagtctcccaacctttctttattgaaattgcctcacccttttyggttgttcaaaatgaacaatttgatttgattgtcaatgccttcagctacckgaatacatgtgtagaggtgmgttgttctgtttgatctggaggcaaaaatctaacaaagctaaaatatttcttaatatttccatattctctttatcctcaagtgcaaaatgctactataaaggtrtaagacttaggtccrtattcctcaaacaaatacaattgctttcattcacagtgacagtttaaacagtgtattgagcatggtgtttcatagtgatgtgtgttccagtgctatcctcattgccatgattgttttcttagatttctgttcaagtggaggagtctcagaattatgaagcaaatattmatacctkgaaaatcaatggcagtgaggttattcaagctggagggaggaaaacaaacrtctggactattatacctaagaaattgggtaagcagctatctgtctacaccagtcacycatggaaaaaccagcccatatttattgtctccatttactttccttawattgtctatacaaacgtgattttctccctcacatttttaaaattcttattgtaaattctccattagaaattctaatctatagtaatctaatttctggttgttaatgctgtgtagatcaaaaccaccattcatttttacaagagcataatgtaattaaaatacaatataaatgctaactggcatgacctatcayggactatatgtttggcatatgccatatcccaaaygaaggccatgytatcattaatgccaccttaattatttgacttctcgctgggtccttcacctaccatcatgaacccaggccaccttcamgaaaattgctgctccatcacaatgaccaatgagggaattgtcaggtttgtaaatttactagatgtgccatggggataccaaaatcactaaatgattggattgagatmaaaaactgagaatattgtcttagtgcctatgctatctgcaagatggaaaaataaacttgtctcctattgaaatattgaaaatacatggaatggaaaaagtttaaaaytctagtaaacaaggaatgctagatacratgtgcgtgacacttttaatcactacttttaaaaaatggycattcaaatkttctttaatgtactatattcattgtattattttaacagcaaataatatatctatgagattattttagctcagttgtgatgctgttctcagactatttttctaytagatttgaagtttctcaatatttctactgcacaagatcttcaaaatcctaccttggcaattgagacagaataytgtaccaacttgtatagttttatgacattaagtcgaagacacagttttaagagtgaaatagcaagcttcctgagacagagaaacamtaaaacmcaacaacaacaacaacaacaaaragaacaatatattggttatgtatattggtatatagtcacgtaaataatamtaaccttaaargaatgattgttttcaatcctgtaattttyacaagcaaggaaactggagatcagttctaattacataatgtgaaatcaggaagtttaaaaacaatggattccttgctaggacattatttcaatccagtgcctatctactatatcatattttactatgcttgcttgattttgggaagttaggagccctagttcgctgacattattagcctatattgtcataagtaacctttataaacaatcaatatcargaaattgactcagacaactttgtaaaatgttacttttcctaaaatttcttaagttttaattaagtaaatttatcatttaatgtaaggaatcatgaaaatcatggaacaggtgaaatggaagataccacattatacctaggaaggagaagaaataagttattttgttctaagcattaacttaatgatagaatttggttaatccaattcaagacatggttcacagactctagtcatttctcattacagaagggaccaatgatcaatttaatttatatttgggaatgtcttccaggtaaagtgaatatcactgtagttgctgagtccaaacaaagcagtgcttgcccaaatgaaggaatggagcagcaaaagctaaactggaaagacactgtggtcmaaagcttcttagtagaggtatggatatgcaaacagtcaagcttttcctgaaaagaaacagacatctaagaggttttgtaytaaaagatcttctcattgaagagacttaattagttgacaacatttacttttgacacaagacatgccattttaaatgaattaaaacagcataaagttcatcctttctttaattaatacctcacccaggatagtaaaacttaacatttgaaayagacttgacaattttttgtttgtttctgagtcaagatgtttcctgtacacctatttctcttccttctctttttcygattctcaaattcaagagacaaatctayttgtcctacactcccrtgcagttcccgtcatcctcaacaagaatcagcacttgtcagaggaacactcttgatttgcctcttggcaatccctgctccacaaagcacttttagttgtttactggagatgctatacaggatcagaggagctgagagtgtcmcacagtgacatcaagataatgcctgtccaagctacagaacgcagaggctaaaatgggtrccrgtgatgtcccgtgccttccagatatgaacaaaaggggamsatgagttggatcttctctcagggataaacttgcaccagccatgcttragtgagctggtgcttaatcacttttccttcatggacagaggatctagactcattcttctgtgcttgtttgtgttattctttgacagcctgaaggtattgaaaaggaaaggacccagagtttccttatctgtacagaaggtaagaggatcttttagggagtcaaattagtcctaaataaaattcaccaaaagaatcagktcatgtcctctccttccacatgagtccatgtgccctgtgatttcactttaaataactcrtggaggattcttgtgtttcatgctttatctttatggtataaktttakccatcaaaaagaatattcaggaggtggtttttagttcactttctgaggctggtctgctcctatctattttttttyccatcatgtgtaytcttagctcctcttatgatatggttgtcacacaatattggacaatgagatattaggattgaggcccaatagcacataatataatcttggcttttgtactcttaggagaaaataacccatagatacwtcactgcccctgcmcctcagtctccggttttatggccatgaggggtattattttacctggttgatggtgatctgattatactccttyatcwgagtcttcaagctttaccttttgtgtgtgttgttttatgtgttacagtcagtgtagtttttacattttttcatacataaatagttcaggcactaaaccagtgaagaacgggggccacaatctaacacacagatttrtatgccattttctgaatgtactattatcctaaactgggtcaaaactccaaattcatctcctctaataaacaacttgtaaaataaaaataagtaatggaatcttatttccaatatgtttatcccccaaatctgctgatataaagaagccatcacattttttaaatcagtattttcattctaggtgccaaagcctccaagcagggagttttggacttgccaaaygatgtaghagaagggtcagccagaggctttttcactgttgtgggtaagttgawyaaattttgtgtttcactatgatttgaaaatcttggttgaggtggtctttaaaaatccttaaaataayagaatrgagagatyttcctaagctatcaattggagggaattattgwtcagatcatcctctakgtttcctgatgggatctaaagggattacagtaccgtttccggacctgtattcccaggaaaccttagcttgggtagatggtaactagtgttcagaaagcaagaggttctttataatcattaatctgaaatatgaaattcacctcttggagaatcgaattaacgttgcctgttaatgatgttgggagttttctcaataaaaggagaaatgtttgttgttgatacgaaaggcaaacttctttgtctgttattaacatgaacatctcttggaagggatggattacactttgtaattcataggrttgattgattaaaaaaaaaactagcaaacaagcaaacaaatgcattctcctaacttcctcctctctctagtaatgagattttcagaaatatttttcatagcagtttaacttcacccttcatggctgtctcttctttcaaattgcttcataaaactttctttgtttccaccatttagactcaattttaaatgttacctatttcactatgcctcttttgtctatagttattaatgctgagatggcaactataaacaatacagctttccgcttttcctgtttttaggggatattctaggacttgccatgcagaatctggttgttctccaaatgccctatggaggtggagagcagaatgctgccctactagcatctgatacttatgttctggactatctgaaatctactgagcaactgacagaggaagttcaatctaaggctttctttctcttatctaatggtgagaagawttaagtaatttctgcccataattkttgaaagcaattgttactcrtaccaagaygtcataagctgtttttatgcagtagtctggtgaaagaaaagtgaacctgaaccgaggaactctcagtcctagcgctgttttccgtctgacttcaaaatctgtgtggtcagctagcktcataatttacagctgcaaagttttcaagctatgcacttaatttttttttaatgtctggtattttgcaagctaccttgtttattgttgttattattgttgtttttgttaggagttgttgtcagtggttcatctatcarcgtctgtatttgtttgctcagctgtggtctgttgcagtgaagtgattggctttgtatacasaaagagggccaatgttgtgaamtgtgaggttaaggamaagtccaggagcataaaataatcttctttggtttttcttctcagaaagataacactgaaataaaatgaccttaggggaaatatactgaatagttagtaggtaccaatgacgaggcaattactgagccagacatatccatgtgtattatcttgtgatcaaaatcctataaagtaagagttattttttctcccttatgaatacagaacctgagtttcagaagttcaaatggaaatgatcatcctagtgatttgtgtctaacaccaatacctagggcttgcactgcactattctttctcttctaactttcttaggttaaaaaataatttcctacaatgttctattttaggttatcaaaggcaattatctttcaaaaactctgatggttcctatagtgtgttttggcagcagartcagaaaggaagcmtatggtgagacataaaaattttattttatataatataggaattacctgaggagggcttgcaaggaggtgaaggaggatagagttcagtggggatttagaagcaaagtgggtttcaaagtcaatttacrgaagagaaatagataaaactaaagatttagtgattccaattctaatgcaacaatgttccttcagtctcatgacgatttgcttagcagtctgatcccttcatgacagcccctakacatgcaccgctggttaactccaccgaagagggcacggcacgtcttactctgtgcttctcagagtcccatatagattcgggaaagtgaaattagaaggacccaaaatacctaattacatcatttctctctccatgtgcagataatctaatgggctatatacaacaggacctttgggtgcaaacatgctgaaaattacctactctaatttccacttattgctagtcataatattttcctgacccaaaggaaagggccactaacaataaagatggtttacagtagatgagttgaatgcatcctttactcaaagggaacartggtgatgaamctgtggaattgctgacattgtcacttcctctttatctaacttttgctttggtgatttgtattacagrctcagtgctcttacttttaagacaytggagagaatgaaaaaatwtgtattcattgatgaaaatgttcaaaaacagaccttaatctggctttcaagccaacagaaaacaagcggctgctttaagaatgatggccagcttttcaaccacscctgggaggtgagagaggagaagcaccaggctttccttgttcctgggcattgcctgccttgccctgcctctggctttcctgatctggaatatgaatattcttcctgtgcmtatgaaaccttctgaggcactgcagtcctgggcctgtggtgggttggtcagcagcaccattcctgctttgtgcatgtttaactacagcctggatgtgactycttctgagtctcttgtctgccttattcagtctctagtccttcccgagtcagtcctcttcagaaattaaactagaaatagaagggaggggagagaaagggaacctagaaaagaaactttcataaatttggagacagtcaatgtataaagggagggggctgtgagtgtatgaggaaggaaagtttattcctgtccatgaatggcaagaaagttctggggagaatatctagtaattcatattgtttcaatgaagcaagtttttctaagaccctctcaaggaaaaattcaaaggccaagcttgccccggggccaaagtacaaatgaggtgaagtatatccttggcaaaatccaacccttttcctgtccatatttacgtaaatccctcccttccaacttcctttctttgcagatacctgtccatctccagcccatyttctatctcctttcccctccttttttyccctgtggttgctcaaaatctcctatcatggcattttagcatgctctgatggcccctgaaataccctgagcttttcttcagcatccttcctcataatcakcactcctgttcttgaaacccagaatgcatatctaatccacacactctgatatttaatttgcatgcaaattgtattcaaattgctttgtggtatttttaatgtattccaaacttattccttacaacaggaggaccctgatggagawgagctcttactccttcatagaaaaatcaaaaactttcccacgttctcttctaaaacatcttcacatctttcttcttattggattcattactggtgaatcattgctgattactgctacagtttgtctgatcttacctagtattttctctataattaaatatctgtgtgggtgggtgtctgtgtgtgttttgagttgagagaaataaaaatgcaagggaaaaatcaaagcttacactgcwgaggaatggtgatcccacttgctgtaatttagatgtactgacagtcctcgtacctcatgttagtgtctaccatatgctgttatttccatcttaaacacttggtttctcagaagtatttcttttctgaagaagacaggagttgtcctttgcttaaatagataaaatgggaagcttcacaannnnnnnnnnnnnnnnnnnnacggtcctggaggaagaaaatgatattactttcaatatgacagaaggtggacacgcccccactgatattgtttctaattgcaaggtgggagaggaggatatgacacgcgatatcgcagggagtagaaacacccctgtgatactgttcttaatattcagggaggaagaggatgatattactcccaatacagatgggtgtacgccctctgtacactgagggtgtacacccgtctgtgaaacagttcataatctccggaggtctccagagggggagatgatattactcacaatatggtaaacaggctgtgagtccaccgtggatcctaagagccagggggggaagaggggctggctctcagtcaccacagcatggggggcctttatgttcaggttttgcccaagagtcagcttatttgcttctagtactagcagggtagttgctgccaaggccctccaacaggggggccatcttttagaaaccctgtctagttgtttagagacgtaggccactggcctcagccaggtccccacagtttgggttaaaagtccagctgccatcttttctctctctgaagcatacaatggaaaaggctttgtcacatcgggtagccccagggctggggctgccagaagtttttcctttaactcatgaaagccttcctgttgttgggatccccattggaaagctttccggtccccaccccctttgtgacctcatacaaaggcttggctaatactgcaaagtttggaatccacagtctacaaaaccccacagctcctaagaattctctaacctgccttctgcccttaggctccggtagattgcaaacgacctgctttctttctgatcccgggctgcgttcggacccctgtcgtatagaaaatcccaagtaaggtacctgccgtcggcagatctgagctttcttcttggacacctaatacccacagtcctccaggtgggtcctaaggatcttaggatccgcaatgggggtcttagccagtgggggaagaggggctggctctcagtccgtgcctcacggggggtgcctcccccgcctgcgatgggggtcctaagagccaggggggaaagaggggctttctctcagtctctgcctcgcggggggtgcatccccccactgcgatgggggtcctaagagtcagggggcgaagacgggctggctctcagtccccgcctcgcggggggggggcctcccccccgggatgggtgtcccaaaagccagtgggggaagaggggctgactctccgtccccgcctcgtggtgtgtacctccccccactgcgatggtggtcccaagagccaggggggaagtggggctggctctcagtccccgcctcgcatggggtgcctcctcctccctgcgatgggggccgaagagcgagaggtgaagaggggctggctctcagtccctgcctcacggggggtacctcccccgctgcgatggctgtcctaagacacgggggggaagaggagctggctctcagtacctgcctcgcgtggggtgccaagcgcctgcgatgggggtcctaagagccacggggggaagaggggcaggctctccgtccctgcctcgcggggggtgcctctccccgctgtgatgggggtcctaatagccagggggcgcagaggggctggctctcagtccccgcctcgtgtggggtgcctcccccccccgcaatgggggtcctaagagccaggggaggaagagaggctggctctcagtccctgcctcgcggggggtgcctccctcaccagcaatgggtgtcctaagagccagaggggaaggggggctggctccggtacattgcaaatgacctgctttttttctgatcccgagctgcgttcagacccctgtcggatagtaaatcccaagtaaggcaccttctgctggaagatctgagctttcttcttggacacctaaaacccacagtcctccaggtgggtgctaaggatcttagaatccgcggtgggggtcctcagccagagggggaagagggggctggctctcagtccccgcctcgtgggggatgcctccccccctgccatgggggtcctaagagccaggttgaaagaggggctggctctcagtcccagcctcgtagggggtgcctcaccccctgcgttgggtgtcttaatagccagcggggggagaggggctggctctcagtcccagccttctggggtgtgtctcaccctcctgcgatgggggtcctaatagccccggggggaaaggcgctggctctcagtccccgccccgtggggggtgcttccctcccgcgatgggggacctaagagccaggtggggaagaggggctgcctctcagtccccgcctcgcggggggtgcctcccccgcctgcgatgggggtcccaagagccggggggaaagaggggctttctctcagtctctgcctcgcggggggtgcatccctccactgcgatgggggttctaagagccagaggggaagaggggctggctctcagaacctggctcgcggggggtgcctcccgcccctgcgatgggggtcccaagagcccggggcagaagagttgctggctgtcagtccccgcctcgctgggggtgcctccccccatcgcgatgggggtcccaaaagccagtgggggaagaggggctgacactctgtccccgcctcgcggtnnnnnnnnnnnnnnnnnnnnnnnnnnnnnnnnnnnnnnnnnnnnnnnnnnnnnnnnnnnnnnnnnnnnnnnnnnnnnnnnnnnnnnnnnnnnnnnnnnnnnnnnnnnnnnnnnnnnnnnnnnnnnnnnnnnnnnnnnnnnnnnnnnnnnnnnnnnnnnnnnnnnnnnnnnnnnnnnnnnnnnnnnnnnnnnnnnnnnnnnnnnnnnnnnnnnnnnnnnnnnnnnnnnnnnnnnnnnnnnnnnnnnnnnnnnnnnnnnnnnnnnnnnnnnnnnnnnnnnnnnnnnnnnnnnnnnnnnnnnnnnnnnnnnnnnnnnnnnnnnnnnnnnnnnnnnnnnnnnnnnnnnnnnnnnnnnnnnnnnnnnnnnnnnnnnnnnnnnnnnnnnnnnnnnnnnnnnnnnnnnnnnnnnnnnnnnnnnnnnnnnnnnnnnnnnnnnnnnnnnnnnnnnnnnnnnnnnnnnnnnnnnnnnnnnnnnnnnnnnnnnnnnnnnnnnnnnnnnnnnnnnnnnnnnnnnnnnnnnnnnnnnnnnnnnnnnnnnnnnnnnnnnnnnnnnnnnnnnnnnnnnnnnnnnnnnnnnnnnnnnnnnnnnnnnnnnnnnnnnnnnnnnnnnnnnnnnnnnnnnnnnnnnnnnnnnnnnnnnnnnnnnnnnnnnnnnnnnnnnnnnnnnnnnnnnnnnnnnnnnnnnnnnnnnnnnnnnnnnnnnnnnnnnnnnnnnnnnnnnnnnnnnnnnnnnnnnnnnnnnnnnnnnnnnnnnnnnnnnnnnnnnnnnnnnnnnnnnnnnnnnnnnnnnnnnnnnnnnnnnnnnnnnnnnnnnnnnnnnnnnnnnnnnnnnnnnnnnnnnnnnnnnnnnnnnnnnnnnnnnnnnnnnnnnnnnnnnnnnnnnnnnnnnnnnnnnnnnnnnnnnnnnnnnnnnnnnnnnnnnnnnnnnnnnnnnnnnnnnnnnnnnnnnnnnnnnnnnnnnnnnnnnnnnnnnnnnnnnnnnnnnnnnnnnnnnnnnnnnnnnnnnnnnnnnnnnnnnnnnnnnnnnnnnnnnnnnnnnnnnnnnnnnnnnnnnnnnnnnnnnnnnnnnnnnnnnnnnnnnnnnnnnnnnnnnnnnnnnnnnnnnnnnnnnnnnnnnnnnnnnnnnnnnnnnnnnnnnnnnnnnnnnnnnnnnnnnnnnnnnnnnnnnnnnnnnnnnnnnnnnnnnnnnnnnnnnnnnnnnnnnnnnnnnnnnnnnnnnnnnnnnnnnnnnnnnnnnnnnnnnnnnnnnnnnnnnnnnnnnnnnnnnnnnnnnnnnnnnnnnnnnnnnnnnnnnnnnnnnnnnnnnnnnnnnnnnnnnnnnnnnnnnnnnnnnnnnnnnnnnnnnnnnnnnnnnnnnnnnnnnnnnnnnnnnnnnnnnnnnnnnnnnnnnnnnnnnnnnnnnnnnnnnnnnnnnnnnnnnnnnnnnnnnnnnnnnnnnnnnnnnnnnnnnnnnnnnnnnnnnnnnnnnnnnnnnnnnnnnnnnnnnnnnnnnnnnnnnnnnnnnnnnnnnnnnnnnnnnnnnnnnnnnnnnnnnnnnnnnnnnnnnnnnnnnnnnnnnnnnnnnnnnnnnnnnnnnnnnnnnnnnnnnnnnnnnnnnnnnnnnnnnnnnnnnnnnnnnnnnnnnnnnnnnnnnnnnnnnnnnnnnnnnnnnnnnnnnnnnnnnnnnnnnnnnnnnnnnnnnnnnnnnnnnnnnnnnnnnnnnnnnnnnnnnnnnnnnnnnnnnnnnnnnnnnnnnnnnnnnnnnnnnnnnnnnnnnnnnnnnnnnnnnnnnnnnnnnnnnnnnnnnnnnnnnnnnnnnnnnnnnnnnnnnnnnnnnnnnnnnnnnnnnnnnnnnnnnnnnnnnnnnnnnnnnnnnnnnnnnnnnnnnnnnnnnnnnnnnnnnnnnnnnnnnnnnnnnnnnnnnnnnnnnnnnnnnnnnnnnnnnnnnnnnnnnnnnnnnnnnnnnnnnnnnnnnnnnnnnnnnnnnnnnnnnnnnnnnnnnnnnnnnnnnnnnnnnnnnnnnnnnnnnnnnnnnnnnnnnnnnnnnnnnnnnnnnnnnnnnnnnnnnnnnnnnnnnnnnnnnnnnnnnnnnnnnnnnnnnnnnnnnnnnnnnnnnnnnnnnnnnnnnnnnnnnnnnnnnnnnnnnnnnnnnnnnnnnnnnnnnnnnnnnnnnnnnnnnnnnnnnnnnnnnnnnnnnnnnnnnnnnnnnnnnnnnnnnnnnnnnnnnnnnnnnnnnnnnnnnnnnnnnnnnnnnnnnnnnnnnnnnnnnnnnnnnnnnnnnnnnnnnnnnnnnnnnnnnnnnnnnnnnnnnnnnnnnnnnnnnnnnnnnnnnnnnnnnnnnnnnnnnnnnnnnnnnnnnnnnnnnnnnnnnnnnnnnnnnnnnnnnnnnnnnnnnnnnnnnnnnnnnnnnnnnnnnnnnnnnnnnnnnnnnnnnnnnnnnnnnnnnnnnnnnnnnnnnnnnnnnnnnnnnnnnnnnnnnnnnnnnnnnnnnnnnnnnnnnnnnnnnnnnnnnnnnnnnnnnnnnnnnnnnnnnnnnnnnnnnnnnnnnnnnnnnnnnnnnnnnnnnnnnnnnnnnnnnnnnnnnnnnnnnnnnnnnnnnnnnnnnnnnnnnnnnnnnnnnnnnnnnnnnnnnnnnnnnnnnnnnnnnnnnnnnnnnnnnnnnnnnnnnnnnnnnnnnnnnnnnnnnnnnnnnnnnnnnnnnnnnnnnnnnnnnnnnnnnnnnnnnnnnnnnnnnnnnnnnnnnnnnnnnnnnnnnnnnnnnnnnnnnnnnnnnnnnnnnnnnnnnnnnnnnnnnnnnnnnnnnnnnnnnnnnnnnnnnnnnnnnnnnnnnnnnnnnnnnnnnnnnnnnnnnnnnnnnnnnnnnnnnnnnnnnnnnnnnnnnnnnnnnnnnnnnnnnnnnnnnnnnnnnnnnnnnnnnnnnnnnnnnnnnnnnnnnnnnnnnnnnnnnnnnnnnnnnnnnnnnnnnnnnnnnnnnnnnnnnnnnnnnnnnnnnnnnnnnnnnnnnnnnnnnnnnnnnnnnnnnnnnnnnnnnnnnnnnnnnnnnnnnnnnnnnnnnnnnnnnnnnnnnnnnnnnnnnnnnnnnnnnnnnnnnnnnnnnnnnnnnnnnnnnnnnnnnnnnnnnnnnnnnnnnnnnnnnnnnnnnnnnnnnnnnnnnnnnnnnnnnnnnnnnnnnnnnnnnnnnnnnnnnnnnnnnnnnnnnnnnnnnnnnnnnnnnnnnnnnnnnnnnnnnnnnnnnnnnnnnnnnnnnnnnnnnnnnnnnnnnnnnnnnnnnnnnnnnnnnnnnnnnnnnnnnnnnnnnnnnnnnnnnnnnnnnnnnnnnnnnnnnnnnnnnnnnnnnnnnnnnnnnnnnnnnnnnnnnnnnnnnnnnnnnnnnnnnnnnnnnnnnnnnnnnnnnnnnnnnnnnnnnnnnnnnnnnnnnnnnnnnnnnnnnnnnnnnnnnnnnnnnnnnnnnnnnnnnnnnnnnnnnnnnnnnnnnnnnnnnnnnnnnnnnnnnnnnnnnnnnnnnnnnnnnnnnnnnnnnnnnnnnnnnnnnnnnnnnnnnnnnnnnnnnnnnnnnnnnnnnnnnnnnnnnnnnnnnnnnnnnnnnnnnnnnnnnnnnnnnnnnnnnnnnnnnnnnnnnnnnnnnnnnnnnnnnnnnnnnnnnnnnnnnnnnnnnnnnnnnnnnnnnnnnnnnnnnnnnnnnnnnnnnnnnnnnnnnnnnnnnnnnnnnnnnnnnnnnnnnnnnnnnnnnnnnnnnnnnnnnnnnnnnnnnnnnnnnnnnnnnnnnnnnnnnnnnnnnnnnnnnnnnnnnnnnnnnnnnnnnnnnnnnnnnnnnnnnnnnnnnnnnnnnnnnnnnnnnnnnnnnnnnnnnnnnnnnnnnnnnnnnnnnnnnnnnnnnnnnnnnnnnnnnnnnnnnnnnnnnnnnnnnnnnnnnnnnnnnnnnnnnnnnnnnnnnnnnnnnnnnnnnnnnnnnnnnnnnnnnnnnnnnnnnnnnnnnnnnnnnnnnnnnnnnnnnnnnnnnnnnnnnnnnnnnnnnnnnnnnnnnnnnnnnnnnnnnnnnnnnnnnnnnnnnnnnnnnnnnnnnnnnnnnnnnnnnnnnnnnnnnnnnnnnnnnnnnnnnnnnnnnnnnnnnnnnnnnnnnnnnnnnnnnnnnnnnnnnnnnnnnnnnnnnnnnnnnnnnnnnnnnnnnnnnnnnnnnnnnnnnnnnnnnnnnnnnnnnnnnnnnnnnnnnnnnnnnnnnnnnnnnnnnnnnnnnnnnnnnnnnnnnnnnnnnnnnnnnnnnnnnnnnnnnnnnnnnnnnnnnnnnnnnnnnnnnnnnnnnnnnnnnnnnnnnnnnnnnnnnnnnnnnnnnnnnnnnnnnnnnnnnnnnnnnnnnnnnnnnnnnnnnnnnnnnnnnnnnnnnnnnnnnnnnnnnnnnnnnnnnnnnnnnnnnnnnnnnnnnnnnnnnnnnnnnnnnnnnnnnnnnnnnnnnnnnnnnnnnnnnnnnnnnnnnnnnnnnnnnnnnnnnnnnnnnnnnnnnnnnnnnnnnnnnnnnnnnnnnnnnnnnnnnnnnnnnnnnnnnnnnnnnnnnnnnnnnnnnnnnnnnnnnnnnnnnnnnnnnnnnnnnnnnnnnnnnnnnnnnnnnnnnnnnnnnnnnnnnnnnnnnnnnnnnnnnnnnnnnnnnnnnnnnnnnnnnnnnnnnnnnnnnnnnnnnnnnnnnnnnnnnnnnnnnnnnnnnnnnnnnnnnnnnnnnnnnnnnnnnnnnnnnnnnnnnnnnnnnnnnnnnnnnnnnnnnnnnnnnnnnnnnnnnnnnnnnnnnnnnnnnnnnnnnnnnnnnnnnnnnnnnnnnnnnnnnnnnnnnnnnnnnnnnnnnnnnnnnnnnnnnnnnnnnnnnnnnnnnnnnnnnnnnnnnnnnnnnnnnnnnnnnnnnnnnnnnnnnnnnnnnnnnnnnnnnnnnnnnnnnnnnnnnnnnnnnnnnnnnnnnnnnnnnnnnnnnnnnnnnnnnnnnnnnnnnnnnnnnnnnnnnnnnnnnnnnnnnnnnnnnnnnnnnnnnnnnnnnnnnnnnnnnnnnnnnnnnnnnnnnnnnnnnnnnnnnnnnnnnnnnnnnnnnnnnnnnnnnnnnnnnnnnnnnnnnnnnnnnnnnnnnnnnnnnnnnnnnnnnnnnnnnnnnnnnnnnnnnnnnnnnnnnnnnnnnnnnnnnnnnnnnnnnnnnnnnnnnnnnnnnnnnnnnnnnnnnnnnnnnnnnnnnnnnnnnnnnnnnnnnnnnnnnnnnnnnnnnnnnnnnnnnnnnnnnnnnnnnnnnnnnnnnnnnnnnnnnnnnnnnnnnnnnnnnnnnnnnnnnnnnnnnnnnnnnnnnnnnnnnnnnnnnnnnnnnnnnnnnnnnnnnnnnnnnnnnnnnnnnnnnnnnnnnnnnnnnnnnnnnnnnnnnnnnnnnnnnnnnnnnnnnnnnnnnnnnnnnnnnnnnnnnnnnnnnnnnnnnnnnnnnnnnnnnnnnnnnnnnnnnnnnnnnnnnnnnnnnnnnnnnnnnnnnnnnnnnnnnnnnnnnnnnnnnnnnnnnnnnnnnnnnnnnnnnnnnnnnnnnnnnnnnnnnnnnnnnnnnnnnnnnnnnnnnnnnnnnnnnnnnnnnnnnnnnnnnnnnnnnnnnnnnnnnnnnnnnnnnnnnnnnnnnnnnnnnnnnnnnnnnnnnnnnnnnnnnnnnnnnnnnnnnnnnnnnnnnnnnnnnnnnnnnnnnnnnnnnnnnnnnnnnnnnnnnnnnnnnnnnnnnnnnnnnnnnnnnnnnnnnnnnnnnnnnnnnnnnnnnnnnnnnnnnnnnnnnnnnnnnnnnnnnnnnnnnnnnnnnnnnnnnnnnnnnnnnnnnnnnnnnnnnnnnnnnnnnnnnnnnnnnnnnnnnnnnnnnnnnnnnnnnnnnnnnnnnnnnnnnnnnnnnnnnnnnnnnnnnnnnnnnnnnnnnnnnnnnnnnnnnnnnnnnnnnnnnnnnnnnnnnnnnnnnnnnnnnnnnnnnnnnnnnnnnnnnnnnnnnnnnnnnnnnnnnnnnnnnnnnnnnnnnnnnnnnnnnnnnnnnnnnnnnnnnnnnnnnnnnnnnnnnnnnnnnnnnnnnnnnnnnnnnnnnnnnnnnnnnnnnnnnnnnnnnnnnnnnnnnnnnnnnnnnnnnnnnnnnnnnnnnnnnnnnnnnnnnnnnnnnnnnnnnnnnnnnnnnnnnnnnnnnnnnnnnnnnnnnnnnnnnnnnnnnnnnnnnnnnnnnnnnnnnnnnnnnnnnnnnnnnnnnnnnnnnnnnnnnnnnnnnnnnnnnnnnnnnnnnnnnnnnnnnnnnnnnnnnnnnnnnnnnnnnnnnnnnnnnnnnnnnnnnnnnnnnnnnnnnnnnnnnnnnnnnnnnnnnnnnnnnnnnnnnnnnnnnnnnnnnnnnnnnnnnnnnnnnnnnnnnnnnnnnnnnnnnnnnnnnnnnnnnnnnnnnnnnnnnnnnnnnnnnnnnnnnnnnnnnnnnnnnnnnnnnnnnnnnnnnnnnnnnnnnnnnnnnnnnnnnnnnnnnnnnnnnnnnnnnnnnnnnnnnnnnnnnnnnnnnnnnnnnnnnnnnnnnnnnnnnnnnnnnnnnnnnnnnnnnnnnnnnnnnnnnnnnnnnnnnnnnnnnnnnnnnnnnnnnnnnnnnnnnnnnnnnnnnnnnnnnnnnnnnnnnnnnnnnnnnnnnnnnnnnnnnnnnnnnnnnnnnnnnnnnnnnnnnnnnnnnnnnnnnnnnnnnnnnnnnnnnnnnnnnnnnnnnnnnnnnnnnnnnnnnnnnnnnnnnnnnnnnnnnnnnnnnnnnnnnnnnnnnnnnnnnnnnnnnnnnnnnnnnnnnnnnnnnnnnnnnnnnnnnnnnnnnnnnnnnnnnnnnnnnnnnnnnnnnnnnnnnnnnnnnnnnnnnnnnnnnnnnnnnnnnnnnnnnnnnnnnnnnnnnnnnnnnnnnnnnnnnnnnnnnnnnnnnnnnnnnnnnnnnnnnnnnnnnnnnnnnnnnnnnnnnnnnnnnnnnnnnnnnnnnnnnnnnnnnnnnnnnnnnnnnnnnnnnnnnnnnnnnnnnnnnnnnnnnnnnnnnnnnnnnnnnnnnnnnnnnnnnnnnnnnnnnnnnnnnnnnnnnnnnnnnnnnnnnnnnnnnnnnnnnnnnnnnnnnnnnnnnnnnnnnnnnnnnnnnnnnnnnnnnnnnnnnnnnnnnnnnnnnnnnnnnnnnnnnnnnnnnnnnnnnnnnnnnnnnnnnnnnnnnnnnnnnnnnnnnnnnnnnnnnnnnnnnnnnnnnnnnnnnnnnnnnnnnnnnnnnnnnnnnnnnnnnnnnnnnnnnnnnnnnnnnnnnnnnnnnnnnnnnnnnnnnnnnnnnnnnnnnnnnnnnnnnnnnnnnnnnnnnnnnnnnnnnnnnnnnnnnnnnnnnnnnnnnnnnnnnnnnnnnnnnnnnnnnnnnnnnnnnnnnnnnnnnnnnnnnnnnnnnnnnnnnnnnnnnnnnnnnnnnnnnnnnnnnnnnnnnnnnnnnnnnnnnnnnnnnnnnnnnnnnnnnnnnnnnnnnnnnnnnnnnnnnnnnnnnnnnnnnnnnnnnnnnnnnnnnnnnnnnnnnnnnnnnnnnnnnnnnnnnnnnnnnnnnnnnnnnnnnnnnnnnnnnnnnnnnnnnnnnnnnnnnnnnnnnnnnnnnnnnnnnnnnnnnnnnnnnnnnnnnnnnnnnnnnnnnnnnnnnnnnnnnnnnnnnnnnnnnnnnnnnnnnnnnnnnnnnnnnnnnnnnnnnnnnnnnnnnnnnnnnnnnnnnnnnnnnnnnnnnnnnnnnnnnnnnnnnnnnnnnnnnnnnnnnnnnnnnnnnnnnnnnnnnnnnnnnnnnnnnnnnnnnnnnnnnnnnnnnnnnnnnnnnnnnnnnnnnnnnnnnnnnnnnnnnnnnnnnnnnnnnnnnnnnnnnnnnnnnnnnnnnnnnnnnnnnnnnnnnnnnnnnnnnnnnnnnnnnnnnnnnnnnnnnnnnnnnnnnnnnnnnnnnnnnnnnnnnnnnnnnnnnnnnnnnnnnnnnnnnnnnnnnnnnnnnnnnnnnnnnnnnnnnnnnnnnnnnnnnnnnnnnnnnnnnnnnnnnnnnnnnnnnnnnnnnnnnnnnnnnnnnnnnnnnnnnnnnnnnnnnnnnnnnnnnnnnnnnnnnnnnnnnnnnnnnnnnnnnnnnnnnnnnnnnnnnnnnnnnnnnnnnnnnnnnnnnnnnnnnnnnnnnnnnnnnnnnnnnnnnnnnnnnnnnnnnnnnnnnnnnnnnnnnnnnnnnnnnnnnnnnnnnnnnnnnnnnnnnnnnnnnnnnnnnnnnnnnnnnnnnnnnnnnnnnnnnnnnnnnnnnnnnnnnnnnnnnnnnnnnnnnnnnnnnnnnnnnnnnnnnnnnnnnnnnnnnnnnnnnnnnnnnnnnnnnnnnnnnnnnnnnnnnnnnnnnnnnnnnnnnnnnnnnnnnnnnnnnnnnnnnnnnnnnnnnnnnnnnnnnnnnnnnnnnnnnnnnnnnnnnnnnnnnnnnnnnnnnnnnnnnnnnnnnnnnnnnnnnnnnnnnnnnnnnnnnnnnnnnnnnnnnnnnnnnnnnnnnnnnnnnnnnnnnnnnnnnnnnnnnnnnnnnnnnnnnnnnnnnnnnnnnnnnnnnnnnnnnnnnnnnnnnnnnnnnnnnnnnnnnnnnnnnnnnnnnnnnnnnnnnnnnnnnnnnnnnnnnnnnnnnnnnnnnnnnnnnnnnnnnnnnnnnnnnnnnnnnnnnnnnnnnnnnnnnnnnnnnnnnnnnnnnnnnnnnnnnnnnnnnnnnnnnnnnnnnnnnnnnnnnnnnnnnnnnnnnnnnnnnnnnnnnnnnnnnnnnnnnnnnnnnnnnnnnnnnnnnnnnnnnnnnnnnnnnnnnnnnnnnnnnnnnnnnnnnnnnnnnnnnngagcaagttggtgtgtcccaggccacaggcacttctcacatcccacctgagtgggagccatcacaggctagcatcctcttgtcctgccctgatcctggttttctgcctggctttgcaggtcaaagggcatccttccacctggaaggatcctgggggagacatctctcagaagacagtcccagaacatggaatgtgaccttgtttggaaatagggtctttgcagatgttaccaaagtaagagaagctcacagtggattagagtgggccccatctagtctaatgattgctgtccttaacacacacatccacacacacacacacacacacacacaggcgcgaatgtgcccatgaaaaagggaggcagaggttagagtgatgtgtctaccaggcatgggaagtgaacggttgccagaaaccagcagaagccaggagagagccatggagttgatctgcctcacagcctctagttggaactcatcccgtcaataccttgattttgcacttgtagccttctcaactgacagaataaactcctgttgtttaaaaccagccaggtgtggcatgttttcacgagagccctaggaacccaatacatcgactttcaagggccgcatcccactgacttcgaagcaggcctggatccgtgtgttgtctcagttctgggagctcccatgagcctgcagagagactgcagggtcttcctggacagttcctgaggaggaaagagagactcagaggattgccccgatgtcgcccctccctcctcctaaactctgctgggctctcccactcccccaggaaagacttccctgctaacttctgccctgcaagttgaccctgacattttcaagtgccacccgcccctgtgaacttgaatggattgcgctgtnnnnnnnnnnnnnnnnnnnnnnnnnnnnnnnnnnnnnnnnnnnnnnnnnnnnnnnnnnnnnnnnnnnnnnnnnnnnnnnnnnnnnnnnnnnnnnnnnnnnnnnnnnnnnnnnnnnnnnnnnnnnnnnnnnnnnnnnnnnnnnnnnnnnnnnnnnnnnnnnnnnnnnnnnnnnnnnnnnnnnnnnnnnnnnnnnnnnnnnnnnnnnnnnnnnnnnnnnnnnnnnnnnnnnnnnnnnnnnnnnnnnnnnnnnnnnnnnnnnnnnnnnnnnnnnnnnnnnnnnnnnnnnnnnnnnnnnnnnnnnnnnnnnnnnnnnnnnnnnnnnnnnnnnnnnnnnnnnnnnnnnnnnnnnnnnnnnnnnnnnnnnnnnnnnnnnnnnnnnnnnnnnnnnnnnnnnnnnnnnnnnnnnnnnnnnnnnnnnnnnnnnnnnnnnnnnnnnnnnnnnnnnnnnnnnnnnnnnnnnnnnnnnnnnnnnnnnnnnnnnnnnnnnnnnnnnnnnnnnnnnnnnnnnnnnnnnnnnnnnnnnnnnnnnnnnnnnnnnnnnnnnnnnnnnnnnnnnnnnnnnnnnnnnnnnnnnnnnnnnnnnnnnnnnnnnnnnnnnnnnnnnnnnnnnnnnnnnnnnnnnnnnnnnnnnnncagcatgcaccggtagtcctagctacttgggaggctgaggcaggaggactgtgtgtgcccaggagtttgaggatacaatgagccatgatcgcacttaagcctgggtgacagagaaggaacctgtctcttaaaaaaaaaaagaagaaaaaggaaaagaaatcaccttgtttgtgaatagagacaatttctttctttctaatcttactacctttattttgtgtcattttcttcccttattgtattggctaggacttccagtaccatgttggataggagtgatgagagtaaacatccttgcctggttctcaatcttatggggaaggcaatcagtttttcatcactaagtaagatgtttgctgtaggctttttgaaggtgcgatacatcaggttaagaagcttgcttctattcctagtttgcagaaaatctgtaataggaaaatatgttgaattctgtaaattttttttctatatcaattgatgtgatcatgttgattttcttgttagattattactatggcagattacattgactgatcttcaagtattgaagcagtcttgcattcccaggaagaacccacttggttatggtgtattccaaggactacataaacacgtgcacaaacacacacacacacacacacacacacattccagaagtagcacaagttcaaaatacaaaactcatttaatttgtatatactaacaataactaacagaaaatcaacattttaaaataattgcatttgtactatctctgaaaaaatgaaatgattgagtctatataagatctgtatgctgaaaatgtacaaaatgctgtaaacaaaatcacagaagacctaaatcaatgaagaaatacatggatccatgggtagaaatacttaataaagacttcaattcttcccaaattgatctatacttttaatacaactccatcgaaatcccaccataggatatgttgtatatcaggtaatctgattttaaaagacatgtaaagattaaaaggtagaaaaaagaatgatgtcagaaaagcgatgctacacaattttaaagttctgctccaatgctgaagtaatcaagacagtgtgattccagcaaagggatagacacagagatcaatgggacagactgtatccaggaatagatccacactgacatggaaaattgatttctaacaaagctgcaaagacaactcaatagagaaaggagaatctttcaacaaatgctactgaaacaattgaactttcataagcaaaaaattgaacctcaacctaaagctcctacctttatataaacattaattcaaacggagcacagatttaaataaaaaatgtaacactatgaaacttttagaagaaaccataggagaaatattcaagactaagttgttagacatgacaccaatataacaatttgtagaagaaaatactgacaaaatgaacttcctcaatatgtaggacttttgctctgtgaaggatcttattaagaggatgaaaagacatgctacaggctgagtgaaaacacctgcaaaccatatagctgacaaaggacttgtatgtagaatctatgaagaaccttcaaaattcaacacattttttttaaaaaaacaatccggtgtaaaagtgggcaaaagacatgaaaagacattttgtcaaagaaagaacatgaacagcaaataagcacaagtgaatatgatcagcatcagtaaccattagagaaatgcaaattaaaacaatgaagtatcgctatgtctgttagaaaggataagctcaatgatgacaccaaatcctggcaagattgcttagaaaccagacaactcacacatcactggcatcacttgaacaaggtatagccactctggaaaagagtttggcagtttcttataaaaccaaaggtacatgtcctatgtgactcagcaatttcactcttcaggatttaacctgaagaatgaaagcaggttcacaaaaacctgtacatcaatgttcttaaaagttttattcaaaatagcctcaaactggaaaccacccaaatatctttcaatggtgaaagactcaacaaattctaccatatccatataagagactactacccaggaataaaaagcaagaaattattgatacaggcaaaaacttggaggttttgttagagcgtgaaacttggtgaaaaaaagccaatcttttgttgaagattggcttttggcttttgttgacgaaagaaaaaacttcctcttatgaaaaaagccaatcttctaaaaggttttacacttacaagcttccatgtataaaacattctcctgttgtgggataatttaggaatcagagagaccgaggggttgaggaggatttattattattatttaggtgcattggcccagtcagattaacatccaaaggactgagccccgaacaaagagtcaagttaccttttaagcatttcatgggtgggggaagatttgtgcagggggaagcatattacagaagcgagaaacaaagacagttattcaattgagacttgcattacattatttcttacttttcaaggaaaaacatattttacaacttgagtttatctgtctagtgaccttggagctgcacagctagagaaacagggtcttcataatgcctgggaaagggagagataaggctcactagccacagaaaaacaggcagttaatttttaaaggactccagctctttctcttcctcagggggaattgggttttcttacatacaactgagtttttgcttacacattctttaatttcttttaattcctgttccactccaactaacaaaactatagagatggaggacagattggtggttgccaggagacagggacaaggtacgaggatgtgactaaaaagaggtagcacaagtgaattcctctcagtgatgaaacagttctttggcaaggacagttggtgcaagtggttacaggatactacacatgagatcaccttgcatagaacacacacacacaaaggagtgcatgcaaacactgtgaaaactgcataaggtctgtagtctaacaatagtcagacaatgcccatgccctggttttgatggtgtcctgctgttctgtaagatagctgttctgttagggaaagccaggtaaagcatccaagggactctgtctactacttttgtgactctctgtgaatctacaatcatttcaaaataaaaactttaaagaaaatcaaccaagtgatttttatataataaacgtcaggttaatcctcaccttgggagggaatagagactagggagcatcgcaatggtggattctggagtgctggcagtgtccttttttgtttttctaacctagatgatgatgacatagatactcctttgtgacaagtcattgaggtgtacgtattgtttcataaacttatgtgtgttaaactatcgaaaagaattaagttaaaagaagaactttaaggtaaatacagcattttacataaaagaaacatggagctgtatttttgttaatgggtccaaaacagaaaaacagagattgatttaaacaactctctagataggtttcacagcagactaggcacagctgaagagtgaatgagtgaattggaagacagagtgaccaatttacagcacagatatgtagaaagatgagcaaagtaaaatagagttttactccaatatgtgcttaaggggaattaaaaaaaaattgagtagttgggcaagaggtaatcattgaagtgacaatggctgagaatttttcagaattaaaaaagataacccttgggttgaaaaggcacatcaagtcttttacaggattaaaaatacatatttatttattagatagtagataaacccctagacacattgggataaaagaaaaaatttaaaaaatgaggaaacaccaaaaggttaaaagaaaaaagaaagatttgctgcaaagaaaagattgccaagccaacagcagacatctcatcagcaacagtagatgagacaatggaataataacttccacgttttgagggaaaataacaatgagcctaaatcatcagcagcagtagatgagacaatggaataataacttccacgttttcagggacaataacaatgagcctaaaaatttatccccagctaccccagtattcacgagtgaggttatttaaaataattttataaaatgtggctattttataaatgcagttatttaaaataattttataaaatgatatttgatgatggggaaatgctcacactacattaagttaaaaaagacaaggaaatggataatgggtataaaaatacagttagaaggattatgacctagtgttcagtagcacaatagggtgattgtacttaataatttattgtatatttcaaaataactgaaagagtggaattggaatgttcctaatacaaagaaatgatcaatgcttcaggtgatgggcatcccaagtactctggtttgattattacattttgtatgcttgcatcaaaatatcacatgtacccaataaataggtacaactgatatgtatccacaataattaacaacaaaaaaagacaggttacaaaaagtatctatactattgttgtagacatagccaatgatatggataacggagttggatatatccagattatacacttatgtgtatactacatatatacatacaactatacacatatgtatgtgtacatacactcacatatgaatgcacagataaaactgaaaggaaatacatcaaaatggtaacatatctgttagtttttgaagggaaggcgaaggttaaaaaaagacacaggaagagctggcagctcgacagcaacacaagtttattgccagagcgacctgctgaggtgggggaccagcttaacgccagagcccaccaccgcttacaggctagggtacttataggtatgggcgggcagggtctgggtggcgtggtttgctgcttgacaaagatgttccttcagttgggcctttgctcggcagggtatgataaggacattcctgtgccttgtggtcaggtggtggggcaggacatttctcacggtggaacccccatggaatgttttgctctgccaaggtctgtgaaacggcagggggcttacaaaacagtgcagtttggactaacagtacccagattgtacatttaaaaatcatttttctgttcttcgaagggcttttcaatatgttctgtatagtctaaaataagcatatgttacattgtcacatttaaaatgttatttttttaagtatgttctcttcaaaatgcatttaaactgtctgacaaattagaaaattgtttattaaaagcaaagaggcttatagacaaatcctaattcaggtggattcaacaaatattctttaggcattttctatatgctggcaattatgagagtatttaagataagtctagtataaatctagagaaaaacatgacaaatacttataacataggataacatatgtgatattataggcatacacaatgttctgaaataatacagaggagggcataattatgcaccagctaggaggaggttcaaagaagagggcctactgagtagggcttttcaggatgtaaaggaatagagggaatggcatgggaggagaaagaacttttcaaaaaaagacacagggccaggagtggtggcttgtgcctgtaagnnnnnnnnnnnnnnnnnnnnnnnnnnnnnnnnnnnnnnnnnnnnnnnnnnnnnnnnnnnnnnnnnnnnnnnnnnnnnnnnnnnnnnnnnnnnnnnnnnnnnnnnnnnnnnnnnnnnnnnnnnnnnnnnnnnnnnnnnnnnnnnnnnnnnnnnnnnnnnnnnnnnnnnnnnnnnnnnnnnnnnnnnnnnnnnnnnnnnnnnnnnnnnnnnnnnnnnnnnnnnnnnnnnnnnnnnnnnnnnnnnnnnnnnnnnnnnnnnnnnnnnnnnnnnnnnnnnnnnnnnnnnnnnnnnnnnnnnnnnnnnnnnnnnnnnnnnnnnnnnnnnnnnnnnnnnnnnnnnnnnnnnnnnnnnnnnnnnnnnnnnnnnnnnnnnnnnnnnnnnnnnnnnnnnnnnnnnnnnnnnnnnnnnnnnnnnnnnnnnnnnnnnnnnnnnnnnnnnnnnnnnnnnnnnnnnnnnnnnnnnnnnnnnnnnnnnnnnnnnnnnnnnnnnnnnnnnnnnnnnnnnnnnnnnnnnnnnnnnnnnnnnnnnnnnnnnnnnnnnnnnnnnnnnnnnnnnnnnnnnnnnnnnnnnnnnnnnnnnnnnnnnnnnnnnnnnnnnnnnnnnnnnnnnnnnnnnnnnnnnnnnnnnnnnnnnnnnnnnnnnnnnnnnnnnnnnnnnnnnnnnnnnnnnnnnnnnnnnnnnnnnnnnnnnnnnnnnnnnnnnnnnnnnnnnnnnnnnnnnnnnnnnnnnnnnnnnnnnnnnnnnnnnnnnnnnnnnnnnnnnnnnnnnnnnnnnnnnnnnnnnnnnnnnnnnnnnnnnnnnnnnnnnnnnnnnnnnnnnnnnnnnnnnnnnnnnnnnnnnnnnnnnnnnnnnnnnnnnnnnnnnnnnnnnnnnnnnnnnnnnnnnnnnnnnnnnnnnnnnnnnnnnnnnnnnnnnnnnnnnnnnnnnnnnnnnnnnnnnnnnnnnnnnnnnnnnnnnnnnnnnnnnnnnnnnnnnnnnnnnnnnnnnnnnnnnnnnnnnnnnnnnnnnnnnnnnnnnnnnnnnnnnnnnnnnnnnnnnnnnnnnnnnnnnnnnnnnnnnnnnnnnnnnnnnnnnnnnnnnnnnnnnnnnnnnnnnnnnnnnnnnnnnnnnnnnnnnnnnnnnnnnnnnnnnnnnnnnnnnnnnnnnnnnnnnnnnnnnnnnnnnnnnnnnnnnnnnnnnnnnnnnnnnnnnnnnnnnnnnnnnnnnnnnnnnnnnnnnnnnnnnnnnnnnnnnnnnnnnnnnnnnnnnnnnnnnnnnnnnnnnnnnnnnnnnnnnnnnnnnnnnnnnnnnnnnnnnnnnnnnnnnnnnnnnnnnnnnnnnnnnnnnnnnnnnnnnnnnnnnnnnnnnnnnnnnnnnnnnnnnnnnnnnnnnnnnnnnnnnnnnnnnnnnnnnnnnnnnnnnnnnnnnnnnnnnnnnnnnnnnnnnnnnnnnnnnnnnnnnnnnnnnnnnnnnnnnnnnnnnnnnnnnnnnnnnnnnnnnnnnnnnnnnnnnnnnnnnnnnnnnnnnnnnnnnnnnnnnnnnnnnnnnnnnnnnnnnnnnnnnnnnnnnnnnnnnnnnnnnnnnnnnnnnnnnnnnnnnnnnnnnnnnnnnnnnnnnnnnnnnnnnnnnnnnnnnnnnnnnnnnnnnnnnnnnnnnnnnnnnnnnnnnnnnnnnnnnnnnnnnnnnnnnnnnnnnnnnnnnnnnnnnnnnnnnnnnnnnnnnnnnnnnnnnnnnnnnnnnnnnnnnnnnnnnnnnnnnnnnnnnnnnnnnnnnnnnnnnnnnnnnnnnnnnnnnnnnnnnnnnnnnnnnnnnnnnnnnnnnnnnnnnnnnnnnnnnnnnnnnnnnnnnnnnnnnnnnnnnnnnnnnnnnnnnnnnnnnnnnnnnnnnnnnnnnnnnnnnnnnnnnnnnnnnnnnnnnnnnnnnnnnnnnnnnnnnnnnnnnnnnnnnnnnnnnnnnnnnnnnnnnnnnnnnnnnnnnnnnnnnnnnnnnnnnnnnnnnnnnnnnnnnnnnnnnnnnnnnnnnnnnnnnnnnnnnnnnnnnnnnnnnnnnnnnnnnnnnnnnnnnnnnnnnnnnnnnnnnnnnnnnnnnnnnnnnnnnnnnnnnnnnnnnnnnnnnnnnnnnnnnnnnnnnnnnnnnnnnnnnnnnnnnnnnnnnnnnnnnnnnnnnnnnnnnnnnnnnnnnnnnnnnnnnnnnnnnnnnnnnnnnnnnnnnnnnnnnnnnnnnnnnnnnnnnnnnnnnnnnnnnnnnnnnnnnnnnnnnnnnnnnnnnnnnnnnnnnnnnnnnnnnnnnnnnnnnnnnnnnnnnnnnnnnnnnnnnnnnnnnnnnnnnnnnnnnnnnnnnnnnnnnnnnnnnnnnnnnnnnnnnnnnnnnnnnnnnnnnnnnnnnnnnnnnnnnnnnnnnnnnnnnnnnnnnnnnnnnnnnnnnnnnnnnnnnnnnnnnnnnnnnnnnnnnnnnnnnnnnnnnnnnnnnnnnnnnnnnnnnnnnnnnnnnnnnnnnnnnnnnnnnnnnnnnnnnnnnnnnnnnnnnnnnnnnnnnnnnnnnnnnnnnnnnnnnnnnnnnnnnnnnnnnnnnnnnnnnnnnnnnnnnnnnnnnnnnnnnnnnnnnnnnnnnnnnnnnnnnnnnnnnnnnnnnnnnnnnnnnnnnnnnnnnnnnnnnnnnnnnnnnnnnnnnnnnnnnnnnnnnnnnnnnnnnnnnnnnnnnnnnnnnnnnnnnnnnnnnnnnnnnnnnnnnnnnnnnnnnnnnnnnnnnnnnnnnnnnnnnnnnnnnnnnnnnnnnnnnnnnnnnnnnnnnnnnnnnnnnnnnnnnnnnnnnnnnnnnnnnnnnnnnnnnnnnnnnnnnnnnnnnnnnnnnnnnnnnnnnnnnnnnnnnnnnnnnnnnnnnnnnnnnnnnnnnnnnnnnnnnnnnnnnnnnnnnnnnnnnnnnnnnnnnnnnnnnnnnnnnnnnnnnnnnnnnnnnnnnnnnnnnnnnnnnnnnnnnnnnnnnnnnnnnnnnnnnnnnnnnnnnnnnnnnnnnnnnnnnnnnnnnnnnnnnnnnnnnnnnnnnnnnnnnnnnnnnnnnnnnnnnnnnnnnnnnnnnnnnnnnnnnnnnnnnnnnnnnnnnnnnnnnnnnnnnnnnnnnnnnnnnnnnnnnnnnnnnnnnnnnnnnnnnnnnnnnnnnnnnnnnnnnnnnnnnnnnnnnnnnnnnnnnnnnnnnnnnnnnnnnnnnnnnnnnnnnnnnnnnnnnnnnnnnnnnnnnnnnnnnnnnnnnnnnnnnnnnnnnnnnnnnnnnnnnnnnnnnnnnnnnnnnnnnnnnnnnnnnnnnnnnnnnnnnnnnnnnnnnnnnnnnnnnnnnnnnnnnnnnnnnnnnnnnnnnnnnnnnnnnnnnnnnnnnnnnnnnnnnnnnnnnnnnnnnnnnnnnnnnnnnnnnnnnnnnnnnnnnnnnnnnnnnnnnnnnnnnnnnnnnnnnnnnnnnnnnnnnnnnnnnnnnnnnnnnnnnnnnnnnnnnnnnnnnnnnnnnnnnnnnnnnnnnnnnnnnnnnnnnnnnnnnnnnnnnnnnnnnnnnnnnnnnnnnnnnnnnnnnnnnnnnnnnnnnnnnnnnnnnnnnnnnnnnnnnnnnnnnnnnnnnnnnnnnnnnnnnnnnnnnnnnnnnnnnnnnnnnnnnnnnnnnnnnnnnnnnnnnnnnnnnnnnnnnnnnnnnnnnnnnnnnnnnnnnnnnnnnnnnnnnnnnnnnnnnnnnnnnnnnnnnnnnnnnnnnnnnnnnnnnnnnnnnnnnnnnnnnnnnnnnnnnnnnnnnnnnnnnnnnnnnnnnnnnnnnnnnnnnnnnnnnnnnnnnnnnnnnnnnnnnnnnnnnnnnnnnnnnnnnnnnnnnnnnnnnnnnnnnnnnnnnnnnnnnnnnnnnnnnnnnnnnnnnnnnnnnnnnnnnnnnnnnnnnnnnnnnnnnnnnnnnnnnnnnnnnnnnnnnnnnnnnnnnnnnnnnnnnnnnnnnnnnnnnnnnnnnnnnnnnnnnnnnnnnnnnnnnnnnnnnnnnnnnnnnnnnnnnnnnnnnnnnnnnnnnnnnnnnnnnnnnnnnnnnnnnnnnnnnnnnnnnnnnnnnnnnnnnnnnnnnnnnnnnnnnnnnnnnnnnnnnnnnnnnnnnnnnnnnnnnnnnnnnnnnnnnnnnnnnnnnnnnnnnnnnnnnnnnnnnnnnnnnnnnnnnnnnnnnnnnnnnnnnnnnnnnnnnnnnnnnnnnnnnnnnnnnnnnnnnnnnnnnnnnnnnnnnnnnnnnnnnnnnnnnnnnnnnnnnnnnnnnnnnnnnnnnnnnnnnnnnnnnnnnnnnnnnnnnnnnnnnnnnnnnnnnnnnnnnnnnnnnnnnnnnnnnnnnnnnnnnnnnnnnnnnnnnnnnnnnnnnnnnnnnnnnnnnnnnnnnnnnnnnnnnnnnnnnnnnnnnnnnnnnnnnnnnnnnnnnnnnnnnnnnnnnnnnnnnnnnnnnnnnnnnnnnnnnnnnnnnnnnnnnnnnnnnnnnnnnnnnnnnnnnnnnnnnnnnnnnnnnnnnnnnnnnnnnnnnnnnnnnnnnnnnnnnnnnnnnnnnnnnnnnnnnnnnnnnnnnnnnnnnnnnnnnnnnnnnnnnnnnnnnnnnnnnnnnnnnnnnnnnnnnnnnnnnnnnnnnnnnnnnnnnnnnnnnnnnnnnnnnnnnnnnnnnnnnnnnnnnnnnnnnnnnnnnnnnnnnnnnnnnnnnnnnnnnnnnnnnnnnnnnnnnnnnnnnnnnnnnnnnnnnnnnnnnnnnnnnnnnnnnnnnnnnnnnnnnnnnnnnnnnnnnnnnnnnnnnnnnnnnnnnnnnnnnnnnnnnnnnnnnnnnnnnnnnnnnnnnnnnnnnnnnnnnnnnnnnnnnnnnnnnnnnnnnnnnnnnnnnnnnnnnnnnnnnnnnnnnnnnnnnnnnnnnnnnnnnnnnnnnnnnnnnnnnnnnnnnnnnnnnnnnnnnnnnnnnnnnnnnnnnnnnnnnnnnnnnnnnnnnnnnnnnnnnnnnnnnnnnnnnnnnnnnnnnnnnnnnnnnnnnnnnnnnnnnnnnnnnnnnnnnnnnnnnnnnnnnnnnnnnnnnnnnnnnnnnnnnnnnnnnnnnnnnnnnnnnnnnnnnnnnnnnnnnnnnnnnnnnnnnnnnnnnnnnnnnnnnnnnnnnnnnnnnnnnnnnnnnnnnnnnnnnnnnnnnnnnnnnnnnnnnnnnnnnnnnnnnnnnnnnnnnnnnnnnnnnnnnnnnnnnnnnnnnnnnnnnnnnnnnnnnnnnnnnnnnnnnnnnnnnnnnnnnnnnnnnnnnnnnnnnnnnnnnnnnnnnnnnnnnnnnnnnnnnnnnnnnnnnnnnnnnnnnnnnnnnnnnnnnnnnnnnnnnnnnnnnnnnnnnnnnnnnnnnnnnnnnnnnnnnnnnnnnnnnnnnnnnnnnnnnnnnnnnnnnnnnnnnnnnnnnnnnnnnnnnnnnnnnnnnnnnnnnnnnnnnnnnnnnnnnnnnnnnnnnnnnnnnnnnnnnnnnnnnnnnnnnnnnnnnnnnnnnnnnnnnnnnnnnnnnnnnnnnnnnnnnnnnnnnnnnnnnnnnnnnnnnnnnnnnntatatatatatatatatatatatatatatatatgccggccagtacacacctcctgatggaagaacctagcaaagtatttttaccctgccccacaaatccaacctgcctctgaccaagtttttagatcgtaccactaatttatagtaaatagagagaacaaagtgaagaccaagttaaacaccacaaggatacaattagcaaaatccaaactatgagaaacgccataatgaggatacatttagcaagatctgaaatacagggaaacagtcttgtttcttcaataaataaattgcaaaggagaaacaattgatgaaaggagaaacctatagatccagaaatactaacaggcaaatcaaacaatcataaggagagactttatttggattttgattcaaacaaactaacaaaaaaatgaaattactggaaatttggagacagtagggtagttggtagtattaaagaatagtagtgtgcgatggttggtatgataatggtattgcaattttgttttttttttaaaagagttcttggctgggcacggtggctcatgcctgtaatcccagcactttgggatgctaaggcgggaggctcatttgaggccaggagttcatgaccagcctagccaacatggcaaaaccccatttctactaaaaaaaaaaaaaatacaaaaaaattagccagatgtggtggcacayacctgtaatcccagctactcgtgcagctgaagcaggagaatcacttgaacccaggaggcggacgttgcagtgaactgagattccgccactgcattccagcatgsatgacagagcaagactctgtctcaaaaataaataaataaataataagttcttatcaytgggtatggtgtctcatgcctataatcccagcacattgggaggccagggcaggaagatcacttgagatcaagagttctagactagcccaggcaacatagaaaggccctatctctacaaaaatagaaataaaaaaattatctgggcctggtgatgtgcatctgcaatcccaactattcaggaggctaaggtgggaggatttcttgagcccaggaggttgaggctgtagtgaaccatgatcacaccacagcactccagcctgggcaacagagaccctgtttcaaaaacaacaaaaaattagtccctttcttttacagatacatactaagatattcacagatgaaattacataatgtccgggatttgctttaaaacaacaagagagggggataagtgggtgggagtatacaggaaacaagatgggccatgagttaacaaatatttaaatctgctgataaggaggtgaaagctcattacactatcctcttgtttaaaatgctccaaatagaaagtttttctaaaaatctgcttcatgggtttgtagtgagcattgaataaggtcatgtatacagagtgcttcatcaccatggctgacaggaagtcagcattcaaacattgtttttagttttgtatagtccctgtccattaaccacacccaaaagaggtgggttatttacaccaagaaccctggcccatggacctttgcccacttggaggtaattcattaaaatttgaggtttaggatgaggaagtgccagccttcagagtcccaggcctattgtgcaacagcagagccaacagcrccaaatgcctccctagcatgtctggtgaataggatcactttcctctcgccttgtagacatacttgagatcattcactacttttcattcatttcttatgtgccaggcattgggtgctggagatccataatacagtggatccttaactgactggaagcatcactttcagagcatcatttcaggatgagtgtttgagtgccaagtgaattcaagctacagggctaaggatccatggcctcagtcaccatgaagaccctcccaagagccagtcctacgaggcacatagaaacgagtggagacagaactcactcctgcaaagcctagaacctgatagagcacacgagacaggagcccaaataaccaagaaccgggagctgaatgtgagaggtgggctccaaaggattcggccaccaaggtggagaaggtatgtgtgcagaatgggaagtagtcaggtttggctgacacatttagcaggcatttggggagacrtggaaactgaggctggaatgatccactagggccacgtgtgtagaaggtcaggttcaggcatctgaatctcagtcggtatcaacagagttgcttcttggtgccgagcaaaggctcacaggcttaggaccaggattcaggaagtggtctcttgcagcaaggggctgagtccaccctgggaaggcccatcccagcctgacggtgcacctcaagctcacatcacatgaccacatgcgtcaaacaaaccacatgcatgttctcacatgaccatatctatgttcccacaaccatatgcatgttcacacataaccacgtgcatgttcacacacaactatatgtatgttcacaggaccatatgtatattcacacagccatatgcatgttcacatgaccatgtgcatcttacatgccaccatatgcacattcacatgtgaccacatgcatgttaatatacgaccatatgtgtgctcaggtgaccacatgcatattcacacatgaccacatgtatgttcacacacttaatgattcacagctttataagacctgagacagatgtgcgttttgggagatccagcttcacggtatgggctcatcttgtccacacatggagactaggcctgaactatctctgagaaagttgcctgccagtttagagcagggcttgggaaaccttttccataaaaagccagttaggaaatgtttgaagctttgcaggccatgtgatctctgttgcaaccactcaactcactaaagcaaccatggacaatacatacatgaaggagaatataaaggtgcattctgataaaacaggagctggccatagtttgcccagcctagtctagagtttgtagcctctttccagagcccaagtgccccctccagacacagacccactccaactccagccagagacccaggcctcattcgtcagagactgggaatgctccttcagraggacacccctccaggcctgaggatctgtccactgtgggaggcctggagctactcgttctccacccaacttggtgcaagctgaccccgtcaggccctgccaccgttagttatccktgctgaccaccctcggcatcctctcaagcagaggctgcccacttctcacgttctatgccacagggtcgggcactgcactggctccttccagccccagagaagcccctctccacagcctgtcactcaggagcccttgcacatccagctgagcccagacaatttctttaggaaaccacctcaacactgaagtccagatcgcaggcctgtcctggaatgttctccttgcagcctgttcttcacttatgagaccacactgcatattggactacaaccatcagcctcaccatctatctcttccttcaccttctccccctgtaccaggccatgagctgtatgggagaaggaactcatcacagtgcctggcccgggaaggctattcataaacatgcagtgaaagaatwcacaggctcttccaacaagaaragagactggaccttacaagacccaacaggaaggcactgtctcaaaaccagtgaaaaataccaaggatctagataagagggtgcagtgggaaatgaaatagtggggtctggggagacgccccatatttgtcaatgactcataatctttctcccgagatcgctcctccacccttgtgttcagctccaccaacacttacaccagccactgaagccagaaacctgggagacttctgccctcatccggccccatctagccaaagaccagaacctgtcatttcaacctcatgttcacctcactgcccttcccactgctcctgccttagttcagacaactgccctcgctccctccacctagttcaagcccagctgacygggccagcggccytcaggcctgcccttctccatcctgccacgtctgtcctccacaggcagaacagggagctgtcattttaaagtgcaggtctgctctggttgttctcctaatgaaacccttygggggcttatcggatccttccaggccctggtccagactccttagcatgggcatgcaggacagccctccatgatcgtcccctccctgagacccctcctgccctcagcaccctgtgttcaagccccagctcgccctgtggtgtcacactcagcccagctcccctgcctggggtgccctgcctggtgtgccctgcctggcctaggaaccaggaaaacctgccggcttccaagactcagctcaagcacctcttcctgctgggtgttttctgagacccctcctctccccactttccggggatcccacagtcccctgaagagccttctgccccagcgtttgacctcactgtttggccctgtatctgtttccacggctgcctcacccttttagaccaccagctcctgcagagcagagccccatatctcagttggctttgcattcccagtgcctagcacagagcctggctcccatgaaccaggtaattttcaataaccctcgaaaattcactggaatcctggacagtgcagaggaggcacctgggatgggagaatgtctgctgccctctcctggggcaatgtgagacattgtcgtaagcccagacacctccctcccggccttacaaaaacaagggcaggaaggggaagctggaaaaggagctgatggagaatgggggagatggatgttgtctaaggagacaaactagattgagaggttgctgagactctgccagctcccacactattcccacgtccatgggcgcaggggccaggtcagtgcttccaaaggaggctgcatccttagtggctgtggctccctccaacaaaccctaaatgagatcttccttctcaatgtcacctgttgtcgtgttgttgtaactatcactgcagcttttattcacttcattgggtaatcactgagtttttcctccattgctgtagaacatgtggcttgctcttgtgtgtaaaaagactgaatttaaccgctggcttttcctgattttaactcagcttcctactgttaggaggttatttctaacattctgggcttctcagctttctgtcaaaacccaaataccgtcgttccttagtaattattggggattggtttcaggatcctcccttaaagataccaacagcgcaggtgctcaagcccctgatataaaatggtgcggcatttgcagacaacctatgcacaccctgcatgcactttcaataagctctagattacttgtgatacctaattcaatgtaaatactatgtcaatagttgtttagggaattatgataaaaagaaaagcttgtacatgttcagcacatatgcaatgttttttgaatagttttacccaacatggttgaatctatggatgcagagcctacagatacaagacacgcaggtggggagggctagctactctggttaggatcccccaaaccccactctgtccactgcttcaacaggtcaggtgatgtcatgtgcccctcctcgaaaggagtagcattatctcagctcctctgggggctgcaggtctaattgtctgcatcttgacacctggaaagtttgcccaacacctaacacaggacgtggattaggggaaggagcttgggactgtagatggatatttgtgagggaccgtagatggatatttgtgagtgatgtgcatagagacagccccctgcagagaaagatmatctgttgttcacctttgaatcctcaatctctgttgcacagggcattcagtaaacatcagatgtctgtggaacaaatgcatggattgtacataaaagaagcaaaagggactaccttctcatggtgtagaaatttagagctgcatgacacatttagccctaaatttaggaatccacccctctaggcaagaaataccttttccaatgaactaatgatctctccactcctttccctgaagagtttactgaacaatgatcaggagggcaccataaaccttattttcatgtcaaacagtacctgtcctccaatggtttatctatttggtgagacatgatacaaatgaagaaagattgctccccatcctcagaaagtctgtaacctcaccagacgaggcatccgtctcacacttgcttctccagaaggactagagaaccacaggagaccatgtgtactgaaaggttgaatgcacaatcacttagcactgaaaatatgcagcacagaaaataagtgtttgtagttgggtggcactatcagggcaggcttcctgaaagaagctggctttgaactgccctaggctgggaagaagttgaaaagagaacagaaaattcattggtctgtggtctggaggcaccctgggtcctcggaccctgagtctcagccagagatcctggtggggagacagaggtgtgaagccatcgaccaccctgcccatgttctcactcttcagagtgtggcaccagggcagaagcagcaaagatgaccactgcatacattccagctcccagacagaggtgcacttggcttctgatgcacaaggccccgttcaacaaaatccatgccttttcagggtgcaggataatagagtgaagtgcgtgtggacyggagagaagtgctgcccaggttaatggcaccagctcagagcatcctcagggaagccagcaccagtttggagaagattgagggacgaggccatctaatgagccagaaggtccctgagagatgaggcggccttggcctctgggattccctacccctcattcacagaagcagcttggtccstggagttaagcagcactgttctgaaataataatgaacagcacgcctggcatgcctcctgtcagagcccagtgaggtgggcaggccagtgctgtctccccagcacctgctcctaccccagccagcagccctgacccttctgacaracccyaaaatgctccaaccactatgtggtttctcaccatctccagcccaaactctctgcttccaaagcttagtggatccacccaatggacctcacctcccgcagtcccagcacacgctgcttaatctgagaggagcctgctccctgcgcggcagcgtkcatgttgacctgggggctttctcgcactgttcccaccacctgagatacctgctcccttctaccccgaacaatggtaggaaaaaatcaacatggacttagaatcagaagagccagcttcaagtcctccactgaagagagagtgcatattcccaaaaaagaacataaacttaggatcttacagtgacagaggtccgatgtccacagtcagtctccgagggctgaagtcacggtgtcatcagggctggctcactctggagctccagggagacgttgctcccttgcctttcccagttcccagaggcggcgtgggttccttggctcatggccccgcagcacatggacctctgcttctacggccacatctccgtctctgactttggtctttctgcttccctctaatgaggactcctgtgattacatcagacccagccaggtaacccaggagaatctccccatctcaacatccttagttgaatcacatctgcaaagtcccttttgccaggtaaggtaagaaactcacagtttttacagattaggttgyraacatctttgggaggccatcattcagcctagcacagtgagatatatatgtatctttactttctgtttatttttagtgrcagggtctcaccatgtcgcccaggctgacctcagacacgtgggctcaagtgatcatcctgctttgggcttccaagtagttaagactacaggcagatgcaactatgcctagcttmtatcttataaatcaataagaaaacagtttgattttttaaatgggtaaaaggcttgaccaggcacttcaccagagaagtatacaaaatggcaaaaaaaaaaaaaaaaaaaaaaagtgcctgaaaagattcagarcatcattattcattagggaaatgcaacttgtatccacactagaacaggtgaaatcaaaagacacatctgcgttggcaagcctgcagagcaggggaactctcacacggtgctgacggacatayaagatggcacagctgctgtggaaaacagttcagcagttccttataaagtcaaacataagacccagcgatccttcccctaagtgtttatccaggacaaataaaagcagatttccacacaacaatctgtacaagaatgttccagcagcttccctctgctccccacaaaccgagagcagcccaagtggccttcagctgataaatggataaacaaactgtggtacatccatagagcggaatatattcagtaataaaacagggcaacttaccgatacacatctaacacrgatacctctcaagagctttacactaagtgaaagcagccagacacaaaagatacctactgtaggattcttttacctgaaattctagaaaaggcaaaatgacaatgcgagaaagcaggtctrtggatactgaaggccaggaggsaggctgctggggaggagccytaaagggcacacgggaactctgaaggatgctggaaatggtccatgtcttcactgtgatgaccacgtggctgcatgcatttatcagaactcactgagctgcacacctaaagctagcaaattttaacatatgtcgaccatagctcaacaaagctgatattaaaaatcaattgaactgttgcacaacaacgtgagtattcttaatgccactgtactctacaattaaaaatggtttaaatggtcaattttatattatatatatcatatcacaattaaaataaataacccccctaaatcaattgcattccatatactggcagtaaacaattggaaaatacacttttgaaaggagcatttaccaaaaccaaaaaatacctaggcataaaactaaggcaggcaagacctttacactgaaaaatatgaaacacaaaacattgctaagaaaaaaattaaagaaatacctaattaatggaggattatatcatgttcatgtattggaagactcaatatttccagatgccaaatctctctaatttgatgtacagattcagtggaatgccaatcaaaatcccagcattttttttttttggtatacattgaagatgattctgcagtatatatggaaaatcaaagaatcaagaacagccaatgcagcccttaaacagaacaaagctggaggactgaactgccagacagcaacacttcttttaaagctacaataactaagatgctgaagtgctggcacaaaaatatattctaggaccaatggcgcaaacaagagtgcacrgaagtgaaaaatgcggtaacacctgatagatgacacgggagacagcacagttaagtggggagagggtggtctttcaataaatggccctgggttagccacacatccatatagaaaaatagaaaccgtgactctccacctcagtcctgatgtaaataaatctgagatggatcctagaccaaaacatgaagggtaaaaaaagtcaatctgtgttaagcatggtgtattgaagaaaaaaaaggtctagattttttttttttaaataagtttatctttataacaaagggataggcaaatattttttatacaagacacacataaaaaaccactaactataaaaataagwtaaacaaaaataataaataatatattgacaaggttgttaaaaataaaatatagtaaaagtagattaattgaactttattaaaataaaaaatatatggttcatcaaaaaatacccttatgtgagtgaaaagacatgccacagagcagaagattattacaatatatgtctttcaaagcaaatcttatctagaatatatcaagaaatcccacagatttcttgtgggaatttcttgtgctcacgcctgtaatcccagcactttgggaggccgaggtgggcagatcaggaggtcaggagatcgacaccatcctggctaacatggtgaaaccccgtctactaaaaatacaaaaaattagccaggcgtggtggcgggtgcctgtagtcccagctactcgggaggcttaggcaggagaatggcgcgaacccrggaggcggagcttrcagcgagccaagattgagccactgcactccagcctgggctacagagtgagattccgtctcaaaaaaaaaaaaaaaagaaaaagaaaaagaaaccccacagattaataacaaatgacaataaaaatctttataaatgggtcaaataagtatttcacaaaagaggccattcacacagccaataagtatatgaaaacctgttcaacttcattaactatcaagaaaatacaaattaagctgaccatggtgtgcatgcctgtggtcccagctactccagaagctaaggagggacaattccttgagcccatgaggtggaggctgcagcgagctatgatcacaccattgtactccagccttagcaacagagtaaaaccacgtctcaacaacaacaacaacaaaaaaaaaaaaaagaaagaaagaaaaaaaggaaagaaaatgcaggttatatagcactgcattccccagatgcactagaatgaaaagaactaacaataccacgtgttggcaagagtgtggagctactagtgcttttgtctgcacttggtgggcgtgtaacttgaaccacaactataagaaactttctgtatctgctaaagctacatgtaagaaaaaaccatgacctagcaattcaatttcttaggtatctaccaaactgaaatgagcatttatgttcaccaaaagtcatatacaaacacattcagagaagcttcattcatcatcatcaaaaagtggaaggaatagaatggatacagtgtggggtgctccggccatggaagattacaagacagtgaaaggcagtgagctcctcctgtctgccacaagagggatgaatttcacagacataatgtggaaacaaggaagccagtcacaaaacagtccatactgtatgattcctctcattcccaytgatttcagaaacagtgtttggaggttactcaattgtcgtgaaaagaaaatcaggaaagacactgacacaccaatttactatcaagggtagggtaaccaattgctatttgtagttgtcctgtgtagataaaggattcaaagcatggaacaaaacacctttggtgttagacgtaggcaggagtaggtgaagcttgatctggtttttctcatctcccttccttggcctggtcagcttcatcatcagcattttcctcctcctcactcctcccccagtatcgttattctaatttctgtcgttttttttcccctaggaaatatacattttctagagcccaatctgccaggagagatctaagagattacaaaggaaaaaacttgaaattctgaggacagagaaaagaaaaaggaagagttaatgactagtgagacaccatcatgtagactggtgccacatggaatctggggcaacagaacatgatctatccagatggacatacagggaaagctggtgctgggaagcaccttaagctacatgattgcaataaattttgctcaccagtgattgtgggggctgaagtatatttctctttgtttccagtgttgcccaagtttgaagttaaagtcaatgcaccaygaacagtaactatttcagatgatggattccaagtggatgcgcgtgctaagtaagcatttattcaggagatttgccttcacaaggagacacaaagcttagagataataagtgagattaaccagggaacttaaattatttatatgcttgcattaatattattagagaagcaatgtattctcattgtagaatatttgaaaaatataaagaaaaagattagaaattacgtaaaattaattctaccaacagccattaacattgtgatttattgttctaccataaagaaatacatacacacatgttcattgcagcaccattcacaatagcaaagacatggaatcaacctaaatgtccatccacggcagactggatttaaaaaaaaatgtggtacatgtgcaccatggactactctgcagtcacataaaagaactagatcatgtcctttgcagggacatggatagagctggaggccattatccttagcaaacttacaaaggaaaagaaagccaaataccgaatgttcacatttataagtgggagctaaataatgagaacacacggagacaataaggggaataacagacattgaggcccacttgagagtagaaggtcgaaggatagagaggaccaggaagaataactattgggtagtaggtttagtgcctggaagacaaaataatatgtacaacaaacccatgtgacatgagtttacccatctaacctacatgcacttgtgcccctgaacctaaaataaaaattaaagagagagacagatacacaagctcaaaaccaaggactgagaacaagcttctgcctggagcaggaatggatgacatggttcaccaatcctgaaaaggacatggaagtgatagatataccagtaaatccagatatgctcatggaaaacagatgtagagggagaagttgtatttagcttaagggaatgtattctggaaataaggaaaatagaatgcatgagaaaagtggttaatggtcactgatgtctactggttgttgtggaaaacagtcaacagtcttaactaaaaaagagatgaacagacttttaggggagggtcacagagtctaaacttcagttataaaacagaatctcaaaattagctagctagctagatagatagacatatttattttcctctaatttttaatgaatatttttcatgactgccatcatacttttctgttcatgataactaagaaaacttgtctctatattatgccaatcttttcataaattccaattttctgctgcataaacatatctttatgtgactacacgaaatttatttagttatgcttttattatataacatatagattatttcattttgttttcctagtaattaataattttgtagyatatgtctttgtgtataactatatagtaagtagcttttgaattaggaattgttcacttaagaaagatttccagaagaggaattaccaagacaaaatatgcaacattcttttagtcttctgattgccatattgctcaccaaatatgttgtgtcaacgtagaattccagcagctagtatggaagtgcctgtctcactgaatcttcaccatcattacatattttcattaaartaagaaaacaagctattggaatgtcattgtgaagataaggcatcatccatttaatttgaattaattggaatcttcttaatgttacaaaataagtcctatatgatttgagaaatttttattttcttttgggggaattattttcaatgccttttatccttttttagtgtgattctttttctcaaatttctaataataattttttaagagctaatatttttgaatgtcaattagtgtgataagctctgcatatatgattgctacagtgctattaggtaggagcaatcatcacctctataaggaaagatactaagacaccgataattcaaataacttatcaacagtaatggagcttrttgatgaaagaaccgggatttagacctaggctgttcggcttcagagctactctcctaatcaataactctcttgcactttacataaacagttaaaaatattaatatttgccatatttgttaaacattttgtttagttgattacatgaaaattacttgcctttgagtattttcagcagactattagagatacattgggtaaagggccrtctaatgaacatgcaaggggagttcttaaggatgccccagagattcttggaaaccagttttcagccttttttttttggtagtatttaacatcttctttggattccagcaaagtgatcctaaaatttttctcagtttcaatgaagagcagttgaacttgtgccagaattcaatttatgtaatagatgaaagattgtagattatccatgttaaaaatgatgggataatcagaacagcttggacaaatccaggatcctaaacaggcttcactagaaaactctacacaaagccagaacttgcaatggcattaatatctcatttatttatctgcacagtagtatgctaaaaaaaactacaacacattgtttgggagagcaaaactgtttctcaagcatggcctttgaaaaagacttgctaaccaaatgcttacatggaactgatggttccttagcactacgtcaggttataatccatgatcctgatttcttgaaacttctttaatatattctgggtagacttacattaaaaagtaaattagtatcagtaataataatatcctgccaggctgccaggcagctagactggaactatgcttgctacaaagttatttccagacagactgtgagcacactgtgcctagaagttcacatcaattgtataatactgtgtctcaaattgtatgatactgtgtctgtgcattgcttctttagtacttcctgggatttagcttggaatggctagagaaaatgagcaaattagattattttagtaaacaaactcagagatgaattaggcttttaagagaggaaaaacacttacaggtgaaggtattttaacaaatcgctttagcatccatggaaagctttcaaatcacaaacaaagggagaatayttatcctatcccatagagatttaagctacatgtctcatgggcatatattagcctgccaataatactagggtgcgagtttgattgtatacatgagaaacattaaaaagaaataataagaaatgtttaggcataacatttgtggctgaatcttagtctggcttctatatgatcatcagacgtgacagatgatttcagtgatatgagttgagacagaatctcaaatgtgttatgaaatttttaatagaaagagaaaaagatgagtgggaaggaaaaagcacagactgtggagtgaggcagatctgagtctgaattttartttcatcaattacaatgtggaaaagtgagttgcttgaccttgaacattttacagattgagaaattgaggtttagagattaatttgcccaaagtctcatagctagcgagtaagaagctagaggtttcaaactggggactttctgatgtcagagctcaagcttgtcaccaccgtgctcmtggggaaacggtcaggagaaagccaagtttccaggaaactggaatggccgcagtgaagaatgaccctcttatatcctgctgattagatgaccagacttggtcatcacagactttgagcatcacagtggaagaggggccagaagaggagggcagtttcctgtgttgctccggagttgcctcatgttgcccacatttttctggggctgacatatatttttccagtaggtgtgacctgagggtgttggggctttacttttgtgctggtgcaggcagttttcaggctcatataaacactcactcggctgtttatttattcattcaacaagcatttcttagacacctcctcttctaattcttgggccagtaaataagtatggtccctgacccaacaaatctagctcaggttcagagatgcacaacctcattccagcaaagctttctgtagattatcgggggcagctcttactacccwtgatctttcccacttctcagctattcctgtaccaacagaaagctctcccatggaggaatggcaaagagatggaaaaatgcggctgtgaattgggctgaagttttgggaaaggatgtggaagccagagactaacaagaagttttgatagtggatgtgatgtccctccccctccctgctgttccatttccttgggcacttaggctggtctcatgatctaagggccaactgctcatgtgaaaatccatcccagcatcctcagctcaaataactgcygcttgccacacgcctrccccaacggaattaacggaagctgctgatagccctgctgacctcattggatggaaccgtgtcctcagcagacaggagctccttcctcttctgagtgagactccctcctatcttggagcaggaagtcctctcaggagaagtccaagcttcagacagagaaggagcaggtgccattcatttactcccctcagtgttgacccaaaaggcagaggctgagacgcaaagcataatttaaagagtttacttgagccaaagtgaggacagctgcctggaagactcagacccaagtactcttggctgtgagcttcctagagcctttgttccaagcaggtttttaaaaacaaaagactgggacsgagagagtgggctggtacaaagttgttgatcaggaactctctttggattacagaaacaaaattgatgagcaattggttattgttaagttataggatgtggtttatgcttctggtgagacactataataatcctaaattaaaattaattcatagctacttgtggcaatagcaagcagttttaagagatgaatacatagctcaaagcggggagtarggtgtgattgctctcattttaacgtctctccaggcctcatagtttaaaaaggaytcaccttcctcagatgaaagctctttaggttttgcatcaggaacctccttttctgctttcttggagggtcaggatgggtccmatgaagagctgctggtggggacagacagaagccaaggagaggccrggcaaggaagctgaagtgcttggcagggggcaacagtcccctgcctgcaaccaacgttaaaaaacactgtcacttsaggccgaaagtggtagaaaccagtttgttaaatcacacgaatgtatatattaggcatgcctggctagtcctttgccaagagatcttgtagcataactgcaggcaaatagaaaagacatgaaaatcrttaatcactgcacaagcttagggatcagttctttttggagggtggtgagtggtggaggtactggaaaatgtgtacagaaagagtgaaataagyggaagaaaggccctaggactcagggtttgcttacagtgggatcagagacacctggaaggatgaagacaaaaatccagattataattggycctgggagtgagacttcatgacaattgtgttaccttgagaatttctttttagttcctggcttcagatttaaggttatggttgatggatgaatatacttttggaatctacttttggaagancttctctgggctgaagttgatagctaggttaaaatatcaaggacttcggtaaatctctagcagagcttcactacagcagagagggaaaaacaccagatttaacatttcattcttggtgctgctgagctgtgtgctctaggacaagacatttaactttttcagctgcrtcctagaaggattcacacctatctcccaagactttggcaatgattaggagggagaataactaggaaaaagataagtgaactgtgaagagctgtgaccttacaatggtgacggtgacggtgatgatctttatackcttgggagggttggtgcasattcttgcctrcagcaatcataagcagaggctaatgcttccatctttaagattctcatagtaaggttaaaagatactgatattacctaatgtttaacataactggacccactacctactgcttcatgcacagaagttacagggctgagggaccctccattagccacactgaggatctgggttayaaatgagtggaatgtgtaaggggagaagagatctttagcgatctttgagagcaatattagcagtgaaatgaatgcaaaccacatcttgcctctttgaagtaataaaggaagggaaaaaagttatgcaagcaaagaagtgcttttgtttccccagccatgaatcctggttaaaaattgcacacaaaccacaaggacagtcaataccatcatctcaactcctaatgtgctgtgtttcaggaaaaaaaaaaaacacaactaaaattaaagcagtatcacactgtctttgacttgctagctttatattcttttgtgaaaatctcaagacgttacccatcttcagaggtagctcattcctcccaggcatggagccggggagggtaaatgaaatgtctcatacaactcagtcattcatttgctcagtgtttattaagacctaacatgtgccaggctctctcctaggtggggctaactaaagtaagcccaagaggtactgtccttaaggggaggaaagacacgtactccagtatctgtatttgggtaaagaaagtgatttgtcaagagagaacaggattgggattgtttaaagtatgttcacagcccacagaccaaatggactccctatgactcactgaggtactcatatttaaaacagaaacccagtggctacagccgggtgtgggagcratcacatactctgtgttctcagaaagatataagagcatcacaggacccctcttttcacaatcaagccaaaccagcgcctgctgttgctcccaggacaaactgctgctgggcccctcccaccaccagccwgccacagtctgacagagactcccagtttagggcttggaaaccaatcaatcagagctyatctgctcggttaatcagggctcagctgcatcagaggaaagcaaatgcaaatgaatctgggttcatatgcaaatgaacctgatggggaacctgggcagcaaattttgctrtaaagcccgactcctctctgttctctgaacgcacattcattttacactgaactctggtctctcagtgttagtccaaactgcaccatgtcataagctctccctgctattttgcagaccttagtcaaagtgaaacaggggttygggtgtgagaaacgtcctgcctaaccacctgaccacaaggcagacaaaggcctaaccaaagacacatctctatcatatcatgctggacaaagatccgaggaacaccacaacgaaatcccactggaacaagggccagaaccatctcatcacgggaacatcttatcaatatcctgccaggcagcaagccatactgcccagacccctttggcccataaattgccccagcctgtaagcagcagtgggctctggcattatgctggttcctgacttctgtaggttttatgctggacataaagcctgcatttgctattaagccaccctcttacgtatgtctttctttaaccctcgccttcccttcaaaacctaacacccagttttgtccactggaataaagtctctttcctccaaataccttttcagaaaacatttgttcatggggtttagaaggaggagtagttatttctaggaaatctaatcagctggaggtagactgagttgagtgcctggaaaggaaacagtgggcaatactactagaaatagattttgaccagatcacaggtggccttgaatgatgagataggaatctgtgactttaatttcaaggaataggggtcaccgaagctttttgagcaggggagtattatgatcatctggctgtaaataaaccctgaaatttagaatctcatttttgagaatgaacttagaagataattacatgggtaggtttgaggatgacttgaggacatttaaaaagggcctagcagttttggcttgccctcctgctaatagcatttgctgcttttcatttacactttatcgtgcacggagaactctgcatacatacaaagcagagtctaatttttcctaattcatctctgtagccaaagtagactcggacacttaagaatatagacaacactcctacctaaaatgcccagagagaaattttacatggctaaaagtgggagctagctaccccagcccagaggtgtttcttcctaagaggaagggcactgacacagaaaactgtactatgctgcagtgaccagaagaatggaccctccctgcacctgctgtggaggaggagggtgggacgtggcagtgcaccagactctgctcatctcagttcaagtctaggcattgccactaatctatgcgaccttgaatgagtcacttttcctctctgggcctgagtctccacatctgttaatcgagaggtgagattggatggttttaagaacaggttcttgtgctgacgtcctgtgggcttgtgggactgagtaagactgctatgagctctggcgtggctggtctgatgatccccaagtttctctcctttctcctcggtgctgagggaagcaacacaatgagatacgcttttgttccaaacgctggccgcatctcacggtctgagttgagtcctggccctgctgtaggttagcagtgtgaacttgggcaagtcacttaacctctctgagcctctgttttcttttctgaaaaatcatgagtcaatgtcgtctaacccaagaaaaatggagggatagaaacaaaaaattagaggctggatggtgtggctcacgtctgtaattctaagtttggaggctgaggtgggcagattgcttgagcccaagcaatttgagaccagcctgggaaacatagcaaaacctcatctctacaaaaaatacaaaacttagctgggtgtggtggttgggcacctgtagtactagctactcaaaaggcagaggtggaaggatcacctgagcctgggaagtccaggctgtggtgagctgtgattgtgccactacactgcagtctgggtgacagaataatatcctgtctcaaataaataaataaataaataaatamatamatamatacatacatacatacatacataaatattaaaataagaaatgtaagcttgttttaaataaaaaagtagagggaactggcttccagtaagtatgaaattatgactatcaggctaattaggttattttgcaaaaaaaaagaaaagttagaaaaacatatttttgacaaatactctcaaagctagtgaaattatcctgttttggacaacagtttggccttcgacagttttatcaatctgtacaacaaaaccccagcacttattagtccctgaagtatggaaacaaatgaggaagggactgtgtctcctgcattaaacacatcgatgtctctktcccacaagagaagctcttcacggggctccttccatgtttgctgtacagaacctctcaaacgaacaacctcattcatgtgaaaattccccagagcggccactgcagtttcaaatggtgtctcaagaaattgtgtcagaggcataagatgagttcacacgacagtgaggaaatctgaaagcagcaggcgtttggcctggggaagagccacttccgatgaagaaggtcgcacgggcacccgagcagtccgagaagagacttcgtgcctccagagcttggtcagaggccacaggctgattgtccccaatcctcctgattccaggcagagggaactttaaagtgagcagttctcaggaaccacacagagacaaagttgaggggaaaatccacccttaggtatgaaaacagtgacctggggcaaagctcattccaatgaatgctagtctgaggggaactcctgagcactgtgacctccaagaccagcttgaggacagacttcccgggcccctatcaactactgaattttccacttagagacaacgcttagaacattcgaccaccagatagacataggagcatttctcagaaggctagacagcagtttcaccgtggagcggggcaaatctgatcagatcaccaggaaaagtcgcacagcacctcattcccagaacagagcacacctgaagcggaggggcctcaaggaaatatcagcctccatggggcctcaaggaaatatcagcctccattcagcccgagctgccttccagctgtgggccacccggcacctcagacagagggagacaccctgtatgtctcagctgtgtccaccctaactgaggcgggggttcttgtccaagggggagggcttcagctgactcagggaacctctatttctgccaatcctcctaagctaaaaaaccaccaagaactcacctgtagctgaaccaaaatgggtttattgacttgttgcacaaaggaagaatgtccagcagtaaagagggccttcaaaagaacttgctatagatgcgggctcgtggctggtgagtctcaggagggcttaggaagcaaggcctttctctgggttggatatcgtgcataaagggaccacatggcacaggattccattctatgcaaaagtgcagaacaggcaaatccagagagacagaaggtaggtttgtggttgctgggggctaggggaaagaagtgtggagactgaccatgcgtatgaggtttctttgtggaggtgatgaaaatgtttagaattagatagtagtgatggacgcacaattttgtgaatatatatgaaaaccactttaaaagggtgatttttatgttaggtgaatgatatctcaatttttaaaaagtgaaaataaaaagaggggcctcaagatttggtgagctgatagactgatagcaagagaggatactaaggaaagacactaaggaacacatattcacaaagcagaaccgcccagagcagcaggctgtcagcctttatgccagagcctctgttggcttctgtcagtgcaaccccgcagacacacacagcatcgccatgggctggccgaggtgccgaggagcacacagaggactgagacatggtccctgcactctgggggaaatgacatctcaacacaataatggtgttcatcatcaggaccccaagtcatgatgaaaaggttaaattattctcaaaatgctcaattgtaagaaagcagaggagtggatcataaggaataaatgtatgaaaaaaatttcaaaattgccaaccttttcaagaaatattgaaacctctggtgcaggaaggtaatccgtgtggagtggcagccagggaatgggatgctgtgtgtgtgtggagaggcaaacatccccatagtcttcaggatcccccgagaggggccgagtcagaggccgtcaaagcctccagtcccctgggcatccagggcctcatggcaactgtaccagttgttctcacttttgttattcttccatagaactcaacgtgcctctcacacagggactcaggatggtgctgagtccaggtggagggaaggggtcggatggggggctgggtgggggacatggtgggggctctgttggaacctgccacccttctggctctctacygtgtttttcttagttagtgggaggtctgtgagctccatacctccagggcctagctgtgaagctgttgctggtgtggatctgtccaatggagtttgctgggtgggggaaggtgtgagggaacctccatcttggaacggcatctccagaatgcaggagtgaggctggcacacagcackgcctctgtggacagggggtccagggaggttggggaggggcctcagggatggagggacagaactggggcctcccattctatccacatcagcctggtgagttcagatcatctctttagcaccttatcaccacttccacactcaggtgatttcaaggaaccttaggtccccaattgccacaagctttggggcacagctcctgccttgtaaaataaatattttggagattttaaagatgtaaattcaaactggcttttggaaaagacaggttttaagggatggttcccattctaatgtcggggctttccatcaggccaccctgggcagaacccgggggcgaaaagagagaaatgaacaaagcctccaaaaaatatgggactatgtgaaaagaccaaatctacaattgactggtgtacctgaaagtgacaaggagagtggaaccaagctagaaaacactcttcaggatattatccaggagaatttccccaacctagcaaggcaggccaacattcaaattaaggaaatacagagaccaccacaaagatactcctcgagaagagcaaccccaagacacataattgtcagactcaccagggttcaaataaaggaaaaaatggtaagggcagccagagagaaaggttgggttacccacaaaggggagcccatcagactaacagcagatctctcagcagaaactctacaggccagaagagagtaggggccaatattcaacattcttaaagaaaagaattttcaatccaaaatttcatatccagccaaactaagcttcataagtgaaggagaaataaaatcctttatagacaagcaaatgctgagagattttgtcaccatgaggcctgccttacaagagctcctgaaggaagcactaaacatggaaagggacaacctgtaccaaccacttcaaaaacatgccaaattgtaaagaccatcgatgctatgaagaaacagcatcaattaatgggcaaaataaccagctaacattgtaatgacgggatcaaattcacacacaagtatattaatgttaaacgtaaatgggctaaatgccccwaataaaagacacagactggcaaattggataaggagtcaagacccattagtgtgctatattcaggagacccatctcaagtgcaggacacacataggctcaaaataaatggatggaggaagatctgccaagcaaatggagagaaaaaaaaagcaggggttgcaatcctagtctttgatacagcagacgttaaaccagtgaagatctaaagagacaaagaaggccattacataatggtaaagggatcaattcaacaagaagagctaattgtcctaaacatatatgcacccaatacaggagcactcggattcatgaagcaagtccttagagacctagaaagagacctagactcccacacagtaataatgggagacttcaacaccccactgtccatattagacagatcaatgagacagaaggttaacaaggatatccaggacttgaactcaactctgcaccaagtggatctaatagacatctacagaactctccaccccaaatcaacagaatatatattcttctcagcaccacatcacatwtattataaaattgaccacataattggaagtaaagcactcctcagcaaatgtaaaagaacagaaatcacaacaaactgtctttcataccacagtgcaatcaaattagaaatcaggattaagaaactcactcaaaaccatacaactacatggaaactgaacaagctgctcctgaatgactactgggtaaataatgaaatgaaggcagaaataaagatgttctttgaaatcaatgagaacaaagacacaacgtaccagaatctctgggacacatttaaagcagtttgtagagggaaatgtatagcactaaatgctcacaagagaaagcaggaaagatctaaaatcaacaccctaacatcataattaaaagaactagagaagcaagagcaaacaaattcaaaagctagcagaaggtaagaaataagatcagagcagaattgaaggagataaagacacttcaaaaatcaatgacaaaaaaacccttcaaaaaatcaatgaatccaggagctggttttttgaaaagatcaacaaaattagtcgaccactagcaagactaataaagaagagagaagaatcagatacacacaataaagtgataaagaggatatcaccaccaatcccacagaaatataaactaccatcagagaatactataaacacctctacacaaataaactagaaaatctagaccaataaaaggctctgaaattgaggcagtaattaatagcctaccaaccaaaaaatatccaggaccagatggattcacagccacattctaccagaggtacaaagaggagctggtaccattccttctgaaactattccaatcaacagaaaaagagggaatcctccctaactcattttatgaggccagcatcatcctgataccaaagcctggcagaggcacaacacaaaaagagaattttaaaccaatatccctgatgaacattgatggaaaaatcctcaataaaatactggcaaatcaaatccagcagcacatcaaaaagcttattcaccaacatcaagtcagcttcatccctgggatgcaaggctggttcaacatatgcaaatcaataaacataatccatcacataaacagaaccaatgacaaaaaccacatgattatctcaatagatgcagaaaaggcctttgacaaaattcaacagcccttcatgctaaaaactctcaataaactaggtatttatggaacgtatctcaaaataataagagctatttatgacaaacccacagccaatatcatactgaatgggcaaaaactggaagcattccctttgaaaactggcagaagacacagatgccctctctcaccactccatttaacatagtgttggaagttctggccagggcaatcaggcaagagaaataaagggtattcaattaggaaaagagggagtaaaatggtccctgttagcagatgacatgactgcatatttagaaaaccccattgcctcaggccaaaatctccttaagctgataagcaacttcagcaaagtctcaggatacaaaatcaatgtgcaaaaatcacaagcattcctatacaccgataacaaacagagagccaagtcaggagtgaactcccattcacaactgctactaaaagaataaaatacctaggaatccgacctacaagggatgtgaaagacctcttcaaggagaactacaaaccactgttcaacgaaataaaagaggacacaaacaaatggaagaacattccatcctcatggataggaaaaatcaatatttgtgaaaatggccatactgcccaaggtaatttatagattcagtgccatccccatcaagctacaaaagactttcttcacagaattggagaaaactaaagttcatatggaaccaaaaaagagcccgcattgccaagacaatcctaatcaaaaagaacaaagctggaggcatcatgctacctgacttcaaactatactacaagactacagtaaccaaaacagcatagtactggtaccaaaacagatttatagaccaatggaatagaacggagatctcagaaataaaacccacatctacaaccatctgatctttgacaaacctgacaaaaacaagaaatggggaaaggattccctgtttaataaatagtgctgagaagactggctagccatacatagaaagctgaaactggatcacttccttacatcttaaacaaaagttaattcaaaatggattaaagacttaaatgttagacctaaaaccataaaaaccctagaagaaaacctagacaataccattcaggacacaggcatgggcaaggacttcatgactacaacaccaaaagcaatggcaacaaaagccaaaatagacaaatgggatctaactaaaccaaagagcttctgcacagcaaaagaaactaccatctgtgagaaaatttttgcaatctacccatctgacaaagggctaatatccagaatctacaaagaacttaaacaaatttacaagaataaagcaaacaaccccatcaaaaagtgggcaaaggatatgaacagacacttctcaaaagaagacatttatgcagccaacagatggatgaaaaaatgctcatgatcactggtcatcagagaaatgcaaattaaaaccacaatgagataccatgtcatgccagttagaatgctgatcattaaaaagtcaggaaacggccaggtgcggtatctcacgcctgtaatcccagcactttgggaggccgaggcaggtggatcatgagttcaggagattgagaccatcctggctaacacagtgaaaccccgtctctactaaaaatacaaagaaattagctgggcttggtggcgggcccctgtagtcccagctactcgggaggctgtsgcaggagaatgacrtgaacccgggaggtggagcttgcagtgaggcaagatcgcgccactgcactccagcctgggtgacagagcgagactcygtctcagaaaaaaaaaaaaaaaaaagtcaggaaacaacagatgctggagaggatgtggagaaataggaacgcctttacactgttggtgggagtgtaaattagttcaaccattgtggaagacagtgtggcaattcctcaaggatctgacccggccatcccattactgggtatatgcccaaaggattacaaatcatactactataaagacacatgcacacgtatgtttattgtgacactattcacaatagcaaagaaccaacccaaatgtccatcaatgatagactggattaagaaaatgtggcacatatacaccatggaatactatgtagccataaaaaaggatgagttcatgtcccttgcagggacattgatgaagctggaaaccatcatcctcagcaaactatcacaaggacagaaaaccaaacaccgcatgttctcacttataaatgggaattgaacaatgagaacacttggacacaaggcagggaacatcacacactggggcctgtcagggagtggggggctggggaagggatagcattaggagaaatgcctaatgtaaatgatgaattgatgggtgcagcaaaccaacatggcacatgtatacctatgtaacaaaactgcatgttgtgcacatgtacccttgaacttgaagtacaataaaaagaaaaagaaataaagttatcagaaacttgaaaaaaaattcaagagggggaaaattgttaagtacaatgagttctgagttcctcttcaaagaaccaacatgtcagtatgttcagcttccctgttgtttgttctccactttaaagtttaactttgttctttacgtctctttgcccctagttttggtaaacaaccccctcccagcctctatcacctgctctgtccttagtcatccttagtcacctgctgtgttcttagtcatccttagtcacctgctgtgttcttagtcatccttagtcacctgctctgtaaccatccttcccaccaaaactactcaccccgcctctctggctcatacccctgctctctttaaaatagccagttggaattagcttagactgtgcagtccaaccccagccaataggggaaagacacagcagtagggactagctgcattaggaataagaaccccttcccctcccttgtccagtgtgctcttgccattgctccatccgtgagatgcacccttctgtagaagtaaattgccttgctgagaaaacttttgcctgagtgctattttcacttggcagcaccgagcatttacttccaacactcaagaggtaccagaccctcctggagacacttcaaggctgccactgtcagctgggatcaactttccacccacaaaactgcagggacagctggcattgcaggaggggcagcaaggctctggcctggccctcacatccctaacacatggtctctgggaagcccactacagggcaatgcctcccagatgccctcagggtattcttccatttctagtagctacaccaggcaagtcacctaaattagtgaaggccaggtgtgtcaagagactcagaaagagaaggaggaaggttgtgagagagtccaggttgttctaagtgaccccattttaaagttctttcagcgaagtgggaaatgtagatttgtaagcagatttttcccattttaacatgtcaacctaaaaakgaaaagcattccaaggccaccgtcactccaccagcttgttggtttgcagtcacagtctaagcccccagctgtctcaggaaagctgcatgaatgaacccacaaggcttccctgtgccctgcctatgaggccttccactgcctacacccttgaacatggatattgtagctgagaaactggcccacagcagaggaggcagtagggaggtgagaatttaaaaagctggagctcagtaggactgcagagaaaactcaggccaagcctccatttgataggtgaatgaatcatgactaacacaggacaggggactggccaaggccctgcacctgctgagtgacagagccaggagggagcctggcccctgttctgcaggcagagctcctgccccagcgccacactacttgcagcacgtctcggccccactttttcatgacggtgctcatcagctgcccaatagccagagacagcttggcactgctattggcaaaagacaggcaaaagacagcttgtgggtcagttattatacaagacctttgccttcctcaagagcccatagaccttccttaggatggctacaatcaattccataggtaaggtggccactcctggtgactcctccctcccatctttagcaggggagccccccttggtctgagcagctccttccggaaagcctttggtgccaaagccacgccccaaaagaggcatatctttaattctgttcccatcgtatgccaagaaacaccatgaaacaacctgcttgaaagaataaaaaatgcactgccacactgctggggcaggaggacgaaaatcacactcctcacaatatgtccataaaaagacaaccaaggccagcaccaaagtccacctacagaaggcggcgggtctgtctcaacaccagctgccagtcactgtgaacctttggaaatagggatgaagcttcttccagttgcttccccagatgtcagtgagaccactccacagcagatgggggagagctgtgtatcagggaagtcccagccactaggacaagctgcactccaggcagatgtttttgctcttgtgcaaagaacagcgcaatccatttaagttcacaggggcaggcagcacttgagaatgctgcagggccaacttgcagggcagaatttagcaggaagccttcttgggggagggggagaggccagcagagtttagaaaaatggtggaacaatatctgggcaatcctctaagtctccctctcatcctcaggcacgattcaggaagaccctgcagtctctctgcaggctcatgggagctttcagaactgagacaacacatacatagatctaggcctgcttggacgtcagtgggatgaggcccttgaaagttggtgtattgggttcctagggctggctggaagtgcaaagtcaaggtgttggcagggtgagtttctactggaggctctgagggagaagcagttccatggctgtattctggcttcatatttaaaatacgagaggactagaaatggaataagctccctgagaaatggggacgagaggggactcagtgctgtgaggaggcattagctttactcaaaagtaaggcctcctcccacagctgtagaaggagaggctgccggggagaggggctctgcagagggaggctagaaattttgaacgttccccccacataaggaaatttacttctaccttgaagcagagggtaagttcattgtgagctagggctggggaggggcgagtcagtaggaaagaaatcttcaggagactggtgaaggtctgttatagccattgggggagtaggacataaagctggccagagaccacaggacttacgggcagcaccaaggatgaagcagaggccrggagctcatgcccgtctagatccatgaggccgtgtggtctcaacagcgctcagctgcttcaggcaggacagagaaggcggcagctggactgagtcaaatggagtcctcttgtgattgtccccaggggcaggcggtgaggtcaaggggatgagggattgctgaaataactgacaggacgggccatgcagaagcaagtgaagaggctaaggggactcagcgagggtcctgggaggaaatggaaaggttgagtccttgatgttggacagggccaccaggtaacaaggcagtgaacagcgaggacaagaaattggaatagaggagacagcagcatgctagcttgaagaagtgcattgcttattgctaacaaggaagagggtaattggactgggacgctggagatggagccctaggctctagccagcatagggctgccagacttagccaccagctctgaattctcaactcctgttctgggaaaatatcctgactttgctaagcacagatttgttttttaaacagagacaaggtctccctctgtcacccaggctagagtacggagaagggatcatagctcactgtaaccttaaactcctgggcttaagcaatcctcctgcctcagcctcctgagtagctgaactgcaggtgcatgccaccatgaccagctaattttttgaatttttagtagagatggggtctctctctgttgcccaagctggcctcaaactcttggcctccagtgatctgcctgcctcagcctcccaaagtgctgggattacacgtatgagccactgtgcctgatctatgcatgcctttgacttaatagtgaccttgaccttgagctcatctttgatgcttcaaatttttgtaaatatggtttcaaaaccacacatagtaaaaaaatttggagaatacagaataccaacagaaaagaataatatagaaaatccatacaggagagaaaataaaaatctcttgtaatcttcctaccaggatttggacatgactaatttggggttaggtctttccagtttgcctttttctcccttattcagcagcattttaatcatctatcctccaacttactggggcttcgctctctgcaactcagttttcctgtttagaaaataggatggctgcatggtaacaaatttctccaactgcttttcatgtggtttcctcatccctgtgaccaggaagtctgcatatgtgccaggtgatgggtacagagtcatgcagcaggcccatgggccccagggcttctcactcttaacccaagtgggtgccagagaaaaatctcatctcaacgagaggaggcacagacaccaggctgccagggccgtgcaccacaggtcagatcatccaggatctcctgcgagctgttctcaagyctctgtgacacacaaccagaacagcagccactccctcaagagagtttacaattaagccaatcagacctttaaacaaaatgtcctcttttccacagtgtgtccgtcctgtttaccttcagtttggagagctgttctgacctttcttaatgaaatgggtcactccccttcttcagcaaataataaactcagtgtctgctttagacagctttggcgccgtttgtgttctgctgtggcatgaacctctctttagtcatcgctgtggccagtggatagccactcctttctgaaggctgtccctgaattcctccttcctgtctgtttattggtgatggggcagggggtggtcaggggtcccaagcctcccaggcgaaggccaaagccctgctttctttaccaagttcctcagaggtctccactcgcaaatcattggcctcatcgggttggcactcgtccacttgcatttctagctgggacattctcttctctgaaaatagtctgtggatagaatgaacggacaaaggaatttgtttctgttaaggtgttgcttatggtagggcaayggttctgactcttattgttcagtcagattccttcatttcccaaactgctctggatttcgccttatcttggaaatcagaacctagtttgactaaaaagaaaaatcagaacttctgggtaaattaccagatattcactattgggaggaaacagctccacacttgggcttcctcctgtccttccttgccccatcttggatggaataaatggaccccattcccctccacacctcctgagtcttccctcatggtgagaggagcctttttctgcctattagccatgacttcaagccaacgttgaaaaagctctgtattcctggatcgtgggcatcccagcctcacatacccagtgcctctcccagccccgtgtagcaaatcaagtgtgccctcctgaaaacttcctttgactgcaagtgccctcattgtgttttctcttatgttattggagtcaaggcgtcttgaatacaacctgcaaatttatgcaagcactatgccaaaattttttataaaaattggcgaaggacaccccgtctcggaagtgaggagcgcctctgcccggccgccaccccgtctgggaagtgaagagctcctctgcctggctcccccgccgtctgggaagtgaggagtgcctctgcggtcgctgccccatctgkgaagtgaggtgcccctctgcccagggactacactgtctgggaagtgaggagcgcctctacctggctgccgcactgtctgggaagtgagaagcgtctctccctggmcgccccacagtctagggagtgaggagcgcctctacctggccgccccaccgtctgggaagtgagaagcgtctctccctggccgccgcaccatccgggaagtgaccagcgcctctgcccggccaaggcactgtttcggaagtgaggagcacctctgcctggccgccccattgtctgggaagtgaggagcgcctttgcccagccactgtgcaaccctccaagtgtgaagcgacagccttgtgtgtgatctttctgccctccccaagtttgcattttcaatattaaagtttacttttaaatttaaaaaaaaattggcagaggaaaaccttttgcaagtgaagtgcagctaacacctaatggctagcagagggctatttggggcggggactcaggtgagagttgaagcagaggtggggaggaaggagggttggttggtgtctgcagcagtgatggaagatgctggggccttgctcctctcctgccttccaacgtgggagtaaccggtgaaggagcagagagagtcaggggctccctgtctctttctcatggtggaggcatcttcagagctggggtgaggacagaatctcttagcccctcttgagatgctccagatgccgcatctagtacagagaatgaggttgagaggcccccatgccctccggccttcctatgctattacattcacatcaaactctaccacgtcgtcattcacttcacattaaagcatcttaattgccccctgggaggttaagctgtgtggatcttacttttttatgatctctctttatcaaagagccatttaccctttaagtcttaacactggaaggacctttagtgatccatctggtccaatccctctgttttatgtataaggggactacgacatgaagaagtggtttaccccagttctcagacccagactccaaaccaatcataccccctctaggtgacattacttactggacaacaggccctcagcaatctaggtgccactataagatatcatgggagcaaaacatgcttgtcttcttttaaagaggtactttgggtcaagagttactttgtaaatatacacctctgtcatttcccggtatgtggtcccatggacatcaccagcttctaagtgtgcttttcaaaaggccaggcagttgagtaggccacagtagttacttacagactgtcaaaaactgtccagttttctgatcattttaccctttggctgttcataggccatgatgaagctggggggttgggagaggaagacaaagaagggaatggcagaatgaggtttcgcagyaataaagataaacgtttattgaacactaactacattcctgacatggtgcttagtgcattacccaatattatccccattatacagattgagaaattgagatttggagaggtgaatttgcccaaagtctcatagctagcaagtaagaatattgaggtttcaaacttggggctgtctgatttcagagcccaagcttgtcaccaccatgctcatggggcaatggtcaggagaaagccaggtttccaggaaacttctaaatggccacagtgaagaatgaccctcttacatcctgctgattggatgaccagccttgatgcgatctttagcatcacagtggaagcggggccagaaaaggaggagggcagtttcctgtgttgctcaggacttgcctcatcttgcccacaattttctggggctgacatatatttttccagtaggtgtggcctgagggtactggagctttgcttttgtaagcactcacttagctgtttattcatccaacaagtatttattagacacctcctgtgtcagttcttgagccagttaaatatggtccctgacccaacaaatctagctcaggttcagagatgcacaacctcattccagcaaagttttctgtagattatctggggcagcttttactacacttgatctttcccayttctcagctattcctgtgccaacagaaagctctcccatggaggaagggagaagagatggaaaaatgaggctgagttgggctgaggttttggggaaggatatggaagccagagactaacaagaggttttggtggtgtgtgtgatgtcccctctccctgctgttccatttccttgggcactttagctggtctcatgatctaagggccaactgctcatgttaaaatctatcccagcatcctcagctcaaataactgccgcttgccaagcgcctgccccaacggaattaacggaagctgctgatagccctgctgacctcattggatggaacygtgtcctcagcagacaggagctcctccttctgagcaagactcccttatgtcttggagtaggaagtcctctcatgaatagtccaagcttcagacagagaaagagcaggagccattcatttactcccctcagtatccacctgaaaggaagaagctgagacacagagtacaatctaaagagtttacttgagccaaagtgaggacagctgcctggaagactcagacccaagtacccttggctgtgagcttcctagagcctttgttccaagcaggtttttaaagacaaaagggggacagagagagtgggctggtacaaagttgttgatcaggaactctctttggtttacagaaataaaattgatgagcaattggctatccattgttaagctaaagaatatgggctatagttctgataagacactatgctaattatcccaaattaaaattaattgatagctacttgtggcaatagcaagcagttttaagagatgaacacatagctcaaagcagggagtaaggtgtgattgctctcattttaacgtggctccaggactcacagtttaaaaggactcaccttcttcagatgatagttctttactttttacatcaggaacccccttttctgctttcttggagggtcaggatgggtcccatgaaatgctgctggcagggacagacagaagccaaggagaggccgtgcaaggaagctgaagtgcttgggagggggcaacagtcccctgcctgcaaccaacattaaaaagcactgtcacttcaggctgaatgtagtagaaaccagtttgttaagtcacaccgaagtatgtgttagacagacctggctagtccttatgcccagaggtctgtggcataactgtaagcagatggaaaagacatggaaagcattaatcgccgcacaagtttaatgtgtgcaaccaattgtagtattcaaagaactggagtggtagatatttaagaaatgtactttgtttgtaactttataggttttgattattattcctttaaagccttaaactttttggtttttaaaattattaaagttaaaaaatctacctatattaaaacctctttttctgttattcagagagtgcataatattctagctgtatattagtttagaaaatataatgtcaggctgggcatggtggctcatgcctttaatctcagcactttgggaggccgaggcaggcagatcacttaagcccaggagtttaaggccagcctgggtagcatagtgagactcccatttcaacaaaaataaatttttttaaaaaaagatgtcatatttattgtatgatttccaaaggaatgaactgttatggtctctctgattgaattataattttaatactcttggttgtatgtagctgagaactagtccatcccaaattcattttttcctgatgtagacaaaattccatcaactgagttttgcttctgggcccagacttcagacttcctgctgagagaaataccaggggctctgattcttcctcaaactcaccaccactaaactgaaatgcttgcttgaggcttcacaattgttatttcctgcctcaggttaaaatgtgtgaattttttcatttttaaaaggacacattcagaacatagagtgtgtagataacctgcactgcaagagaataatcttttgatacttttctggtagatcttataaattctgatccaaaaatttgatgtagcaaagatatgaggcacattaaacactttagggtttgctttttttttttttttttttttttttttacaatttggtgtgagaattatcatggcatctgtaacacacatgcctgtgctatattctcacaattttgttcaggttgtgcatattaaaatatggagctccatattttttcacttcctagttgatcacagttgactgggttgtcttttctgtcacctgttagttttgaagagatgtctcatatgtagtgatgttaggtatgatgcattcagccatagtaaatacctggtactgtctctcaaaaaaagcctttagcttttttgtaaagaggacaacagaaaacacaccaaaaaagcagaaaaatatgtgtcggtgatagtgggagaaacttataaatcatggtcatatgttaccccagagaaggcttacacaaggtcagctacagtttacccaataacgctgtgattgtctggttccttggcttagaaagcttagtctctgccaagtggctaaagcaggaaaatccaaggttactcagattctctgtgattttgttttaccatttaggaaataaaccctactactgtgctgtacactatttagaaatccacataagaaagggttcttcaatgtttggggggtccaagataaaaactatctcactttgagaaatkagaaaatcattcctgtgattctactctgttaaaccttgtcacccaaaatccatttagaatgaaaggcagcacaaggcagcaccacgttattttcttacagtcgcaatttagatttaaaattttggattccaagaattataggasttttatgccaggaatcaagatgaagaccagatatatatttcataatatcacagtttcttgaggttctttaaatcccaaacacacacttctccattgcctctgtccccacccctacctgccagttcttactcttaaatgccatctactagactgcagcctaaattacacctcaaacaaaactatatcacaagaagcagtgtctggggaagtcactgcatgaacctatttgcaactgaggaacccatacaaagccttggcaccctgaaagtactcagaaaccaaaccagctgatcattaacaatatacagcagccatatccctaggggaaaaaagaataaaaattcaagaagcaccatccaaacaatagcaaattctgtccaacctcaggatttctggcctctctagtgtgagcagctgctctgtcctcaaaatctcattggccccctactgcctcctcctaaaggatgctctcaagtacctccccaacatgtagggccaggtctgaaagggccttgatcctcggctgctggtgacttttcaaagcaactgtctttccctccttaccttgcccgtggtccgttgtgccctttctttgctccttctgcctaatgcagtagtcacaagacaagggagctttctgtcaactggcaggacttgagcacaagcagctgtgtgccgtggggaggaaatcttgtgttattacacacccaggacctctgagtccacacagcttatcgtataccttatccacacctctggctccactggtttttgtttttgtttagaacatttccttctccctaaatctgccttggatcctaggcccttttttgcagtagtgcctgatctcctgactcaaaaacccattttatgcaagggaaatggttgcagatttaggaaaccgctttaaaaaacagttaactaaaaatttcaaggtgcctaaaaatctaaaataaaatcaaatatttttgtccagcaatctataccaagagtgtgctagatgcacagtgaaaaggatagatgtgataccagctctagtagagcctggactccggtgaacacaggcactaaacaaatagctacaagaatgatgattgttacaaaaaaaaaagaggtgcaaggtactataggtgcctatggcaggatttgacctaatctgagggatttggggagtttttatctctggtactgactgaatgacactgagcaaacaatttaaccctctctataattaatagtattttttctgaccctccaagccctccctgctccagtcagagcttctgggtcaatcaactgtgatgacaagggaggacactgtcaacagcaggaaggctagctgcagagagcaaacacatagagccagtgacagtggaggcatagaataggccccagagcaccaaggccactggaggtagaaaatgggggaaaggctcgtgggcaaacagtaaactgcatgggagacatcccacctgtcctattcattgttataaacctggcacttagcctagtgattgtcaaatattgatggaatgcttacttactcctgtcaatttccatccacaactgcttgactctgaaggtgagtggtgagccctcttgggaatgttggcaggagaagatgactccacacatgggctgaactgcaaatggagtgcatcagatgaccaccacctccctagagcagatcacccgtgggccagcaggtgtgtgctcatctatctatccctttctacaagagtgttctctagccctgccaagcaactggccctgttcacaatgctgtcaggttataacaaaatacgtgatagctccatctacacagaaagactcatctcagatgaaagtttttgtcaggggagcggtgagaacagcagatttggggatgtcctgagtaaagcaatggggcaagctaaaactgggctatgaccagatggtgaaatgggttgaaaaggagcttataggttaatctgacagacttggttatgcatctggcagaggaaaaagagagaagttaaaaatttaggagagagatgataactgacagagcgtggtcttgaaggtggcaggagctgaggaagggaaattcaggtgagcagctttgtcttgaaaagaggaggaacaccacatgcagggcagcaagagaaagactggggatgggtaaggctagggatggcttcaagcttcctaatgacatgtatggcagaggtgtcagctgagaccgagggtgccgggtggtaagcttgagtaaaggagtggaggtttgagttaaaatgaataagagtgaaacccatcaaggaatatttaaaaaacaaagtttgttcttttagatattgagtgaagcaaaccatttactacacatacaacccctaaacacattgtcgatattgcagggttttctacattcacattagtagaccaacctctgttttaaaaatgtactcctggccaggtgtggtggctcacacttgtcatcccagcgctttgggaggctgaggcaggtggatcacttgaggtcaggagtttgaggccagcctgggcaacatggtgaaaccccatctctaccaaaaaaacaaaaattacacaggcgtggtggcatacatttgtaatcccagctactcaggaggccggggcatgagaatcgcttgaacccaggagggggaggttgcagtgagccgagatcatgccactgtgctccagcctgggtgccagagcaagactctgtctcaaaaaaaaaaaaagtgcactctgcctatacacctgttacacacatacacacacacacacacacacacacacacacaaaccactctacatccttgccaatttataaccaactgaatgtaatggtcaatattctttaacttcccctcaattaaggagtgtgagagtcttttttttctttaaactttgagtttccaatttagrtatgtggtctttatacagtactatttcacagtgtgaagtttaggttcaagtaataccacagtggagcttaattctagccgcaggatgtggttggtaactttgatagatcatatgctcattgtgatccagggactatgctggatgcttgacacctatgttatcctgttaaaaatccgtacaattgttaagctgacagatggggaaactgaggtttactgatgtgaaaacatttgctcagggtcacctaccttgttaaggtaaatgtcgaggtttcaaatgcaggcctggaacactaaatgccatcatgtcatctagctacagcaagaagctgaaaaacaatcctccttagtttcgatgctgaagatgctcttcagctcatgctgacttgaatttcctgtgcagtgaaggaggagaaggagaaagtgaattttaatcaacttccattaaattaaatctgattctactgaagtttattaagtgcctctattcacttggagagtgccaggcacttcrggggatctatggatgagtctgactcagccctgcttcaagagcttayaaactagtggagaggatggcagtgtgcattttgctctaacacgagatcaaaagtgataaggaccataagaagtgactcaaacaatgggttcttaaggcagaaatgcaagcttatgtgaataatgagaaaattgacccagcagtgcctaaacactggaagcattgcacaagggaactctcataaagggtttttattttaaacatgatcacrcctttggtcaaatccatgccacgtcatgagtgaagaacgtatggtgatgacatcatttgcaaggctgtaaggtcagcagtgtcagcccagtgtgagccatagagtttggtgatttaagacccaggggcaaggcaggaaggtcacagcaatcccagtggtggtgcgtggcctgcagctgctcttggttctttgtccattttggcaggcaacagctgttcaagacatcagactgcaattataagaaaatatatgttatgtcaagttgttgtcttttcttatccttttatggtgcttttttgaagttaaggaaccttagcttcagaaatgctgtgatcccaggataggttaagtcctacatattctggctaatcaaccttttaatacatttttaagggaatttaaaagtagggcagccgataccaccatacaattcttgtccaggtttattgcaagcttttgaagaaaggaatcagagctgaagagcatgagctactacgaaataccatgtgcaaataggaatttctaaatgctgattctcttagtgatcacttatatgtgttaggttccacaaaccacttccaaaatacacagctgaaataaacattgcttctgtctttgaggattttatctctaaatagaaaggttgggggaatgattggaagcaagatttcaagtgccatataattgagaatgcacagctaactacaaaagccatcattccataacttttgcaacacttcgcaccgctctctaccaccacatggctgtccccagattcatccgaacatccttgggttttctttgccacactcccctgctgcagtcagtccgtgcctccctgattggttggttggtgtggcatttggtgttgcttgcacgaggtgatggatgcttgtctctcctctttggctgcttggagccaaaatacaaaagtgctggttaaaaggtgatttatcttccctaatggtaccatgcattgtaaacagggcttctactctgtcttcactagactttatgatactgttgtgtgttgtgccattaaagattgttgtcataacaaggagaatcagagggtagaacatagtcataggccttaaaaggctgttttctgagccagcgtcacgtggtgactttggggttctcactggtcaggcatctgtttggacacattgtgctgtgggtcaccaataaaactcgattaggttctcctttctccttccttctgtgcattcttattgggatccagagagtgcatggtgtttttttctacctgccagaggcacaaatgtttgtgtcttcattcagaggtgagcagctgtcaggcacgaggtgcataagcatccagcccctgctcccctggggctggctaagcccaagtcctttgcacttctaggaaaaactcctgctccttgtgtgtactttcctctcaatgctcattcccgtgcccatctttctaaacggcatcactagatcaagatttggcctcccgtggccactctggggtatatttgatttaaacaaaattcctcaattgagaggtgccttaacaagaaaggaaataagatttctcaggcccagtgagtagtagttgttggttggtacgcagaggattccaaatgacatttggaataaaaaatcttctcattagtccaggtacagtggctcatacctggacagccagcattttgggaagctaaggcacaaaaatcgcttcaagtcagttttagtccagcctggacaacataggaagatccagtccttaccaaaaaaaaaaaaaaaaaaaaaaaaatatatatatatatatatatatatatatataaattagcaaagcatagttgtatgtatctgtagtcttagctaatcagtaggctgaggtgggaggatcatttgaacccaggagttggaggctgcagtgagctatgatggtgccactgcactctagcctgcatgacagagtgaggccctgtctccaaaaaatttaaaaaatattgtcccaaaaaatacttatctgaccaaacataatgggcaactcagcaaactgaagcaacaacaaactaaactcatcttcttaggaaaccctccccttccttgtcctccagctgacacttatatacaggggtccttcctccccttttccattctgatctctttcctgctttacctttgtcctctcctccctctacttctccttgtccagaccccaaatcctcccaacaactttcctaaaactccaaatgcccagttgcttctaaagttccttttgtcctgtggacaagttgtgcaggcaactgtagaagttaaactttggacctagctgaatcaagacctacaattaaaaaaaattttttttaaccaagaggagaccagtgaatattcacagaagattacagaattattttgagtgcacatgactcaagagttacctgatgctatggaccaaatgcttttgtccccctcaaattcttatgttgaaatccagtcccttatatgatggtctttggaggtgagaccttgggaggaggtgattagattatgaaaccagagacctcatgaatgggattagtgcccctacagaaaagtctccagagggctccctcatcccttctgctatgtgagaacacagtaaaaagatggctgtccatgaaccaggaagccagccctcaccagacactgaatctgctgaagacttgatcttgaacttcaccatctctagaactgtgaaaaatacatttctcttatttataagccacccagtctttggtatgctgctttagtagcccagactagctaagacatctgacatatcaagtggcatacataatttctggaaactctgatgctaaattmttgatgccaaaaggtggtaagatctgactcagaaatgaatccatatgagccttccttccacaataaatctaagagtcaaaaaatgccaaatataggtcaaagacctctaaaagccatacctgaaagatttacaataatgattgtaatttaatcacacaaacaaccacagcaaaaagatgaaactctgaggtattttcaggatagcctcagcaatgctatctgacaatatagaggggtaaagaagacatggaaattttcattaaaaagtcaaattctttatttgaaagttattatataaatttgaaatcttatcaatatgaataagtgtttgggcaggatggaggcatggagaccccagggcacagctgctagtcttggaggctttgggacctgtaccctatggaggctgcaccccctccagatacctccgccctcctgacagccagaaagagcctgttttgggcagcatattggaggacctgttgcaggaagtcagggaccccgaacagagggaccggctggagctgtggcagaggaacataaattgtgaagatttcatggacatttatcagttcccaaataatactcttataatttcttatgcctgtcttactttaawctcttaatcgtgttatcttcataagctgaaggatgtacgtcacctcaggaccactakgacaattgtattaactgtacaaattgattgtaaaacatgtgtgtttgaacaatatgaaatcagtgcaccttgaaaaagaacagaataacagcaattttagggaacaagggaagacaaccataaggtctgactgcctgcagggttgggcaaaaacagccatatttttcttcttgcagagagcctataaatggacgtgcaagtagggaagatattgctaaattcttttcctagcaaggaatattgatattaatactctgggaaaggaattcattcctggggggaggtctataaatggccgttctgagaatgtctgtcctatgcagttgagataaggactgagatacgccctggtctcctgtaagtaccctcaggcttattagggtggggaaaaaccctgccctggtaaatttgaggtcagactggttctctgctctcgaaccctgttttctgttgtttaagatgtttatcaagacaatatgtgcaccactgaacatagacccttatcagtaattctgcttttgccctttgccttgtgatctttgttggacccttatcagtagttctgttttttgccctttgaagcacgtgatctttgtacctactccctgttcttgcagcccctccccttctgaaatccttaataaaacttgctgactttgaggctcaggtgggcatcatggtcctaccgatacgtgatgtcacccccagcagcccagctgtaaaattcctctctttttactctttctctctctctttatttctcagccagctgacacttatgaaaatakaaagaacttacattgaaatactgtggggggggtcccccgttaaggaccctagcccagatgctcagctgaaatcagacctcagtccctgaagaaagaggtggcctctgggagcaggaggagctgctggagtcccaccctgcctgctccttcacctcctgycaggaagcctgccatgaacaaggcaaagcctgcaccaagtatgagaaaaaggggcagttcccagacacacggggtcaagcctgtcccctgggaagcctttcagagaggcccaggagctggggtygcatgctctgctctccatctccgtgacaactcctatgttcaggatctggaggagcatggggcttggggacaggggcctcaccaattgctgcttctcttcagcctcctgctgcagggctgaggcgagaggttgcagcagatgctatgatgtcaggtatctccttgctggactgattctcacagtcccaggacaagggcaagaaggctctggaggtggctctaactgcagcactgtaactggaaggttctcatcccatgctgacactaactcaacagctagcactggaaatgctcctacttctggatatggatcagagctgggaaaagagataggattaccatcatcgatcactttgcactggtctttccaaacaccaaagtgaactcactgaatttaggggaattccagccccaaaatcccacacctcagaaaatcttccagactgcagccacctcactatctgcctctacctctccctctatctgatgggctccagaggcttcatccaggcaagaaaaatgtgcagatgctgcggcagctttgatccaggccacttgacctacatgtaggtcaccttaggcttgaaggatggaaagcttgggggctgagagaaatctacagagtattgatctggccaagtggccaaaatgaaagagaaggtgctgggggcaggaagtgggcatcagagtcagaggcctggtctttcctccagcacggctcatccacagcacctgtgtgctgctgcctgtctagaggacagccccatcccagtccaagccctttgtgctgtcctggcagggacagacctggtcatagagcaggactttacagacaattgtggatctcagctacccactgacattctcctcctgtaggcccagggcacacagcttcgtgtacctgggcaccaggactgtggctccaggcaggcgtgtgagcaggtggctcgtcactgcttcaggtctgggccccctggtgctggggttgggaaaggtggatgtgggaaggaggaggacaagcagagctgggaagtgactgtgctgggcatgggtcttttgggggccggctctgactccaactcccctctcctttgacaaggacrtgaggccccatcttcagctcaccttgacttctttcctcttgcagaagccccagacctcagccatcttggaggaattatgaggtgtatgagatccagagttccgtcagtctctccccagccacaggccgtataatcccctcatccttttggggtcccaggaagtccttcttctggacccagagtccacccactttagagttggtcctgggatctgtcatcctgctcagaatctgggaggaagtgtttatacctagaggaggccaggagggcattgcatctcccactctgtgggcgtgccttgctttcgatgtctccagtgaggatctgactccctggatagaatggagttgaggcccaggggttggcatctgctttgtttgttaaaatatgctagtcatctataaaagtgcctgcacaaagtaaatgcttaacatatgtgtgtttagtgaatgaacaccaaccagaaccttcctagataactgagcgtgcctggggcctctcttctagcacgcagggacttgtattcatagactgtataaagagcattatcccagcaaatcctcaaaaacacaccctcattttagaaatgagcaaacacaggcttttggatgtaagaaggcagctccaaaactgctcacgggaactactgtgtgactttccctctcaactccccgaggcttggtctgcgctgacacggaggaaaaggacctggggaggccttgtttcctcctctgttttagagacagtgacacagcaaaaaactagaagaaccctttggacttaaagccaataactgyttctttgtttaacataaaggcagtcttgagaaacagctaccgcaattgcagacccggcaaagggcccaatgccaggagactcattgggtgggagaaagagcccatcacagtgccacggatctgagcgatgactcagggaggagaaaatccaagtggggactatacagccgaaaggtgacacacacatatcagcagggaagctggaaatgaaaggatcaatggaattttatttgtcacgcagacaccggattgacaaaatattagaagacttgacacccaggggtggctggatgctgggaagcagctacattcaggactgctggtggcaatgtatccacaacagcccttttggaaagtcatctgactaagccatgaaaatgtcatgtatgcatattcctcaccaagtaactcctttcctgggagtctgtcttctgcaaggcattagtatatgttacaggatgaattttgtctactcttcaaagttcatgttcatgtctaacaccagtgcctcagaatggaactgtatttggacatgtggtccataaagaggtgacacagattacgttcattagggcgggccctaatgcaatatgactaaagtccttataagagaggcagtaaggacacagtgaagcaccagggaaggccctgtgacccagagagagctggagaccatcaactagccatgcagagaggcctcagagaaaccaatgcagcccacagctccatgtccaatttcaagccttcagaattgtgagaaactgcatttctgttgttaaagcccttcagtctgtggcactgtatcatggaagtgctaacaaactgtcatggcctattctgaaaagcatcagataccgctacaagatagctgatgtcgaaatagaattttatcatgtgaggctccggcagcattgagaggcctcccttattgaaagttatgaagacatatgaggacacagctcctctccgatggtgctatgggggtgaggtctctgaggtgacatattgcagacagatgcatagagcagctgaasgctctttttgtgtgacacccycaccctttgtaaaaaagaacctccccagtaagactgacagcttgtaaggtttggaggcagtctggcaggacagtggagctgtctgctacaggagacacctggggtaggttgttaaaacaataaaaacagcagcaacatgcaaagataatcatagcgttgtgtaaagtgaaaacaacacaaaagcacttcctctgatcttcctaaaagtagatgagcagggactttccacctaaacaagttgccactgggtactaatggaggccagattcctttgggaggggactgtgggtcactcaagtgggaaagccgaaggacagagcccagggagtccccatttgtgcgtctgagtcatgggccaccctggacttcttgagtctctgtctgtggagacccctctgtgcctgctctcaccctagcccagcactggccrtggttgrtggcatgttgcacctgcccttcgttcaaggagatggtgttgttgaacccatctcctgcatggagctctgcaaagagagtgcctggcatcaatggcctgcctggctctttgaggtttattttataaagctagtaatcccaatcatgagaattccaccctcaggacctcattacctcccacctcctaatatcattacattgggggttaggattttgccatatgaattttggaggggggagatattcagtctattgcaactgttatgcttttattatccccaaagctgccatttttctgctgttcactctcttctgtttttcctcccccaatctctcagtctcttgtttctctctctctctctctctctctctctctgtctctctcrgtctccattgcattccttaaactggggaagcgagttctgctgttatgaggtgctctatgtacaggcttacatggcagaggccaagggagtgcccaggccaagagacggggaggaatttacgccctcagtccacactgagtcctgccaatacccacatgagtgagcttggaagttaatccttccccagtccagtttcagttgagaccacagtcccagcctcaggagaggcagtgaggcagaggcatccagctaagctgtgcccagattctgctggacacaaattgtcagatattaagtatttgttgcttaaagttgcgaagtttggaggcacaatgttgtcaaagacaagcagatctctaccctcatttcccccgactcctccctccctctgctcctctccccccagcctccctgcagccacactgtcccctttctaacctcctctgccaaactcaggtccacctgtgaggctgtgccccagggtggcttctttctgacacygctgtccctgacttgggcagcrttggtcccccattgtcattctggccatggcataaatgtcacctcagtgaggcatttggattctccccacacagtgactccccggccctccctcccgtcatcctaccgtatttttatcacagcacctgctcttttctttcatgtggacttgctttagtggttctgtgcaggtctcctaagactgggctcctggggtggagagggactcctttgccattttcagcaccaatgctgagcccaccaggccacctggcacaaggtgagtgctcagggcagagtcgctgagtgaataagtcagcacggggagaaagtgattaaaccccttcctgcttccrttgtcctcataatgtggggatcattgatactaacaggaggtgcctttctcaggaggctatcccggagctccacctgctccagcaaagctccgtgggcaccagggacatgggaggctgctgccccctggtgaccagtactagcactgcagccccaggcaggagcatcacagagaacaggcacatgcatttggactttattaaaactaagaacttcatcaaaagatgccttcaacaaaataaaaaggcaagaacagagtgtgaagaaacatttaccatttgtgtgacaagagcctgacatgtaggatgtgggactaactcccatcaattaagaagaaaggcgacacactggggagaatgggtaaacaatccggacatttcccaaagagtggccagacagccaacaggtgtagagaaaggtgctgcacattctccatcatcagggagatgcagattaaaaccacaatgtgataccactatgcaatggataacattttatttgaaaaacaacatcgagtgttgctgagggggctgagcgactgggactctcatatgccgctgtgtgtgtaaactgctacaaacaccctcaaaagccctttgataatattttctaaagacggacatatacattctatggccccacaatttgactcaggtatagatccgttagaaatgcctgcatctgttcaccacgcaaaagaacgtccacaaatggccagaactatgacagttaagggaggtaaattctcaatagtggagctgtgggttaatttagtttctccttagactatttttctcttttctacaatacatcattatttagcacttttccaaactggaaacaactcgcatgtacatcaataataaaaagaakacatgaaatatatatatacaaaagtcctaaaatatgatattgcatatatagacgcatataataaaagctatacagaactgaaagtgaactatagctgcctttagaaatacacrtgagactttcaaatataataaattatcctgacagagtttattctgtaccatttcatttaataaaattttaaactaatattaaaattaaaatattaaaattctcacttcagaagtgagaatatttgttatcactggagactcttctccagcgcagtggcctgagatgacaacatgagggaactcctagagggctgacgatgttctgtttcttatgggtactggttactgggtgcacttgctttggayaattcattgagccacgcacttattatttccatatttttaggcataygaaatgctatgctatgctatgcttcaacacacaaattcacagaatcaacctaaatgcccataaatggaagactggataaagaaaatgtggtgcaaatacaccatgaaatactatgcagccatagaaaaagaatgagatcatgtgctttgcaggaatgtgggtggagctggaggccattatccttagcaaactaagacaggaacagaaaaccaaatcctgcatgttcgcataagtgggagctaaatgatgagaacacatggacatgaagaggggatcaacagacaatgaggcctagcaaagggtggagggtgggaggagggaaaggagcagaaaaaataactatttggtcctaggcttagtacctgggtaatgaaatagtctgtacatcaaacccctgtgacatgagtttacctataaaataaacctgcacatccacccctgagcctaaaataaaagtttttttaaaaaaacaaattcaagcaattggatctggactttcatttttctggttaatcccaaggccagcaggcataggggttggttcaagactctggcatcgtagcatctagattcctgtcctgggtatcaccacttcctatctcagagatcttggccayggtactaactctccaagctccagkttcattatctgtaaaaggagttaattatgcttcccatttcatagttattcagaggattaaatcctcacaagaaatactagctcttgygggacttcatgttgttttttgttctatgaactatggagaagacagatgatgacctgtggtaaaggaaggagaagcatgaggytcaacccaaagatgttgtcaaggtgaaatgtagacagggcctcttggcttgaaccgataaatayaatctatagttgtaaattttgaggccatccattaataaatcctccattcctcccacctttgtctataattttgttaataacgctcgatgacatcatcaatcagaagatagcccagggcagggtctcccctgaaattctccctccaggtgacagtgatccattaagcagcctgctatgtggcaagaaggaaaacgggtttggatgtgtgttgctgccacagcagcagctaagagccccagggacttggctgctggcagcatcctctaccagagttttccttcgacagtgagaagactcccggagtccttaggagccaggatctggctgtcgggagacagcattcattcatgcattcattcagtcgttcttcattcatttgaaaaaacatattgaagtcttctacaggctagatgtgctatgtccttataataaaggtcaataggacacaatgcctgccctcaaggagcttkcctgtctaatagagagtaatatcacagccagaaggactctatgaaagaatccagccaggtcatgccactcttctgctcaatactctgcgatggctcccatgctcctcagagtaaagttcaaggtccttcccacagccccataggacctggccaccccatagttcttgtccaccccccgtcctctcccctgcagccgcaccgccctcattttcaaacacagyagccaagtgcgcgcctgcctccagaaccttgcactgtacttgtctttttttgtctagatgctcttcccccaaacacctaccctcccttccttgcaagcctttcctcggaagacaccttctcagggaggctttgtcaagccccaccccatctaaaatttcaacactccccagcacttcatatcctcttcctgatttatttcttcttctcaggacatcttcctctctaatattctctaccctacttactaatcttgtttaattgccatctctcccaccagcatgtaggcctctgagagcagtggggagctgtggattattttgatgtggttttgtttgttgtacctagaacacttagattagtgactaatacagtatatagaaactgggaaaaggaaggaagggaagggaaggggagggaggggaagggaaggggaggggaggggagggcatgttctccttacaactcgatccgactcccctagaagagggggcagggaaggagggcaaagctagkagagttgaagaatattaagaagagaataaggtagccagagttagcaaataaaaatataaaatgcctagttaattctgaattccagataaagaacaaataattttttagcataagtatgtcccaaactaagaatggcacaagacatatttatgctaaagaaattaygtattctctaataataaattattttctccaatgcacattgattttgcatactgtattttatctggcaaccctaaaatagaaggactacccccgtactgcttcactccagctggactcttatcctctgtgactactctcctaccttaggaaagatccaagtggcccctttcctcctcatcgccatcccttgccctgcacatctcgttttcctgtgtcgcagcaagtccagcgcctccaagacttggctcttctctccctcctcaaacccttaaaagaaagggccaagtctgaactctttgcctttgagtcgtggagacaccaaagatatttaggttataagtcaaaggggagagggaagtcacataggtcccacgggcctcagacctgccacgtgtcctctccctaagtctcaaagcttaagaakacaaaccttatgcggcaggaagtgttggttatagctgttttgccactccttctggttatgttatttctgttcttctgatactacagcccccctaggtcatgaatttctctgtccatgctaagtttaatatctctgctcaaaccttgttaaactgcctccagaataggaaactcttcttcctggcctcataaagcttggagccctctccaatgtatgttacaaaatttctctctaggcttctcagaggattataggctccgccttaaaaaaggcaaactctggacactctgtggagtagaatggccaaagtttagagtcaggtgcacccccgcccccagaagggtcactgaacctcgcaattgttcagactgtgtggcgggttgttgctggaactcccggtcaccccgatcagtttccctacattgatcaatggctgagtttggtccggagccctcctccacggctccgctcatgcgccattcataattctacctccaaggtccttttgagccagacctcactttcgcctcgaccctcagccggctcggctcctcctgtattgcctccttgtgaggaagaggaaagtttccttcacccagttccaccgccttataaccctcctgctccctcagaatgttctcttgtctcctscactacctcccctgtgggctctccacctattgcctcctgatcgcggccacggcaggaggaggtagccccmctcctcccgctgaggaggcacaagtccctccgggcgataagcactcaggcccattcttagtttatgtcsgcttctctacttctgacctgtacaactggaagactcataacccccccttttctgaaaagccccaggtcttgacctcactgatggagtccatgctccggactcaccggcccacctgggaggactgtcaacagctccytttaaccctttccacctctgaagagaaggaacgtacccgaagagaggccagaaaatatttccttacatcagacggtagaccagaggaggaagctcataacctcctagaggaggttttccctctacccggcctaattaggatccaaactcctcaggcaggaagagagctttagatgattttcaccagtatctccttgcgggtatcaaaggagctgctcgaaaacmcataaatttgtctaagacatttgaagttgtccagggrcctgatgagccaccsggggcgtttttggaacgcctccaggaggcctaccrgagttacaccccttttgacccggcggctccygagaatagctgtgctattaatttggcatttgtggctcaggcaggccctgatattaaaagaaaattacaaaaactggaaggatttgctggaatgaacattagccaacttctagagatagcccagaaagtttttgacaatcgagagtttgaaaagcgaaaacgggcagctcaggcaactgaaaaggccgccgataaggcatccaaaagacatgcgaaaatcttagtggcggccatccaggaagccaagaaggaaaggcccccatcacagaggaatggccagggaaccccaggtccccgccagaaaggcaagaaaggcgagcaggctcccctggagaaaaaccaacatgcttattgcaagcagactagacactggaaaaaagaatgcccattaaagccagaggaaaaaccagaaaagaaaaattaagtcctcaccctccccgcagcggaggagtctgatgactgacgagaccggggctccttctctcttggcccccagtagcccacggtgaccgccacagtggasggccatggtgacgtccggtagcctacttgtcttaagaggctagaccctgtggcctccaccaagtagccaagttgtctgtgagcagtagcagcaacagcgagcctggtccaggaagctgataaactgactctgggccaaaatttaacccttacaggtcctcatgctgtagacactttactaygaagtgcctctggcaaatggatgtcaaatgcccgcatcctgcagtatcacagtttactgttagatcagcctcatttaactttctctcccacaagatgcttaaatccagctaccttgctccctgacccagaccttaccacacctgtccatgactgccaagaactgttagagactacggaaactggccgacctgatctccaagacgtgcctttaaaggaggcggatgccactgtgtttacagacagtagcagcttccttgagcagggagttcgaaaggctggtgctgccatcactacggagacgaatatactgtgggcccaagcactgccagcaggtacctcggcacagagggctgagttgattgccctctctcaggccctccgatagggtaacgacgaaygtattaaaattcacactgacagcaggtatgcttttgctactgtgcatgtacatggagccatctaccaagagcatgggctactcatctcagcaggaaaggctatcaagaacaaagaagaaattttggccctgcttgaagctgtttggctccctcaacagctggctgtaattcactgcaaatgacatcaaaaagaagacatggccattgcctgtggtaaccaaagagcagactctgcagcctgggaggcagctcaactcccagtcacgcctctgactctgctgcctgcagtgtcctttccgcaacctgacttaccagatcacccagaatactccccagaggaggaaaaataggctttggatcttcaggccagtaaaaatcaggaagattggtggattcttcctgattccggaatcttcataccccaagctctcggggaaactttaatcagttgtctgcattctaccacccatttagaaggaggaaacctggcccagcttctaaggagccgtttcaagatcccccaccttcaggacttagcgaaccaagcagctctccggtgtacggcttgtgcccaggtgaacgccaagcaaggtcctaaacccagctcaggccaccgcctccggggaggctcgccaggagaaggtaggaaattggctttacagaaataaaaccacaccaggcagagtacaaataccttctggtactactagacaccttttctggatagactgaggcatttgccaccaagaacgagactgccagactgccaccacggtagttaggttttcactcaatgaaatcatccctcgacatgggctgcctgctgccatagggtctgataatggaccggccttcacctcgtccatagctcagtcagtcagtaaggcactaaacattcaatggaagctccaytgtgcctctcgatcccagagctctgggcaggtagaacgcatgaaccacaccctaaaaaatactcttacaaaattgatcttagagaccggtgaaaattaggtgagactccttcctttagcccytcttagagtgagatgcactccttaccgggctaggttttcaccttttgaaatcatgtataggagggctccgcctatcttgcctaagctaagggatacccatttagcagaaatctcacaagctaatttattacagtacctgcagtctctccaacaggtacaagacatcatccagccgcttgtccggggagctcatcccaacccagttcctgaccagacggggctctgccactctttccagccgggtgacctggtgtatgttaaaaagttccaaaagaaaaaaaaaaaggactcactcctgcctggaaaagacctcatactgtcatcctcaccacactgacggctctgaaagtggacagcattcctgctcaaattcataacaccccctagtaccaaagcatgtttaactgtaatccatgactaactactctaattactggattggcgggacccctttctcctcctcttgtttagtcttcaaacctcgtaagttaaaactggtttcttaactttataaagcaacacatagcttctgtcaaacttatatatcttaaagtccaatataaccctcttgtaacaagtggggaatatgatatgctaccttgttttaacctgaattgagtctcccttagctgagagagccagacaaactccattttggctccttcacttgcagctccttgcccacccaattcctcaaggacttaacttgtgcaagctgactcccagcacatcagagtgcaattaactgataaggtcctgtggcaagttatgyccrcagttcccaggaattcgctcgggtgatagtatcctaagcccctgcatttgtatccagtagatagcacccaaagcccttgcacccatcaccttgtgatggatttaaagcccctgcacctggaaccatttgttttcctgtaaccatttgtctaacttttttttgcctgttttacttctataagattgctatagctaggctccccttcccctctctaaaccaaagtataaaagaaaatctagccccttcttcagggctgagagaattttgagcgctagccgtctctcgatcgctggctaataaagaactcctgaattagtctcaaagtgtggcgttcctctattacccgcttggttacaacagctttatattaataattgtagtaataaagttgatcgcacataggatggaggaggcacctgcctggtgagatgagacaatggtcggattcactgaggctcctgcgtgtcccggatttcccgctgggggagggtgttcygctcagcggttcccacacctgcttccatgggagaagcaagaagaagtcagaagggtgggcgaaggagtcagaagcttctattattggttcggggagatgctgtgtcgggggcatcaattatatggggaaccaaccagttgccaactcctgacccttggagttgaccccacaccgcttaaacctctgcgctggttccccgggggcccacagtgaggtctgtaactcrgggagaggcgcyggagcggggtgtgggagaatggtgtgcaggacgggctccatgcactttgaaactataaactgccttatgagacaggggtacggtgtgtgtgcattttcctgggagagtccatagtttttaccacattgtgtaaagcaatgctgtgcagtagaaatattacgccatacacaatacatatgtacagttttagttgtcaaagaaactgaaagaagatcttgatgaacacggatggcatagatgtgaggaaagcaccattattaaagaatatttatgcatttatgtaatgcattaaaaggtaacaaaatggataagcaggtaacacaatagcaaagaccgagagtgaactgcagtcatccactggggaactgaggagtcagggtttctcattacaaaactccctgatggaagactattacttatcaactatttattgtctttccactaaataagaagtgatcgtcatcttttcagatgagcaccacagactttgcaaaagataattgccaattaacctttgtgcctggattttctcattcctaaaaatagatagtattacatgactccaaagtttgttgtgaagttaattggggtggtgtatcttaaagtaacaaaaatgttgaccacacggggggggggtggttagtgtaagactctctgtttttctgtctatatatatatatatatatatatatatatatataaaaagtatagtttaggtttacataaagacaaagtatcataaaaaggggtcttacaatcggtagtactaaaaaaatttttaaactccaagatcttcaattttaatgtataaaaataataaaacatactgataaataacagaagttctatagtcagacaacataggttcaagtttgggcttgatctcaagtagggtttcaatgttgaaaaaaaatgccatgtggtctttccaacttcatttccttatgtaacataggagataataataaattcactgtgattaagagttaaatggaatagttcttgggaaggtgttagaatggttctaacatacatgggtattatgagctaatatttgtagtaccattgtagcataaggaaataccatctgctgagagaggcacaataatgattatcttcatgataatagtttaagagctaccagatacagaacgaaggggccataaaatgataatgttatgaatgattttgatgcttacgccagaatccattctaggatagctcctgcctgaaaagaactgggattcatttctttggaatcacaggacactgagtgtggcaaaaagaaaacaaaagaaaaatatggaaatcacatatgtgattttaaaatagaaagaaataggagaggctgggcgtggtggctcatgcctgtaatcccagcaccttgggaggccaaggcgggcagatcacctgaggtcaggagtttgagaccagcctggccaacatggtgaaaccccgtctctactaaaagtacaaaaattagccgggcgtggtggcaggtgcctgtaatcccagctactcaggaggcgaggcagaagaattgctcaaaccccagaggtggaggttgcagtgagccaagattgtgccactgcactccagcctgggaaacagagcaagactcagttgaaaaaaaaaagaaacagaagaaattagcaatatatttcatttactccaatgtatccaaattatggtcattttagcatgtaatcaatatagattttaatgagatagtctatgttcttttttcctaagtctgaaattcggtgtgtatttacactgacagcacatctcaatttagactagccacatttccagtgctgagtggctgcatgtacctggtggctaccacactggacagcacaggtctaaggatttcattcctggttcaagaccagactcctagccttggttttgggtgtttttcacaaactggcctctctttatcattctttttcctggtacttcctcaaggatgactgtgtccccaccactcaagaccacttgccgtttcactacgtacctttgttcaagctgttccttttacctgggatgctctctcgtttcgttttgttttgtttttctgagacagggtctcactgtgttgcccaggctggagtacagtgacatgatcatggctcactgcagcctccactgacctcctggagctcagatgatcctctcacctcatccttccctagcagctgggactacagacctgcaccaccacacccagctaatttaaaatatatatatttgttggtagagacaggagtctatgttgaccaggctggtcttgattcttccaccatggccccccaaacttctaggattataggtgtgagccactgctccccacctggaatgctgtctctgcaccttctccctgggcctggtagagaggcacacattctgctgagaggttttttcctgacttccctagccctagaagggaatttgtccctccttagcattgtactcatggctggattagagtttaactgtttttgaggctgtttccctggctattgcatagtgtcttattcacctttgttgtgataatggtctgyactgaatagatgatcagtagatgcttgyagacagaatgaataaaccactaatcagcctcttaatgcttgaatggacttgctacttccttgtttagattcgtgtctgtacaatcctctcacgtggatagtacagtaaacacagacaccctcagatgtggtaacaaggaattcatcttaaaacgtgtgcagaaagtcttacatctttatcctcctcctgatcttacaggtgggagaactgaggcacaggactgagttaagatggccagcaaatttgcatcagtataaatacaaagaaggggaggggaggaacattcttgaaaggtgtgggtggtctcacacggttgggttcctcagatggttggagatcagttggccgtgccttggttatctgacaggagggaagagaagtgggaggtgaggagtagctcctgggtcctcatgagtattcaaggcaggttcaggtctgagaagcagaggatatccttcctggaagcctcagttaggaggaggaactcactgctggagaaaaagttgaagaggaaggaggacggacatctcagatcatgggaagtgctggcctgaggaggaaaggagagaaccatcagggtagaaggggctgaggaagccggcagggggagcagaagagtgggcaccagcgtggtgaagaggtgcagtgcattatgcatgatacacacattattattatgggaataaccatatatcacagtgcagttctcagcctggagaatgggaaatggaaaggaccagagattcagagagggcagtttatccaaggtcacacagcactttaaggccaaatagagcctccgaggcatttcttgccacactcacccaggcccacccacacctctgttgccacggagggtcccactacccaggagagcaggtctagggcacagtgccaggcctgatgaatgtccttcatgcccttttcaaacaacaggctatgattaggcctaattataggggtccggtcccttaatattcttcctggcatgtctcttgccaatcaaatcagtgccatctgcagtgtgattcctgctttagtggcatcagggggaggagttaattcaacccaatataaatagactgtgccctcaccttgcaattcgagtatttttccctcctgtcctgcaccccaacatgcacctccttccttctggctccctaagctctagcctgggtgagcagggcctggayactctatacctagagtcactagccactgcccagtctgtgtcagaagcaggcctckaattcctcagggttagagtgggaagaacccatgtgtgcacatttgcttttccaacctgggcaccatttggcagctgattcrggcaattctctcaccaccaccaccctgcccatgtacccctgtttccagcctctgtttttctctgcagccacggctcctttcttgtgtttccaaggtggagagctgaactgagatcatgtatggacagagtgcccggcaggtacccagcaccttagtaccaattccccagtccctggtcctgccgtctccctccctcattcattcagcaggcatcggcagaatcccatctcctgtgagctcctgacctcccaccaaatgctctgctgccacccacccccacctgatcagagggccaccccctgtactgggaagtcctctctccagtccctgcaacacaacctctgggagcagcccctttggggattcttggtcctggcggacccagctgtcttccctgggtggaaggggccaaggggagagcccaacttggaagctttcgctcctgagagccggaaagctcactcccttccaccccacctagcctcctggtttcctgtggtggctctgctctcccaactcatgctcttcctcccacgaggtagcaaggggcgggggtgggaggggggttggggaggttagtccttcactctttcctgcagccagaaaatatttacccaacagtgcctgtgtgcaaggcactgagcaaatcactatagatccagtgatgaataaggcagcgtccttgtccaactggtgtatacactctggcaggagagacagacctaaataaccaattaatgatcagttatttaattacagttgtgataaggcctatttatagtattttgtaatcactaatcttcatgtatcatggagcttgctccaccattgatctgagtgcgttaactcatttaatccttgccacattttatgagcaggcgctgctgttatccattttatagatgaggaaactgaggcacagaaagagatctggccgagtggcaaagccagggttcaaagccagggatcgtggccctgggttctgtgggttatcaccgcctctgtggaggggagatgaggtgctgcgaggcccatcatgggggacctagcttggtctcaggggtcagggaaggcggatgtgaggaaatagcatttgtggtaaaaatctcacggtgagtgggtaggtcaggaaaaacattccagaaagaaggaagcacatgagctatagccctgaggtggaggacctgaaaggaggccagtgtggctgcagcgcaggccgttgagggagccgagctggagggctgcggttcttgtatcggcagcactgaccccgcacagtccttgggctccagtgacttttcgctcagtgtttatctaactcgagtgagcgaatggtgtttgctgtttcctgcaaaagtcccaggggttgttgggtacacaggtcctgtctttggccacaagcaacctgaaatgaggcttggtcttcttcccgggaccccgggctgtgcctcacttgggggaccccagcatgaagcatgtgactgcctgactcaggcccctctcctggtccaagtcacccccacccggccccatccctggttgttgccagacctggagtccctgctccttcactggtgcagcctcctcttctgtcaccaactacagtcaggaggtgacagggatgaggctgcagtcaggggatttkcaggcacagagggttgggtgagacaaagaaaacgacaggacatggtgacagattaggaacaagaacgaaggaaagggaggagtcagccatgactgggagtaaggtgggagcattgacacctctccctctccacttgcccccatcctgcagcaatggacaagcatgtgggcttttcattttctgtgggctttttcagtggggatgtgacgtgctcctcctgcttggacacctcctgcacaraagagacaggtggacagaccttcctccttgccccttgtcctcacttcctccatccttccttctctcccattctactgattggcatctggtggcccccaaggttacacagcactggatcagctgcctgcataattagcaaatcattctttttttcttttttgagacggagtctcactctgtcgcccaggctggagtgcagtggcgcaatctccactcactgcaaactccgcctcccaggttcacgccatcctcctgcctcagcctcccgagtagctgagactacagatgcgcgccaccacgaccggctaatttttttgtatttttagtagagacagggtttcaccgtgttagccaggatggttttgatctcctgaccttgtgatccacctgcctcagcctcccaaagtgctgggattacaggcatgagccaccgcgcctggccagcaaatcattcttaattaccccagagtggaagagaacaaaggtgaagacaagagcccaggttcaggatctgcttctttggggtcatgacagaggcgagggaaggagtgaatctggatcagcagtgggtgctccctgctccctcctccccagtagcctctaggccagctgctggtccaactccgaaatccaccacccctcagccacccagccctcccaggagaagctgaagtcctttcctgtgtgtgtgagcgccaagctggagcccaaggatgacatggaggaggcgcttgggggggtctccccaagtctccatgctgctcgtcaacatcagagagatcctttgtagcagaaaatggagtcgcagggtgtgggtgcaagactcagcctgacttaatggggtcccagggcatcacactcaggtgcagcacagaggcgggagccagaaggtgaccagggtggcttggctcggtggcctgggacccctcagtgcagtgtccctgatgacatgggagaggtaggtcaggaacatggtcccaggacagcaggtgctggcttgcctgacctccacgttgcccctgtagatacaagaagtctgtcttcccggaccaactggttggtgctgtaacaaagagccatgtgatgctgggggcagagacagagaagaaactgttcagtgccccttgtccatcaatgagagagcagctggagcagcaggtggacagggagggggaggggcaggggcaggggcaggggctgggggccttgccaggctcctctctaggagaggctctattgaaccccttatgccaccacagctgtgcagggtgcacatgaggtctcgctagctgctcctgcaggtccctgtcacctctcacatgtccctacctaatcccgtgtgtcccggagaactacttctacacgccagacctgggccaagtccccaaggtcgatgtgccatcctacctgacctgcctggcagacctcaagtatggtgccagcctgggccccagcatcacccactctgccctggcaccaggctcaagtctctcaagcccagtgagctgkgtgttaggatggcagccaggctccctactcagtcacctccttccctaggcaccccacactttctcccatttccacttccgacctatamgatggcatgttaacagcaccccaacctccccaagctgctgcggtgctggtcagtgcaccctcatccccaccccaggcccygcccactgcagtccaaggtgccgggcaggatgacagcagcagcatccccttcaggagggagccrctctctgaggccacctcagtctcatttctggatccctggyrgattttctgtggggttgttagctggtcagaaatcccttattttttttaatagttgtcatttcttgttctacttggctcataaaatagtggttttcaaaytgtagcgccctggaattctcacctctacggtagagggagcctggacaagggtggccctggggcccccattcctaaaccaaggagraaaaagggtctaataacaaaaacactacaggggacaggaacacggagccgggggtcmaatgtgactgaaccccacaccccactccgtggctttcctattgcagtgagagccgtaagccaaggcagggaactgatgtgggatctcttcaacaagctggtcctgagacgcaagsgtaggaggcagggccgctgtctgccatgggctgtggcatcgttaattctctcttgcctttttcttcctgtgtttaagtctctggggcctggggaaaccagtgctccccacagacctccctcactcascctttsccctccagccttttcacctctggggctggtgaggggccgggargagagagcccgtatgtcagacaacaaaycgtgtctgctaacccccagcagccacaggcagaggaagaagaggacaactggaaatcctagcgggcgccrccatgccttcctcccctaaacccagactcyagccatggcccggacgtggacacagccagaatgggatcctcagccctgctgccctggaggaaggggcrgggatgraactgtcccagktctgtgtggagaccaccttcggggagcgggaggctggcttsaggccacrcagctggggtgggggcttcyrtctgcctgtgctccatcggaggatggctccacccagcccctgcaccagtgygctcctcgattccctaaagaggcttccagagaaaacagcagcacatatcaatraaaaactcagcagaaaccaacagyacacttttaattaaggacctgtagctgtgcaggatgcaaacagctgggcatcagtgactttcctcctgcccccggtttgtccctgatggtggcagaagatcccagctgaccacrgcccctttctctggggtcagagggagaagacaggcgcagtcagcaggggcagctgytgcaggtgggagggwtattttcccacaggaacaaaggtctccatgatgatacggggtctctatagtcatgttgagagcctaatggcccttggcataattgctggtgtcggggtagaaggtgtcttggagtttgctcaagtggttgagagggagggaggtgccatagacttggaggaactggcacgaagccaaggatacaaatccaggcagggctrtggggcaggatagagagcagggccttctactgaaggagtgactcaggaaggaggaggggaaggtracaagcccctgggcaggagccctgtggccaygggatcattttaaattgagaccagagagtgagcagtccagggcagctataaccttggctagaaagggcagaggcagatggrcctgctccatctcrcctcttaaggtgggcaggacggagatgccacagtggatgccacwgctgccacagcctcctgyggacwccaagmaggargcctggctctcagccatgcaggatggaaagaaagattctattccaggaggggagctgccctggaacgccccaaggacagccaggacccactgttcattcaggattcccscattttctcctacgggagctaacrcctgtgcctgggtccyggcagcgctctggactccacactctcctcctgggtttcacctttgtaacaggatccctgcagaccacgcccacgacaaacactgtctccagagggcaggacaaaggaagggcacggcgccgggcggtggtgtggttgcccatcaggaagaggccgacttctcccggtgaaactgggcagacagaaggcagtgagaaatgtgatctcggggtkgggaggctctcagaaagaaaaaggtaggactgaccttctgcacagcagcaatggcggggccaaaggtagctttgacctccacgckggctcggatccaggccggcagcttggccaggacagggggccgggcrtatcgctggtccaggagcactatgctggcaaaatccttctggtgcctgatggccctgcctgcataggaacagaggctggsgctccgagcaacacctgcctccccctacagcacattcccatggcgaccccctccccttcctcagacttayataggaaacagggcaggcaacccctctttcctgttctccccttctccagcycccatctgtccacccagctggaggcagccaggctcacctatggactggttgacggccttcatgcacaggttstccaccagagccttccctgggkgtgcctggccgggggctctgggctgggagtgaaggggawgacccatcaggacygttccctgcctgcagctcccccggggaaaagaccctgccaggctttggagccagamcaggaggcttygtggccaatgccagcagcaggggtccaggtgacatcacagggaagatcaagagggtgtggaggggcatccaagcttccggagggggcaggagacaccagcgcagtggggaaggcctggctgtatcagccctgggggtgatgccactcccacccactgcctactctgtcaccctctgtgacactggggtcactcacgagggtttgatccaagtaggccatcttctcctgcagctctgcagacctgatgttggggaagggcatgcccaccatcaccacacacgtggggrggagacaagagcccagtgggtggacgtcaggaactcccgggtcatcacccatgtcaccagctgctccgttctaccccttycgtcagccctctccgactgtgatcaaaactcagcctctctccactctgtacctaccacctggagagggcttgtaaggctgagagatcccgtctaggccaattgattgggtcctgatacagcaatgrccagcctaaaatccaactactctctcagggccaaacccagagctgctgagcccctccctccagctggctggtctgagcagtcgcagcccagctgtgggctctaatggcagcagasagcaggcaggggcccagctgctgggagtgagggccggccatgtatcacgacccaggagatgagcagaaccactacttaccggcctaggttgtcagagaagttgatcccttcactcatctttcctccaaccacagaraggagcagggcctctgtcacctggcctctctcctggccacaggcctgtaggagaaacccagaygctgagttgctgagccaaaacttggatgacacccacgtttccagctgccacccccacayggtctcagacccaagcycagcatgacgcccgcacctggatgcacctggaatacgccagcagcacctgctccacctggtgtgcgctcttaggttcctggaatatctgagaaagacasaggacatttcccagagacaggtttagggtgccaggtctcgggtctgctcgtggccttgtgttttctggccagcggactggagaacctcacagccagggacttkggggaaatcctctgtagtcagggactgggagcggtggggatgaggagccaraagcctgtccygacccgatgagcacaagagctcccaggaggactcagtgrcactgtcctcacaagtggcaaggctgccgacaggccactcaccttcttcctggcagccagacggcccagcaggccacccttctcccagtgggcatggacctggcgcaggtactcgtaggaggggaagaaacagaccacccctccagraaccacaccgcacaggttacagagratgcgacccacctcgtccatctaaggaaggaaggragggagggagcccccatggagcaacccctcagccacccacaaaccgcgtcttcaccttgagactcaaaactgaggagagaccctyggcaggactacagccaaggaagaggacttggctcccctgggtgggaaccacggggtggtaggtgccacctcccaccaaacacacccagccgctgctgctgactgcgcctttctgacacatgtcacagcactagcgtccctrgggggcctccctattgccctggcactgagtcctcccttcttctgtccagggtcctgatgggcaccacaaygacaatcaggggctgcacaccccaggcacaccacaggagatgcccccaagccccacatccctgcccccagcaggggcagatataaccaaagggcaagagagccaaagggaactagcagctttctcctgmgtgaggcgtcctcagaagatgcctggaggttttatgaatacatatttcgcagcctaaggtgtgagaggcggggaagctcagaccttcctccataagcatctagatcgacgccgctcattctgtgtggctctaagtgggtgtccctgtgcaatttccccaacacctgaaaacactcagggtgggccagagcgtccctgccccagaaaaccctttgctgcctgaggccaggctgtggtgcagcgagctggctgggactgaccatctgaggcaggtctcttttctggaasgtgaattccagcggctggttggagatcccgctgcagatgacraggggcagatgttgtctggagggatcacgtgacctggtaagatcagggaggggccgaaaactggagatgcaggtgtgctgtaagacactgcagagagggcatttacctgccccatcatccagcacaggaacagcgactgacagcgctcacccacccaccatcgccagtcacactgggcagcasgcagcagggagcaaagcaggagagcctgggygagcgcacgaagggtgaggctcccatcccggggtctcctccgccyctgtgcctggtcacrgtatgaggtattacccacagaaaacgggggccagaacctgacctctagcctgccccaccctgggcacagcttctcaccacaggaaaactccaccacgcgctcagcttccaccccagcacaggccagcagctgctgccggaagtcagacacctgtagaccaaggccacggcgtcatggccccatgacccctcagaggcccagcagaaaggaagcgagaagtctggcctaagagacagcaagtacacacaaactgaaagaagaggtcaaagaaaaggctgacggcaaactaacaaaaagaaaaatggtgactgatacccagtgctggcagtctcgtttaaactatgtgcaggaatagcaaaggaaatccagcaaatctggcacagtcattatcaaccctggccatgcagcaaaatcaccagcgaaaattttcaaaaatacacrtggccaggccccagcccaaactactgaataasaatctccaggctttcacctgytagactggcaaaaatccaaaagtaaccactctggagaaacaggcattcctagacagtactggtgggatacagaatggtacaattctcatgaaatttcacagtagttaacaaattaaacatatttatactttttaacccaggaatcccatatttaggagtccagtgagaagatacagcccacaaataccaaacagcatgtgcccccggacctttccctgtaatcatgcgcctgcctatccagagggtactggttggataagctycctacatctgtccaacagagaaccacgcagcccactagaggagcgatggycagacaactgactaagatgccttcyrtgtaaataaaacaggaaagggaaaaawgaagrcacgtttttgcttatttaggggaaaaagaaagactgaaaggataagctagtaaaacggattccctatgggggtggggaatgggctggaaagggatgagagtgaggctttcctgaatagatctttttatattgctttgacttttgagccatacaaatatttacatatttaaaaactacaagtcagaaaagaaraaagcaaattctaaaattgaaaagaaaatgaaacaaaaacagcctagytatctatgaaactgacaacagaagcacacggagagaagcctggttccacgtgactttagagcctagtgaccaggcatccttagtgggttacactctaarggcaaagaggaaaggcaatttcaatcagatctattgttagaagtaatattggtactatgatttcaaaacttttaagtatattataggatagagcagataagtawgttaatgtagcacacatgttcaggcttaagagaaaaagaggtacaataaaaggtcaagtaaacaaatcctttgatttttacttagaaacaccaatatgggccaggcgtggtggctcatgcctgtaatcccagctctttgggatgccaaggctggcggatcaactgaattcaagaccagcctggccaacatggtaaaacccyatctctactaaaatacaaaaattagctgggtgtggtggcacatgcctgtaatcacagctactcaggaggttgaggcatgagaatcgcttgaaccccggaggcagaggttgcagagagccgtgatcgggtcactgcgctccagcctgggagacagagcgagactgtgtctcaaaaaaaaaaaaaraaagaaagaaagaaagaaataccagtatggattcactctgaaaacatttcctagatctgtctaccaaaatgccccaggagcacgacaaacaccctagcacccacagcttgacttctaaatgtcattccccattacaagaaaccagagcagcttggagaaatgaatcaatccagtgtgcggcaaggacacccatggtgatcccatgacattctgctgtgctggaggcgagactgaccgggccacggggaggacctgagctagcaggaaggggctttcaccatgtgaacgtcagaaacaataatgactgtaaacaacttttaatatgccgaatgaataaaactatgaatctatccatacaaaaatataaaaatcaaaagctaaggcatctggggctgggaagcactgcttcaggattcccagcagctttttgtccaggaggccctttgctaggtaggagtcaccactgtgcggaaatgcggttatattcatcacagtcatgctcaaaacagaaaactgcaaatagcttgcacacctaacaaaagagaaggaggtacatgaaatgctgtatatctgggtaactggaatccagcacagctgggatactgaaatacgtgcatgcttgctgacaaggagacagggtttatgaccctctggctgctgagtgaaaagagcaagttccagtgacagcacatggagggagccgcacttttgtttttaaaatagctatgcacataagtaaaaattatgcctacaaagactattatattcatatacatcaaaatgaaccttttaaaagtggaatcatgatttttttccttgagtttgaaaccacagaacagctttctctgggagaagtgtgatcctggggctacagaatggagcagcagaggagtctgcactgctcctgcagcctaaaaggcacagcagtgagagaatagcagtgtcacccagyggacaccactgggcctgctcgagctgaccctttctggcttgsggccccaggagagaacaggactgataaygcatctctcccaagyccccatctcatcccaacacctggggcacgaggggctgggaaaggtgtccttaccggctgcatggtmcccccsgcaatgaccactgcccggcattccttcaccacttgggsaaagtgcacagctggattcaggagcaaaaacttcagggtgctctsactgaggctgcctggaaaaacagatcggtgggaggtgagtgcaagcccaacagacacttctrtcgtcccagcaaagggggtcccccaggtgagtccaggtctgaggcacaagtgctagtgctttctctttaaattaaacaccatttaatctctaggacaaccagcccacagaggtggaccatactgtcctctccatctctytttttttttttttttgagatggagtctcgatctgttgcccaggctggagtgcagtggctcaatctcggctccctgcaacctccgcctcctgggttcaagcaattttcctgcctcagcctcccgagtagctgggactacaggcacccaccaccacaccctgctaattttttgtatttttagtagagacggggtttcactgtgttagccaggatggttctcgatctcctgacctcacgatccgcccccctcagcctcccaaagtgctgggattacaggcgtgagccaccgcgcccggcctatcctctccattttcatatgaggaaactgaagttgagaaagaaaatagtccaaatcacaaggctcatagatgacaaaatcatgacccaaaccaaagcccacctaccccacaatacaagtttccctaggacccctgccctagaggacctccatcccagcccctcgatctcctcccgtccacctccactgcttgcccaggtcacagcaggccagtgcccactgcactgcttcctcctaacccaggragttcccaggatggaaggaaagaatcctttcatgctgcggctcccgggctcagcttggctccttcctgggaactgaacctggccaagaaccacctgattaccttggcggctcaggatgaccctgccgtcctggttggccgtagtgagagctgccaggaagccttsgatgtgmatyagyggggaagctggttgcgggacgctggcctgactctcgtctgcaggggctgcaagwgctgcacagagcagaayggggaggaggcctccctctkgtcaggtccacacatgaggaacagaagtccttgcccatgcgtgcagccggctctgcctgctcaccctcctgcctcaccttcagtcgtcctgggctgcaggctctgcaggaattgctgaaacccagccagtttgggctgctcccgggatgagaacactgctccgtaccgttcagtgaagccaaagagctgggtgggatgagagagagcagtggagrggaacgaggaacagccatgagagagaggctgggtggatcggaggctctgccaggctcaagacacctgaagcgcacatcccaccaccccagcaaggcccactgcaccaaggagggtggagaygaaggggactctggagttycctgagggcaggggaggaaagcatggcaacggcagggggttggggcacagctgggtcttgttcaggaccacaagatgggagcagttacctttctgctgatcatgctcttctcacagtatcgctgcacctgcaaaaaccaagcccagctgtaggcatgwgtgcaaactgagcaagctgtaatcttaaacacaaaacaaaaaacaccacttctaccacccaggcagcacaacgcagtgctaccttctgaggcacctggagcctccttgccaccaaccttgtcatcycctctccgaggccacccccgcctctactgcccctgcccacaacgcagtgtcctcctcaggggggagaccctctttccaaatgtctctcccaagtctaagagtgcccagtaaaatctaggtccccttggctttccttccaggtgacagagagttaaaacaaaggaacttctatgagcaaagccacagaggagatgatggctgggacctgctcaggggctggggcagtgccactcagtcggtgcatccaatgtgtgtggtttggtgccacatcttagcttgggatgcagagatgaggagtttggaggctttaaaccggtttctaaaaagagcgacgtccttcgatgaggattccctcaatggtgggtgatgagacccgagacccatgggaagaagaggggagaaggaaagcaaggagggcaaagggaaggcgagagaaggagtgcctgcacccatgtcccagctgtgggagaagcgcggggacggcaggactgtctgaggctgtcaggcctggcggctgtcacaggcatgtgggagacaaggggagaaaggcatcaaggatgacgtggatccagcctgtctggcagggatggtggcagtgacagtgacccaaatgtgtaattcaggggaaaagctggttttaagaaaaaaaaggcaggcacgatgggaagaatgtggggccccaagtcagtgcagccaggtttggacgctgtctctgccacttgctattggctcacttgtgggaagcctgtgctcgccaccctcctgaagtcacctccatgggcctgtttgctttccttgccggggcaaaaggatatcctagctcagagcacagcacgtggcatggcgcctagaacagaggcagaaccctgtacccaggggcagtcactgttgctgatttgagttacgagcttggggttcaggcggcagtggccgtgtttcatctggggagcgctgggtacacagacctggagcgagcagaggtctgaggctgcaaccacacccaaggcccaagtgcgaagacgtgacaggggttgcacagaacaaatcaacatcctattcctgtccataagcctgagggagactgtgccagaagatggggtgagacagcaaggacctggagtctctatmtgttctatggggcaccaagaaaggtccctttctcacccatccctcatccctgtggccttcactctaaaagatgatgacttttgtctcacaggcgtgttgcgttaagggttaagtaattacacgtctgttttgctttttcttccttctatagtcttaacatagtactctacccacaggtggtgacagraaggaaattggatgtggaacatggcaaggtggaaacctctaccttgaacaggttgatgttgtcgatctggctctggaagagaaagtcgttgatrgtcttcagctccgtccctgagagcaaacacatgaagggccttgggagcttcaccctaagcctcaggtttcagtcccagggttaagctcggaagtggctcagatcagctctgggcsctctgagggcaactctcttacctgtctgtgacagactctgtgtattgggattttgcttaatgttccctaaaaaagagaatggaaataggtcacaatggtggttctcaggmcccccaacccttccctatcttctctccctccacactgcacatcaagtaagaagagcatctgtatttgaacggctttgttttgcttttcactgtttatagyatgcaacggacccacttagagggcaggtgggtccaggagcctcccaygtctgactcacgtgcttgcacgtggaacccaaagccctgtaagttcatgtttttcaccccttctccaggaggccgggacacagcagccagaccaaggtatgcagggcaccggagcacagaggagctacccaggccactggtgagcctgaggcaaagcagagctggyggctcagagcagcaacacgagaccagctcccgccaggagctcccacaggctttctgcagcttccacttccacagacaccttccagcaagggggtgccccatcataaaagaaggggacgtgacagggtcaygcaaagaggcgtgggagctggagtcagaagatcccaggctcccgtgctgggagcagcccttgctccgagctctagtttatgcgtctatcaacaaggattcaaataccagcactgcgttctcacagggcacacaaaaccgcatatgcaagtgcttcgaacaacccacagaactatgcccatcacggaaacaccgtgtgtcyatgtgatgctgtatccttaatatccccccagagcagcgcctgaaataaaaagtcctcagaacatgggcaaagaacccatgggtctaaaaaaagctcaagtcagacaactcaactaagctacaaagaacaagaattttctaaatcaatgaccaagacccttctttttttttggttctttttttttttttgagactgactctcactctgtcgcccagactggactgcagtggcacaatctcggctcactgcaacctccgcctcccgggtttgagcaagcaattctcttgtctcagcttctggagcagctgggactacaggccacggcaacactcccagctaatttttttgtatttttagtagagatgggatttcatcatgttgaccaggctggtctcaaaactcctgacctcaggtgaaccacctgcctcggcctcccaagggctgggattacaggcgtgagccaccacacctggccgacccttcttaaaaacacagagaactgaggcgtcctgatgggcatccaaggaaaaagcagcccggcgggttttgcaggccgggggttagccggggggcgaggctctcaccccctagcacagccacgaatttctccagcaaatacaggatctgcttcaggtacatcaggttctyggccttcaaacgcttcctgagaagaagccaacggacattaagtggtggtgycctgatggcgactcgccccgcccaccccagtggaagccttgctgcccggtgcctctcaaactgggtcacaagctacaaatcctttcccagagagcaggctggccacrgccccaggcctcagagccagcggtcagtccccagccttccaggtctgtgtgcagcacacaccatgatgtgcctaggacatgaatggcatgcagctccaccccgccacagcmcgggccagaggtgggaaccaaagtgctgcctctcagaggcccatgcagggggccaccaagggactgtcccactacctcagagagtcacatctcacccgtatcgctccatgtactgcagcagctgggaatgggcctggcagagctggggaaagaacacaaaccaggctctgagcaagcagcygagggctaaggtactgacatcttagattcacctagaagaygctrgccctggacacacaggaagccaccaaagggaggagagggggctgggtgcagacaaaaggtackggtttccacagcccttaggctrgtgggagctaagagaaaagggaaggaagggaaggtttcctccagtgtccactgtgggtcagagaaaaagcaaraggctgaattcctcaagtatggaatctscctgctagtttccaccgggttgggaaaagacctagagtctacaaagagtgatggttcaaggycaccatcacatcccagcctcaattcagcccaggcacaggtcagtagagcyggtgggatgtcgtgggggtttcacagtcagaaaccagtgggcacaccccagctccacactcatgagctgcatgacctcaggacagagcttgaccatctytgaatctccamgtttccaatgtaaaacaggaacaccacmcccatggcagagtcagcgtgaagaccagagacacctggtgccatgcatggcgcatgatagggcagcaggaggagcctgcrctgatcttgagcattcctcaattcagtcccctccagacaacttcagtaatgacaaaatccaatcctgaggggacttytgcctcacacatgccatctccctggcttgcagaactggctgctggcatccagggctggagggactcagkagcatgggggcaggtgaggtgcagggaaatgaggcactctgtcatagcggggtccccagagttctgggatgcactggaaagccatggtcagcctccgatgaggtcaccrccttgactcgtgcaccctgtagcaagccccacctccggaggaattcttggcccrggtgtctggaggaaccatccaagtccctttacctcacggcaggccctggccyggggaggggaggcccacgcacctgggagccgctgacctccackctgtgcatgcycgtgrtggtgtcgatcaggttgtgcgcctcgtcgatgatcaccacctggtcctgcagccggatgccbgcrgcctgccgagtggycgcatgcagcagcatytgataggrcagcaccaccagctgggaggggagatgaggccacctgagcagggcrgggctcccctgcaggaggcttgcctgcctgacactgagctcctgatgtgagtgcttctayttcctgcctggactgtgtagagacrttcaaaaaacagcttgtagcaacggacaagctctcctcgagtttcacatgaaaagccaatacatgaaacacaggaaactagggctggtctgactcctgagtaaaccaagggcagggctgggtgaagggaacccctgcttagccttgtccatgtcctcaaggtcrccccggaggcccccgagtttccacaaaacacytgaagaccatcggtgcaccaggaagcggccccagcttctgctcctggagctgctactycccagctgtgtgactctggaagagttgtctaacctctctgacccttgctttcctcatctgcaaaatagggttgayacatcctatttcaaagtgagggttaaggcgtggagctggggtaacaaaaataaaagcaactctgcaggtctttaggtgtttgttgttaggaaagtttccagttaaaggaatactcatataaraaataaaatrtcggaaaactgaatggctccatcacccacgcttggtgagaaaatatgagtcacttaacttttctgggctccagcgtccccatgcacggaatttcactggaatactattaacataaaagcaaaatatggtcaaagtactttacaaattcaaaaatcgtaaagattttgggccatattatggtatttgtgtataaatgcctatagcactaattttgctctaaaggcaaacagaccggagggaaggcctgggacaccatggggcctggcagctttcctcagtttctctgccagcgcccacacagctcagcaggtatgctggtgagcatttagctgctgtgcaaacggttacttagttccctgaatcttttaaaaccttacatttttttctggattatacagaattttccactagtgatatcccatttccaaagtcactcaagttaaagaagtagcaaggaaatagtgaaactgcacccaccaagtaacagtgagatactacttttcatctgctacattagcagttcttccttctgtttaaaaatcaagagaagttgwggcagagaagacagtattctcacgtgctgcaggtaggtgtaagttagggaaagctttccagttaagagtactgatattacaaaaaggaaaaactggaaaactgaatggttctatcactgacatcctccatcacatcataggcatggaagttgggagcatcacttggaaagccatttgtaaatagatgtatgcagcacactcttctcagctcctggcatcccccctctccctgtggtttcactaggaatgcaccggctttcctggctcctaaataccatccccagtaatgccaactggccctgctgcctggagaccccaagggatcccacgcgcctcctccaactcacgcctcaggagagaatgggttaaggtgccatcaacctgaccayggtggggggcatcccccaaactacagtgtgatgaggacscccctcatggcctagacyacagtgagagccaagagcggctttctggccctgcagggccctcacctkggctgcagggatggcaaggcggctccygtaatagggacaggccckggcctccttcccaagggccagcagctgctccatgtccttcacctctgccagggcctcatcccggagaaggcccatctgctcgtggttgtagaaggggcaggctgcctgcttytcctgcckcctcctctttggcttctcctcctcagctcctttcttcttctctgagggkggcacaggcacaaagagagaaaacagagargacagcaactgtccacgggcccragagggggttgtgtaatgttgagacccacttccryagggtrgggtctataagaccctcccaagtactgcctactgtgtctcatcggaacactgtaasgttttacttytgttctccagaaagagcccgtaaaatcatctccaagccaacgattcggaccagacgctcacccagagagtaggaacactttttcccaaggagaggggactcaggraggaactggggtctcctctgccattctttctatgaaagacactkaatggtcttcagtcactgccacccctgcctcactctctccagaccacctgcggctacaccayggtccyggtggctaccgtgcctgcttctctgcatgtccacgcagcggtygttgataagctgcacagaacctaggcttctcaygtcttcatttacacaaaggttctgcarcaaaggagaaagaaagrggcaaagagatggtgccagctaaatgacatcctaccaacacacgtggacctgcccccgccacctctcctttgccttccagtgmtgggccggccaggycagggagggggctgctcctcacayggttcagcctgtcacagacccagcgtctcccaggcctggacgagcaggacaaagttgtggsgaaaggagcaggatggcccctggtggaaatactggctactgtttacctgcygggagccgagggagaccagccgaacatccttgccaaaggggctcttcttcacctcatgcacaaactgggccagctgggagtgtgtccgactacagtaataaatctagcagagagaaagaaaggcacttcaaagagggaaccaaaacatcccacagcattctctaacatcaaggcacgccagggcctgagaggctgagggaaagggagtggctcccaatgcacaaagccgaggcaggacagcaatgtcccatgtcaggcatctatcgagggacccagggattcccaagtcacccacagctccagaagttcaagggaatgccccacaggcagctccttccacgagtcatatccagcaccacccagcagggacagaaaacacccagacttcagcccagaacagctgttcctctatgccctggggtggcaagcatggccctgctcccaggaaaggtctccccaggagaggactccccaggccctgaccccaggagaggactccagggtccactgcagctggccaagggagcaactcaggaccagggttgcgtgcaagaagcaacagagtccaagtgctggaagctcctcctttgtggagaggagggtgagaagtagccgagtgactccagcctcttccccaagggtrcacagcccagcccayagcccccagcacagcaccagctgaggacactcgtgttaccttagttatgtgttcttcctccaggtcatcctcatcctcatccactctgtgtgtgtgagagagaayagaaaacagtcttccctcagcaaactcagcaaaacgcactgagcatctgctgagcgctggtgctgagccctggccattcccagcaatgggttccaccaaggtagcaggtgctgctygctcagaaactcccccaggcaaatgccaaccccaacctcccrtggccgctcaggtctgtgggtagggaaatgtaaaaaggagacatgagctcagcaccccaaacccaagtcttgagtyggaagcctcgggactcatggcaggctgctctcctctctgccctccctccagcaagctggacccctctgaggccccagggsggatatttgctcttcatcatctcrggccttcggatgttctgtgcctggaatgttgtctcccctcaccagctcccagtcaactctgagatagcagcagaaacatcacctcctccaggaagccttctttgaccttccctggtaggyctggctgctctgacacagattcatggccccttcacacccatctcattcaaaatygcttcctctcggtctatctccccagactgtcatgtccacaagggaggacccaggtcggccttgtttctgctgagtccccrtggcctcacctagagcttggtatgcagcaggaaccccatgaccatctcctggatgaagctacaactgaccaatcgagtgaacagaggatgctgtcacttatgaccagctrcaactcttcttktgtcagcgcctcagtctgcccttyccagcaatgcgggaagaatccatcagcgccaggcgttggcagggaagccagccctgcatcccatggcctgaagctgagctagctctactagtctatgctcctcagaaaacacaaaaccatctgacaggcacacgccacctatggcaacatcacataaaaagaaaacatttttgttcacctcgaaattcctttctaacaaagcagaatacaattgtcttgggctatcagaagagtaattattacaggcttggcttcatggtcactaaagagcaggcggctctatcttaaaaggcttggattcaatcttatgtcgcatgctggacaaagccagcaggagctcactgagaggctgggtgtgtgaagaaatgaagmgcaaaaattttctattcagaactcaggtcctcygaggctcacgttatctcctgaaacgtgagggcatgggaagccccggaagctgacctacaggatccacggctcttgcccagacctgaaggagcactttgttcctctaatattcaccaccttcatctccactcaagttctctgccttgtccccatgggctctaagggagaagagagggagcagaaacaygacctyggaggtgggcaggaasggttcatggagcacaaactgtttatgaccccctctcaccagcgaggcataaagcarcayggtggtctctgccctgggcagggscagaagtcgargtccacatgsgcagcctggaattacactaccagactgcaacgaggcagcatctgctcattcatgtcaactcgattktattgagcacaccyctatgccaaacactgggtcagctctgggaacatcaaactgtaaagacgtggttcctgccctgaagcagctcgagcccagccagggagaggaggcaacaacagaagcacaagcaggtgcgtgagcaaaacagagcagctgacacccgaagccaccaagacgacacctgagccaggccttaaaggagaggaagacatctgcgaagggaggagggcagggtgtttggccacagcacgttgcatgagcaaatcctcagacaggacagaggaaggcctggtgcgctggaggaagttcagggcagcggggaagctggcgtctggtggatggcggctggaggtggcgtcagaaggcgccctgcagacagaccgtgaaggccggggatgaaccttcaggaatatccacggagggtctctggtcttgcagttaccctcccacagatgtggtggccaggatgtcacaggacacacgggactcatcatcaggtgcagccccccaccccatccacatcaccattttgttttccttgtaggcaaacatgctgacttcacataggtgctatttgttttcatgtctattaactgtcccctccatgtcttcttcccttctaygtccacagcatctggacagtgccatactcagagcagacactcagggatggtggtgaggttccagtgtgaatgggaacggggctgtcaccagggatcctgtgggcccgaaatggcctgggtggcctgctcagggctaagtcacccagcagctcatggctcatcaagtggaaaccttgagtctggaccaacagaggctttatgggagaaggaaagctcaggctaaggacgccttgacggttggcacctcaaaggttacccagtgcagtcagctgcctcagagcctgagatstagagccaggccrgctgagttctagcccagctctccactgccgaggcttgtggcctcagccaaggagtctctccttgtggggctgcagcctccttgtgtataaggtgcagacrcaaatgttcctgccctgcctgagctgctgtgaggacagctgagaggacacaggccaggccggtgactgtcctcactgccactggcactcatggaccctaggagggacccggcttagagcagagggcagaggccaccatgcctcttgccaggtgcttcatggcatctgtggcatgagggaaagagctgtcttcaagggtgtcccctggcctggggcagggtagtgctaccgcctctgtctcacccgctcgccacctttttctcctcatcactctcgtattcggcgaggaccagctcctcctccccagactccagctgctccagccgctcagcctccgggcctgtctctagcatctccctgctgaggcggaggagattctctstttcttcttcttcctgcctctggacaggggcagtggaggtggggagggaggaagaagtctcagcaccagtacccacctccccacrtgccagagacaaagcacaccacgcccattcacataggcctggctgcctggctggagagaggtcgactcctaggatccacgcctcaaccactcacagcccagcttctgtacgggagcacatagccagtgagggtcatggaggggagaccaagrccctggccacgcacccatgagcctccaagcagrgcgaccctgcctggacataatcctgccccccaagaaatgaggctcaccaggcgcttggctgcatacttgagctgcaccctgtgctgcagctgctgcaggcgttcttctcgctgcttcctcctggcctgctccrcctacaggaggcagacatgaaggaaaatcaccaggaagcccaaaaccaggcstctcctaaggagtctgggccactcagcycggcgcctcctcactgsgggcagctctccttcyccvaccagcactcaagggctgccgcatcccctcccgggacctcatccctgcaggtcccagcctcgctgctcactgtggaaggcggcacrctcctcccaaagccacacgctctccatcagatccatttgcagccaytgaacyatgctgccaatggcaacgatcaggtcctttcccaggtgagtaataaatgggcaccaacagttccttgtgtggagaaggccctgctgacctccagctcaaaagagacagcacagcggcagcaccatcgacccaaggagctgagggaagagctgagaggcacagcaacggcaggggagcatgcactgcctgagtctcggaatcgccccasaacaatcgctgaagccctgtttcctccagyactcccacttccggataccccaggtctcaccttyagtcggttcaccaggtccctctcttctttcttctgcacaaactgagtaacccaggccggttctccagcaggcctcggggtgcctgcagccccttcgcaggaggaagacagacacagggattcatctttctcatcatgtaaggggccagttccagtttcaaggagtcgtgcctcttcttcacgcttcttctgttcaaagtcacggagccaggagagggccccacaaataagacttaaggacttcccctgcaggaagaaaaatgatctttagaaacaggaaaacaacaaagcctcccaaatgacctttccccattttaataaaagcttgaaagaaggtctggctgtacataggagaggatgctctaagrccagcctaggaaaggaaaggaaggaaaytagcactagaatagccaggaaaaacagaaaaaagraagaaatggaaactgggcccaagaagcaggaaaaagcttctttaattatccagctcactgttctgaaaacaaatttgaagcagtttatcagattctatgtaaatatcgcacataattagaagaaggggagacattagacaaaaagtcccctaaaagaattaaggccccaaamtgctgagcaagaaatcccaggtactcgccaacrgggagccacagtgaccgcgcggccttcgtgcagctcgtgcgtggatacaggatgatcagtcacgagtgccagtgtttacggtttgtgtttttttttttttgtttttttgtttttttttttttaaagcaaactaatcactctggaacaccactttttttgtctgtttttgagaggaggtcttgctatgttgcccaggctggtatggaactcctcctgggctcacacaattctctggcctcagcctcccaagtggctgggaccataggtgtgcgcctccacatacagactggagaasactactcttgacttaagaccagaattgtccataagcctgattgarttgtattcctccaaattcctgtgttgaaatcctaacccccagcatctcagaatgtggcctkatctggaaataggactgtcrcaaatgtaattagttaagatgagactactaggacgggacccagcctaaagggctaatatccttattggaaaggggacacgtggatgcaracatgcacagaaggcaggcgatgtsatgatacccaaggagaacacgcccctataagccaaggaaaggggcctgaagagatctttccctcrcgaccctcagaagggaccaagcatgctgacaccttgatctcggactccagcctccagcgctgtgggatgtcagtttctgttgtttaagccccagtttgtgaagctttcctctagcagccccagggaaccaatacagttcttccagagaggacccttcagggagcgccacaaggaggcggccctggtgtccacaggggaactcagctcaggggagtctctggaggaccccatgccttctgctccaggcagtcagctctctgagcctgctgaacccagaggggatctcagagtatccagggcggggtgaaacacctcgtatgactasggttggggcagcagcgcggcgcaggagtcagagyctcaaactccacagccaggygccagggttccagctgcctcccctacctgcagctctgtggctcaggctggcctcactacgcttgtttccacgagtgcagaaatggaaatgacaacagyagcaccttcctcatagagctggtgcaagcaggacattaacacacacaaaaggccaaatcctctggattagaggattacctggcaaataacaagtgagcggttggagttagctaactttttgctatcattaagtaataataataaaattattaatagcattattctggaatatgggatctattagttttcaccaaaatcttgaaaggccctgggataggatagaatgacattgctgacaaatggatggatcccatatttttaggaaagccccatatgtaccatttccctcagcttttgatagaaagtaaatggcaaagrgttccaggcagcatttcccagcagcacctggagggcggctcttctgtgctgyctgtgayatcggaagcagwcagcttcagctgtcactgggctgggagacacaatggttagaaagccagtgccctccatttgaaagtgagctgaggaagttcctaagggtatggtcaaagttatctttcaaaaacaaccgtggtataytccggcacaacagcaaaagaataactgaggcccmctgttttctacatcstgtaataagaccacaaaacttttagactggaaaatgttaaaaggatttataaccaaaggctcaccttcctggggtatcatcaacagttacatgatttatgccaagataagcaaattcattcactctgaacacctgctggttgcagcaagcatggggctcagagctgagracacaaaggtgcagagcccctagaaaatgctcacargttcacatgtaacatacaattcgagggcatcatagatccccgcaaagcatgcattccaggttggangactcccggaactgcagtrttacacaaggcacagcacacaccaagtggtaatggtgactcaacttgatagacctgtakaaggcttaaaaggtgactatcaaggataaacagcatctcgggcagctaaggtggggcacctgtgcatccaaggcggggaagggcatggtaggcacaacaggtaacacagaccccactcagggtgtcccacagcatggctgctcctatgggctgggggacacccaggacaggagaaaacactctattcaggagatgatttagaagacagaagaatgtcaaaggtaataaagccacagggtacattcacagagagtgcacacaagaagatgaagctatagaaccagaaacatcgacaattaaaggctgagcataggaggaagatgcagaagcctggagtgcagaagactgagatggaaagacctgagaggsagaagatgggttgtcaggctaaacaaggtaaaaggggtcaggtacagtggctcacgcctgtcatctcagcactatgggaggccaaggagggaggattgcttgagcctaggggtytaagaccaccrgcctgagcagcatagtgagatctcatttctacaaattaaaaaattagytaggtgtgatggcgcacacctgtagtcccagctgctcaggaggctgacgtgggaagatcacttgatgccagaaggtcgaggctgcagtgaacyatgatcttaacactgcactcggccctgggcaacagagcgacaccctgtctctaaaattaaacaaggcagaatgaacatgcactcatctgtgttccaaagcacactaaaattaaccaaagtaatatggaggcttacacccacaaaaacaaagaaagtggaaggagtaatatgttttaggagagagggaaagaaggcagagacatggaagtgattcsgcagagacactcaagcccaagtgtccccagagatctcccccactcattctcagaaagactcaggaagtggtaggaacacagcaggccactgaaaacaaagggacgggttgaaattctgtttaagaacaattagattcccaggttgcaatccctgctcctgctccttgcagaasacaggaagtgggctctaagtggaagctgagctaggagarccctggaggcaactggcagattgaggaggcaagagggagggagaggagggtcaggctgaaagcaggcactgagggggactctccacctggatccccttccccagaccacctcccggaagaccggctattgggcttcagcgtctgtacctgctgggccagagctcagaggcacctgctctggagagaccgaagactctagggaaaatcccacagatgtgctggcaactggaggcccccaacaaaggagcccagcctggcagccacagccagcctgccctgcagactcagcctttctgtgccctsttcttcagcatacacaggcagtccagggctgccagacgtttgaggaaagcctccaaacggacrtataccctgacgtggtgtgggtgcggccgtctgtccccaytaacactcatgctgaaatctgtcaagtcagtctgaggagcaactaattcaaatgacacggaaaggatggaggattccaggagggctccaaggtaaaaatggaattggtcactgctgtggactgaattgtatccccaccaaaatgcatgttaaaaaaaagtttttaaagaacaaaaacmaaacaaaagaagctgtgtatggtggtgtgcaccagtaatcttggatcttgccagccaccaggtacttgggaggctgagaggggargatcgcttgagtttgagaccagcctgggccacayagtgagactgcccatcttaacaaacaaacatatgttgaaatcctaaccctgccatgtgactgtactacagatctggccttcaagggtaaaggaggtcataamggagcagccataagggagcagcccttgtcctcataaaagagaaagagacaccaaagatttgtttttctcctcctcstcttttcttgctccacagtaagaacgcagccatctgcaagccaggaagagaccccctccccagaaccagaaccctgccagaatctggatcttcaactttccagcctccagaatggtgagaaaataaattcctgttaagtcacccagtctatggtattttactatggcagtcctggccgactaagacaggagttatctgtacggaaaatcatattgagaggccactggatgatgtgggaggaactggcataggtatattaaaaactaaactaactttaaaagggcaattattaactagaraaaacagaatattaagacatattgttcaagacaaaattatgttcaaaacataatcataacgcactggttcactcagcagagactaaaacttagaattatatttgaaggatggggaaccggagggaaaagagttggtaagaaagccatctcatctaccgtaataggtaggcaccaatgacttcagcctaatttttctcagaccacagagctatgtttaagactttaggccggcacggtggctcatgcctgtaatcctagcactttgggaggccgaaatgggcggatcacgaggtcaggagactgagatcatcctggctaacacggtgaaaccctgtctctattaaaactacaaaaaattagccgggcgtggcggcgggcacctgtagtcccagcaactcaggaggctgaggcaggagaatgacgtgaacccgggaggcggagcttgcagtgagccgagatcgtcccactgcactccggcctgggcgacacagcgagactccgtctcaaaaaaaaaaaaaaaaaaaaaagactttaatagaggaagtgactattactcagaaagataaactgagagcaactattctgcccaacttcatactatgaaaatctctggatgggcaaacaggaaaagctagcacagctgccgtwaagttgtccttttcagtatctctcactgttcatactcacagtgccagttggactctcaaatatcccaatcttgccagcctccaaaacccggtacagctctgccatgaagtcttcctggatggaatagggtgtgaagggaaaaggaaaatggatggcaccaaccttctgtgtttcattagccatggacctaggaaaaataaatacaacattagggagctctctcatggtccaggaagaagtggcttgaaatctggagcattatttaagagcagtctccacacttrttaccaaatttctccttttwttctgggaagcagagaccatgttctctccatccttcgcaggtccacrtgaggccataccagaatcacgcactccatctagcggcatttaacggctgtagcagaatgcagaccaggaaagcccctaaacccaatctcccctgcatttcaccgtggckccgatacctttctaatrcctctacaaaaggcttagagctctcttctcamagaccagcacccctaagatcaagggtgttgctyataatgacttttgcagctttcttctcccacgtctctgcaatgcacattcacaagccgaagctacttcactttatcccgttgtgaagtcctggaaaatcatgacgcacaggcagaggaccataagcacagcttgtttggatagcgcaagttaacatacacgtccttatctttttttttttttttttcccagacagagtctcactctgtcacccaggctggagtgcagtggcgcgatctcggctcactgcaagctcgcctcccgggttcacaccattctcctgcctcagcctcccragtagctgggactacaggcgcccgccaccacggccggctaatttttttttttttttttttttggtagagacggggtttcaccgtgttagccaggatggtctcgatctcctgacctcgtgatccgcccgccttggcctcccgaagtgctgggattacaggcgtgagccaccgcacccagcctacacgtccttatmttacaagtatctttagtttgcttcttagttcatcctggcctccatttccagcaccgaccagagccgccacctactaacttttctggcctcaagacctatgagctttctgtttggctccagacaggagagctctcttcacagccacggggctctggctgraacagcttcccagcactgagaccaggcatttctctttccttgctaggctaaggtctaagaaaaactctgctccatgttgacgtcatcttttttttcctcctctyctgaacctaattatctstgagacagtgattcaaggaagaaaggagaagtaaacgctatctggaggcctgactcttccatcctggttcccacacctctctctttggaactcacttctccaagctctttgccaggtctgtctcttctaagcacaaatgttagtaagtcccaaacccattttactaatattagtagatcgagagcccatctttataactttggcctcartaagactagtgatagtgtcactctacgaggggaaaggtagttgccaygatgctcttcggtttaggrgcaattaaaatgactacagattggtggcagtttatggatttgcacaagaagagaactcacagaactagcattattttaccctctgtcttyacagaggtatatttggctgttttgttagacattctggggacaagacaaaatgaaaaaagaaaaacatgactacagaggtagaggaattattacaagaagggtaattaaaaaatatgacttacaattcaatcctgagagaggggtatgtactgaaaaagctttaacacatgaaggaaaggggaggaaaggtacctaacaaatttttgagtacctcctatgtgttaaacactctacagtggtcttttgcttttattatctcatttaatctgtacaacactataaggatacagctactggatactgatgcttacagaaattaaataattgctcaaactcacagctaaaaagtggaaaaccagggattcgaatccagrtccaaatgactgtgctttagtgaagctcatccagtcgcaagagatatccagcataagtraagggaggttcactgaagggaggttcacaaactgagagtaagaattgaaactatctgggaaagccaaaaacagaagcagactagagctgcaaggcagctcggacttcaagacagctccaggaacgtcaccagcaaacacacacccacggggttcactctcctgctcagccaggygccggatacagccacaatctcactccctcagcgcactcggtttctgcttatcccaaactttcgcttacacgtggcctcatcagcccctggacctttcagcttcagctcccactgccaagtaaaaagtcttcatgtctcctcgttctgaatcccaagacaaaaagctgaccagcagctcctctcaagacagagcactggtcagcctgagactggtctggctcccagcctcatctactcagctcgggccttgcacttgctgctccccttggcctggagaaggagtcctcctcaatatccaggctttggctcacctcctcagagaagcctctccggctgtctggccgctggacagtggtcaaacaccacccccactcctcaccccctagcttgctctaagtcacttttwaaaaatcacattactctgtatttaatttattcatagctcttagcaccatctgaacctatttattcttcctcactggaatatacattccataaatagaggaaccttgtctgtcttgctcttctctggctccaggactcagaactaggtgcttcaacacctcataggcattcaacaaaaatctgatgaatgaatgaggagccagccagacatcggggctgtaagtaaaggtttctcttccgaggctgggtaacggaggtcccatgacttgaatacctattagttaaatggccagttctttaatggtttcaaaccgttttcagataaccccacaaaaaccctgtgtggtatttttataagctctattttatagagaaagaaactgagactcagtaaacttatatgacttgcccaaggtcactcagcaagtgcttgaactcaggatttgaaccacatctgccagacccccaagccacctgaaactttctatctcctcacttttcctcccaccagggtaagtgggataaaaaagacagatttggtgaccaaactctagaatgacaacactaaacaatacagaagaaacgttaagtattatttcacttccccatcagtggtaattatggatctcattattccagaagcagcacaggctaaatcatagaggtttagataaatctgagtataacggattcactaagccctattaaaaacatttgcagcgacttgttcagccctcttcaggttggctgtgtggaggacaaccatcacctcccagtgccaaggcacacaccaggacagcaaagctcacgctcataaaacgaggttagagttgtgaaagcacttcaggaacatattagttcttaacgtgttcattttcttcagtccccaattatcactcattaccgagtacagactattgttgtgggctcagttgtgtcctccccacattgatcctggacatcccaagcctctgggactgtgagaaaacacatttctgtgtctaagccacccagtttatggtattttgtcayggcagccggggctgaccaagacaactatgtggcaggtrctacctaccgtatggccctaaaatgttttaacttcacacacctggaaagcaccacagccccaagagaaaagcttttccgcactgctgttaagccagggccacayactgcagtgctgcggtgctccaccagctggaggatggcctggcccataatacccgcattcccaccttgctctgrccctgtgtcccctccaacgtgcatcctgagctcgcamcctgtgtggaacccaaccagctgcttatcaacatttaagtccacttttatgacacttccgtcaacaatctggtcaactgcactcatccctggcctccgtactgtaccctgctccgcctcgattcccgcccygggggaagctagactcacgcagctaactttatcggctctgggctctgatcgccaagtttaggatcccagctgtatccttgctaaagttagtatcgctggggctcagtttctgtaagagacaggtgggttacaagcgctcactcactgttgcagtgtcttatctacgtaacataatccatgaaaagctcaacacagctaggccaaatctaagacccagacacgcggctgctgttaatgccsactcctgcgcaccgcsccgttccaccgcaggcacaaccttcctaggcckgccccgtccccacacaggggttcccgcttgtcaatcacgctggcccrgccctccacttccggaatgtttttccgctccggacgggccacccacctttgcaaacaggggtccggcgccggaacagacgcccagtttgcgatttcaccagtctgcccttcctcgtcccgctgctcctcgtcctaaggacctctgctgccacacagcactgcgctcaccttcttcgccggcagaattgctacgctgaaagccaggccccgggaatcagggcaaacgccactgaatttgaaactggcgggtggcctcagtgaaaggctgccggaacaacccccgccgttgcgcatgcgcactccgggacgcgcgctaacacgcaacagccagaatctattttataatgaacccagcaatattttctcaagaaataataataaactagaagaatgtaaatgagaaccgcattctttcttacattaagtgacatttttaatgattatacagaatatatgtgtgtgtgtgtgtgtgtgtgtgtgtgtgtgtattcatctatgtcactaacaaaagagaaagaaggccctgtgatctgctgataaaactatataattgactctgttatgtgattgcttgtacaaagactgacttcacatcatctgaagttattcttaagtcattctccttgaaatattattgcttcattctatattaaatatatgcatacaattcaatttatccattcatctttttatatacttttaagaaagaaaaagcaagtgttgtttctcatgggcacataattcttttcatttatttattcaacaaataattattgaatgcttgttattagtggatatacttctgaataataagaaacagtgaaaaacaagacatctctgccttatattccagagaggagagacaggcaataaacaagaaatataagtaagttcattttrtaacatgtcataaaatgacaaatgttatttttaaaaaggcacagcaagggagatcaagagtatcrtaagattggggttagactttgcagttttaaatgctgtgatcagggtagacctcattgagaagctgatagatgagcaaaggtttaaggcagtaaggaagttagctatcagaacatatacagaagaacaatacaacagaagataataaaaggtgtgaaggcttcaagtcaagtagaaagattctcaactgccaaagaaaagcaaggagtttagtatggctgaggaggtgaaggtaggagacccatcaggttggggttgtggtaactggggatcccagtgtttgcatgtacaagtatgggacatttcattctcctgagcaaaacttccattgrtgattcactaagagcaagaaagaagactagtctggatgacttagaatgaacacaccagtgtttctgtaaatagaattatatgatttgtaatgtgtttgtgtatacgtgtttgtgtgtgtgtatgtggaatcttttgctcagttctatattcatgggattcattgacactgatgcagttaacattattctatttcattgaaaaacactataaagttttaattgtatgaatatgccacaatttacatatcctgttgtgggacatttgagttgttttcaatttagagctattacaaataatgcaacygcaaatgttcttatacgtgactttttgcacatttgctgtcactctcctgggtatttatgtagcggtaaaaattgctgggacagaggcyctgtggatgrtgaattctagtagataatgatgattcmttttcacaattggatgagagattcggttgctccacatcctcactaaaacttggcattatgaatcttaactttaaccattttggaggatatgtagagatttcattgtggtattaatttgcatttctctggagaccaagtaccttttcatatatttattagctatttggatgttttgtgtaaggtgctaggtctttttctaatttatttctggaagtcttcaatatattctgggtataagcacttgtcaattatatatacagaaaatatctttttcttttctgtgacttttcctttcactctcctaataatgtttttaatgaataaaaattttaattctaatataaaaagcaagactgggctggtagaagattattttccactagggcagtttytaataatatgtatagaaggaagcgccattgcagtattgactaaagcaggctggtggaattacagctcagttgacaagcccactggcctgatctctgaatattaatatagtgtcatattaagtgtgagtctttctaataagacaaaaagcacattcatcatgttctttttatcatttgttctacgtctcagtatccatgcagggaaatacttgaaggatggaaacgtagtctgtaatctcctgatttttccagcctgttctctgccagcccaagtattcacaaggatagaaaacgtacaggattattcagcatattaacatggtagataaattttacaaccaataatcctgctttttttgtttrtgaaaagtattgctattcacatcccttatgtgctaatacatgcattaatttcattccacatatgccartgattccarctctgcctcccccaatgtatactcaagtggcaaggatactttcggtctcaacccacccaaagttgctcaatgcttcgtaaacacatttctctttgaaaataaagttggtttagaaatatgtccaaaggtaataatgtcttttgtagagttcctttgaaaagtagctttattttggatcatttgaaaaatctgttatacaattaatgtatcaaaactattctcaattacaaagtcaacttttttcacatatatctcttctcttctagtccctatatttaatgctacaattacagtcgtaacttacctttgtcttgtctttttcatgaaagtttttgttgttgtgatgacatctccaggtttatcgcttttgataaacayatactatttgttagggcgctatgacatttatctttgactttgacatttggctaaaatcttttagttacagtcagctttgccctcagtttatgtcagtgtcatttctgggatccttgaaattrtgaatgatcaataatcttacgattgttgtaagcaatgttataaaaccactgtcatcwtgctgtaatataatcaaggcataacttatgagttgattttaatatacattttctctttcagttataatatgtattttagatgtatcttggagtgaaaaacgccttgcttgtctcttacaaaaagataaatcaaaatattaatatttgcacaaattctcttttgcacaaactctcttaatcaaggcatcataagcccattgtaggtatcatatacccatctgtcttaaaacaatttctggtataagaaaaacatgatgttagaaattgattcttttggcctgttctgaaattttcagtactcatacatattgtagaggtgacagaaatgattacaattcacatttaaaattcccctcttcccttttccaactcttgtcaatgttgtattccccctgagagttccataagaataaagcagaaagcatggaaagaaatacmaaagtagggttgtcttacttcatctaggtaacaaayattcagcacaactcttcatcttagaattgcaaagtgggagagtcatccygggaatatatattagtgagtttattgaaattaaaaataatgcaacatttttttctgttagaaataagtccagtttgactggttattttgacaataaggactggctttgcaaatcaggttactggtggagacttcctttaaatgaaatgagctaaatgtgcaggttatggttctgatcagataaaagccttttatgaggctttatattgacaaagtatattaaaataaatgatatttcaaaatttccaaactttctgagtatatttggtaaaagttgtgtttttaagtaagaaagtaatgattggtggccgtttataagtccttttaagcctttattgaatactttctaggaaccgagaataagaatgatcataatggctgatttccaaatcctgttgcaattgacctggtttagcactttgctttcaataaaattacagaggacttatcagctgatagataattaaaagtaatttttaatggttataatgtgacctttggcttttaacatggaagcctaaataattagataacattgttataatagaacgtcccctatttctatttctctctttatgtgaacaggtttccttagtgcttacatctatacaatagaaaacagartagcaatattctagaattgaaatagagcagggtagaacaaatagagaatagatgaaacttgttttaatccagcaataagcaatattcatccaagaatacacaatcttagggagccagctggaatacatgatttatttcactaaaaaattatttttgaacaaaatgttctcatttttaatatctattaagattatagcagatatataattttataaatagtatattgataataattttaatgataatgcaacctagaaaacatttattactaattagaactttacaggctcaagaatatttttataataatctttgatgatctttagttgcagaaacatataatagggcgatcaataaaatatattgaagtatgcaactccaggataaaattacctgaggaagtagaatgaaaatataagaccaaaaagaaacaagagtgatataaaatttcctgctggtgaaaaaagtgttcatgtgtgttttacaggaacggtggtggccaaaaaaaatcactgcagtgtctacatttcatcggatacatttaaaaagtggtattacattttattttttaaacatcagtattatactacacttattttagtgtagacactttagatgtcaagtgtatgtaagatattacatgtttaataaaattcttttaaggaatacaaggaaaatgtttgaagatcccaagagtatagaagccttagctgacagtgctgagaaagtattgtgtttaccctataatgtcaaatgtttcaaatgtatcaactaaaatattttaattaaaaattaaaatgataaaattctgataattcttgagatttattcttctattccagaagttcaaactgtgatgacaatttttgcttcatacrtacaaaaaaggattttatgtttagtcattcagcatttggtcaaatacaggtttggtacgtatctaaaaagtatgatcatgcctggaaaaagtgatatagagacctcttaaaagtcatttactgcttattataggttaatttatcccatattaaactgatagagaataagcacgtttatggtaatctaggggtgagggtgggatgtgggaagagctgggaagatgagtggaagtaagagagcatacaaatggagccaaaataaagcagaagagttttacaattacccaagcaagcatttgtcgactacaagggccaacacaatgtattactacagtttattccatttgacttggcattttttttagccatagtttatcatcattggaattttaatagcttacatatctacagttttgcagtccaccaagggttgtcacatacatcatctttacttctccatcactctttcaggtcatatagaaaagtgtatgtcaagatctgcctagccccaatttagaaaggaacacagtaaaatattccccgttctcagaagtgcctatttctcttcacatcttattttatagttgaaatcagttctttattcaaaatatccagacttcaattttataaggccctagttttattaatttaacaatgggacctttcttattttcagtgttccataaaaataaattctaacatctgaatcccctttggaaagcaaataggatgatgcatcactgttgataaaatattttctatcactcaggataaaattaaataagaatgttcatcagagagagatcaytttcttagagaataaaataaattaactgaatttatattctagatgttgaatgaattaagaaacagtaattatatattacatatgttgttatacccaatgaactgccctttttaaaatagtaaatataagaatacttatacagatcaaaagtgaatctttcaagcaatggagaggttgctcccaaacttgtcttatttaaaattctatgacagatttcacttccttgtttcactgaagagccagttaggatgaatcttgggtgaagaatgtatgttgtgctccctagactaccaaaacatatttgggatatggatttacattaatacctctttttaaaactgcaagaatattggtttatttcatcaaaccatgtaatttgttttgtgttttcatgaaaatagttttaaaactgattaatgacctgagctagtggtagcctcaaactactatttttcaggaatttagaaaatttgggaaagtggataaattaatacatatggtcatgaaaatgatctggaattgatttttttatgctggaagtagttaatatgttacaaaaataaatgattggcagtttactttcactgcccatcagatgaaataaaaaccagtgagttggagcaagaacagggttaaaagaatcgagggctcaggctcccattctgccctcttcctttctgtaccgtgatgggaaatcaactgcccccgccagtcttgatcctgcttttcctgctccttcccagtgatgctgcagctgctgcagaaccataagcattatttccagaaaattaaattgtcctccttttttcccgttctattatctctttgatctgtatttcctaattccctacacaattttctgctgtcaaaagggccaggaagtatcagcaagtcattactactcatgtggaaagagacatcctccaatttcaggaaagtcacagacataaggcagcaacatctatgaaacatttaccaaaaaagaatatagaattcctacccaaaaagggatacatttttttattgattcataaaatggattgcacgtcgtgacaattgtgaaatgactcagtatctgtgttttcctcaaataagggattgccaagatgaatgtatgctctacagacaagccaggatttgtgtgtcagttcactcaatcctttggcacacctttaggagctggcattgggtcttgggaatctacagattagcaaaattcagacgccgccctcaacacctcacagtatggaaaagtagagagatggtgcacagagaatgaactatagaagaaaaacagaagcaggcattgcaggattctgtcagaatacttccaaagaatgaccactcttcatgaggcctgatgtaagagagagggcttcaccaaattctgcacagagaaagtcacttttgagatatgtgttatgaagcaaacagaagttttctgggtagacagggacactcaggaagagagagaagagtgtgtacacgtacagcatccccagatgtagtgtgtctgggtgcttgtgagaggcaattggtgagaggagagtggtattttcctctgggtgtatatggcaatatgtctggtgattagcctggctcagcttgcctcgtctccatcaccaaagagctaaagaaagaaaagaaaagaaaagaaaagaaaagaaaagaaaagagctaaagaaagaaaaggccctgctcccaaggtcatactgaaaagcaattcagcttctccccatgtattaaatgttatatttttcctagtttcctggaacaaagagatctgtagtatcatccatgcaaaacccaagaccgcatgcagagaggttcttaatgctttcaatgatgatttkttgattgatttgcatattgaaattatgaaatttttatccaaaatatataataactcatggattgcttacccatggctattgacagctttgctaatattatgtgggtgagtacttcacaacagaagagaagcatatctggggtttaacttctggttttctcagttcctcagatcttttgggttggcctttggagaatacactcctgctaaaatctgtctctgttctatgattggtgacaaaagcaaagattatttagaaaatggccataataatgatgtctttttgacccctccatagttaatctggacttctcccctccacaggtagtacctagtgctggtcccatcacacctctacactggagttcctgaaaagacctgtgtcatccttaatcacctgaatgagatggtggcactgaaagtaactctgatgtacaaaatgcagaagagatccctcctcacagacctggtgacgaagaggaactatttctactgcagttccttcatggtcagtactgatccttgaaataagggagctggatagagaaagagcacattagctgatacctttggttctaatcctttgaaaataaaaaatgcataatgaaagaaaaataagaagtacagagtgaatctcaatttagattttaagaatggaagttctactgaatatgctcacagcttacatgatatttacaaacagagtgccatgcataaaatttaacagtagttatagaaaggatttaatctgatcttaaacttctgaggtaaataatattcataccattacagatagaaacactgagatttataaagtcaaataacttatctaagatctcaccaatggttgatagtggatgtattgtccttttaatcttttactacttaaggtattaattgtttaatcatatgtagttaccacaaataataacataaaawtttttttgagacagggtctctttctggcacccaggctggagtgcagtggtgccatcacggctcactgcagccttgacctcccaggctcaggtgatcctcccacctcagcctcctgagtaactgggactatagataggcaccaccatgcctggatgattttttgattttctgtagaggtgggggtctcactatggttcccaggctggtcttgaactcctgggctcaagcaatctgcccaccttggcctcccgaagtgctgggactataggcatgagccacygtscctggccagataatatataatgttgttgacctttgaaaaataaaatttaataattattttaatatcaccattttgctgtgaaaatgcaagcatcccatttcagtcataactggcttgaagaattagctcattttattgcaatattttctccttcaatcatgttactgtcatgttacaacatcataataatctacttttaagacaaggagcattatccttgactttgtcccttactaattctcagggactaaccaggaagacagaaactcctaatggctgagaaattcagaagtaagtctgggcagattcttcagctcatttctgttttacagattccagaattaccatcttcctgggtggtcattgctgtggaggtagagggggcaactctgcatttcacaaagagcaaatcaatatatrtaactacagcagagaacctagtctttgtccagacagacaaacccatatacaaaccaggacaaacaggtatgaggaatcaaatgagcaaggggaactttgggagaggggaggagcttctttattactttattctgcaatcctgggaattcaggcatgctattactaccccaggctccacggggtgatttcacaggaaaatacctctgtttcagtgaaattccgtgttgtctctayggatgtcaatttccaccctttggatgaaatggtgagtctcgtaatgatgggtgatggctgagggaaaaaggaaggcctattcttttgggaaacttgagaccagttaaagaggtattttaagcccaccacatgaagatctcataagggtatctctgctagaagaataagggatgtcagaatcaaggcactccataaactgcattcttaaaatgaattcagtatgcagttgaagctgtcctcttaaagattccagttactttcattgaataaatgtgtgaatttgatttccctcttaaacaaatataatctgtgaaataataataaacttattattcggacctttttatctaaataggtttcctcaattgtatgttatttaacaataggaaagtcatgacttcgtgaaagatgtatgtcccaaactaaacatacaaagtgctgtgaaccaaatggggtatttcctcatttggaatatagagacttactttctctggcccatatactctgtcagtgctggtgtcatggttttctccttctatattctaccatgtgctcatactatctttttttcttttcagtttccggtggtttatattgaggtaagtggtatgttgtacattacaactggaatgaggactctctacaagttacattaaattgcctctctcccttccctcaccatttcaccaaagctraacaaatactgtttttctgtccactttaaattctaagtggataacatgtaaatgcaggaacatttcttgagatgatgcaatttagtgactcatccaatatttctgaccaaaataaatatacataataccaaaaagaggcatcagtacraaatgttatctgtaatatctcatagctagtaaacttattgcccttatctcaggttggaattcctataaaactttgctaatacctttgggccaatttaccaaccatctgtgatacagctgcctrtgtcgttcttacccgcaaagctgcccttctactcaaaggtatatatttcaattgtttctatgaactcataatatttttacctataggaccccaggaagaaccaaattttccaaaggcaaagtctcaaattgcaagggggactcaaccaactctctttcccgctatcagtggagcccattctgggttcccacaagatcatgctgcagagagagtcagggaagaaaatacagcactcatttgagatgaatgaatatggtaagaatgctctatgtgtaaggcatttataacgtcagagtatttaagattagataatttttacatataggtaagaatcaaaggtctagcatacaatagttgaaaattagcaagcttttaaatttacccatatatttgctaagtgctttttatgtactacctcatttaattctcacaatgcccctctgggacagatactattattattcccattttgcaaatgagcatatcagtactggaaaagttagtaacttaaaaaaatcacagagtcattaaggggtaggaaagatttgaattgatactcaaacataaattgttawccaatacattgtgtcagctacatacactatgtatgttttttatattttataactgaaagtatttccagggattattttatggttgtctataacctacacctatactactctaatcaactatgattcctaaaccatataatttagtaatcaactaaactatagttcaactaagtatggtagtcaactaaactttaacacaattgatctagtcagtactcaaccatagttgattactaagtcagacattgaagccatcttattagttatcagttatgtggattttgtaatgtaaattaaatattttatgccatggctgagaagtcctatcacaaaacatggttcccaaaactcgtcagaactgccatcaaaatcacagaatagtattatattgtaggaataacaccttacaaaactgtgagagaagctagaaaagtaagaggccatcaggaggagttgacaggtgagagaaaattactagccagttctgaagcatgattaggggtgtataaatgtgagcttgcaaaggtctgggaagcgagggaccctcagctgcccaagtgcaccaaccatgcagaggagctgacagaagaatctgtggaagattattacctctgcactctgcatagctaccactttagtaggcttatagccaggtgtcagatgatgggcctcagacctctgttagtcagcagggctggcatttgggaagaaragctgggcctagggagggaaagaataagaatacattgaaacctattggtccctctttaccacatctaactgtgatgatcttcagggactaatcatgctgccttccctctatctgggaaatctggcacaaattcagagaaagagagtctagggaatgtattatcaagttaaccaagtgaacatagtacaaactgctcatggtaatgaatggcttctccttctcagtattgtccctgggctccctgttgtagctgaagtcatttcatgtgaccacatgttaaaggttctgtcatagcatctactacyaatacttgtaagatctctggcccactctcacctttttttttcttttttatcaaaacagttttgcctaaatttgaggtccaagtaaaaatgcccaaggttattggttttctagatgaagaatttgtgataacaacctgtgccttgtgagttgcatttttttcatctcatttctatttctgtactctatctgaggggaggtattgtaaataacagttactgaagttggaagtrttttaattaggagaggaatacctctctttgtagcttgcctaagctcacagtagggagcaggtacagtagcagatgacacacatctgctaatcataaaatcatttactggacatttaaaatgggccagacaatgttctaattggcttgtgtgtactaatatttttattctgtaagtaatcctataaaaaggagaagcttggggaactgaccctacaccttatctgccccatcatttgggctaaagcaataggtttcaaacgtcagtgttcaacagaatctatggggtggggagtgtgcttacttcaaatgcagattctctggccccatgtccaaagattccaatcatacatctgaggaaagtctcagaaatctgcatgtcaacatgtatcccagatcgtttcaatgctggtggtccacaaaacacgttttgagagacaacaaattagttatggctttgtgtcatttccttctatcatattaggcagartcaaactgagtcatgatacaacatttttgttttatagctactacttttccatctaacttcacatttattttcttaaagtacctataaatcaaggagaactcagaaatacactctctacatagtcttaatatgttgccctaagacaatgtaggaggtgttgtcaaagctggaatcatgacctagataatctgacagcagagaaagagggaaataggaccatcttatagtaaaaccgcaactaagagggaagaaagatctgagaaaaactaaattggtaattttccatttggagctgtttcaaaaagattcttccagtactttttctgagagttatggacaattaagacacggyctttcagaagaagggtttataaaatggaaataatatggaaggtaatacaacagcttaaggtggatgtatgaaaggatcaagtcagttgaagaaacatcagtattatttccattaagtagcttttcgcatggccaccttattgttataggtacacatatggagagcctgtccctggtctggtgacacttagtgtatgcagaagatattcactatgccgttccgactgccacaacacacattcacaaagtatctgtgaagaattcaatcaacagktatgtggaaaccactctsctcaggacactaataccaaggttttctcttctcatggattacaatagtgaatacaatacaacagagaatagtgtttgaaatacccatcaagcaaaatggtggagtgggggaaaattgtaagatggtctggcagtgttgggggctcacttgagggttgggctcgtgggtatctagtggtatttatctggttagtttggtaatgtccttccaacggcaatccaaatgccagatataagggcataaaaggatgtggaaggatccagagttgtcttttatcaaacagaaaacagaaaaatgtgtgtggcaggtgttaagaatttggctagtgggagaatcaaatggaatgtcgtggaaagtaaactgcgctggaggaatgttaaaccrgtataaggctgaaggaaggaagrcttccaaggacaatggattagatgcccaaaacacgtcaaggaagaagtggaataagaataattaaggggaacagctgaaagtagaatgtgatgtattaaaaaataaaaggcaaaaattactgattccagaggcagagtatgtaaaaagtccagggtgtggcagtatgagcagaccctgtaagggtgacgcagggcaggtaagctccsaaatggggttttagcccaagagggttcttttcttcacccaggaaagaattcaagggcaagccagaggtgttagagacagcaacgtttattgaagcagcagcgtacagcagcagcagaggtactgttccttgcagagcagggctaccccataagcagtgtgcccayagtagcagctcaaagggagtactgcagtcatatttacacccattttagttacatggaaattaagaggcagattatgcagaaatttccaggaaaaagtggtaacttctgggttgtcaggccattgccatgraaagaggcattaacttcgggtgtcgccacrgcaatggtaaactgacatggcacactggtaggcacgtctaatggaaagcagccaccctgcatccctgttttagtaagttctcaatttggyccggtgtctgagacctgcttccaaagttgagtcccacctcttacctcaagggtatggaaaagaaagttatcaaagctgcagagagcaaatgaatgagaggccagagtaacgaatataataatgaacaccaaggcagacactgacaagcaagatactataagaggaatctagctgcccaaatctgtaatgtatcagggagactagtattaacttctgttttcaagtgagtcatgacatacatctatataaaaataaattaatatgattaaatttattatgcaataaagattttcttataaataaatttaaaatgaaaacaaatctttattaaaacatgtaccccaacatttagtttgaaaacttggttatggtgaggattcatctatttaataaatgtatatattcctattaatatcctagatattgagaatatacagttaagaacataacaatcctggctgggtgcagtggcttacacctgtaatcccagcactttgagaggctgaggtgagaaaatcgcttgagcccaggagtttgagaccaacctgtgcaatatagtgagacccctgcccctataaaaaataaaatatcagccaggtgtggtggcacatacctgtcgtcccaaccactcgggaggctgaggtaggaggatcacttgagcccaggaggttgaggctgcagtgagccatgatcatggccactgcactctagcctgggtgacagagtgagactctgactcaaaaaaagaaaaaaaacaaaacaaaacatagcaatccttagtcaatatttataggaatgaaagccttctcagaatatgttatgtctgagttaagttttgaggagcctaactgttggctacggtaagaatgggaaaaagagaattatcatttgaggaacaacacatgcatagagatagaattatgaaataccatggcacgtttggaaactctagaaagttgaatatggcagaaatggaatcagttttcagaagagaggggagaagccaaaggttgataatgaataaatcaatgatgaacgaagaaactttatgtcattcttgggcttgggaaaagataagcaccaaaagratggtcagaacatttgttacatttatttttatggccagtaaaaaaattctcataaattgacagctgactttttaagtagcaaattggaagacctgagaattctctttctttctcttcaggcagacactgaaggatgtttcacacaacttgtaaacactaaaatatttcagctgagacaaaaagagtatgacatgacgatacatgtcaaagcgaaggtcaaagaggagggaaccggtttgtattatttttaaatatttattaatgtgatacatatttatcaaacttccattccatgtaaaacactttatagtttctggagattatgaaaataacacggtccctgccctcaaggaattaggcacctaaaaatagaaattaagtgtgtgtgtgcacatagccataataaaatttctgcaagaaatacaaaaaagggccaagtgagtatgaagagaggtaattaattctagtataccttctagagcccaaagaaaaccttattgctaaaatagcatttcaactgatttatatagggtaggtaatactttgaaagattaatgatggaaagggaaaacgtgataagcatcaaaaactatgatctcagaagaatctgaaaatggaggctggtgctaagctgtggagaaaagtaaatcatacactaaagagtttaaatttattctgaaaagcttggatatctttcaatatatttgagaagaatcgtctaaataaattgatattcttaaaaggtaagtctagcagacctgaagaggataggctagatgaaaaaatgtgctaccatgtggtacgtcagacgattagtcaaaggtgaccccaaagattccaaatttggggcctgggaaatggaaataccattaaccaagataatgagtcaatgaaaaagaactgttatgatgagatgtgttaaaaataattttttttttttgagatggagtttcgctccttgcccaggctagagtgtaataactcgatgtcggctcactgcaacctccacctcccaggttcaagtgattctcctgcctcagcctcctgagtagctgggattacaggcatgcgccaccacgcccggctaattttgtacttttagtagagacagggtttctccatgttggtcaggctggtctcaaactcccgacctcaagtgatccgcccgccttggccttccaaagtgctgggattacaggtgtgagccaccgcgccaggccaatgttaaagataactacagcttggaatatcaaaacggaagtggatgtatttagctgataattttaaaacagagccagagttaaattaggaccagaaatgtaaatctaaatccattctcgttgtgtctatgtcctcttaagagtgagtgcggccgggcgcggtggctcacgcctgtaatcccagcactttgggaggccaaggcggacggatcacgaggtcaggagatcgagaccatcctggcaaaacacggtgaaaccccgtctctactaaaaatacaacaaaattagccgggcgtgttggcgggcgcttgtagtcccagctactcgggaggctgaggcaggagaatggcgtgaacccgggaggcggagcttgcagtgagcggagatcgcgccactgcactccagcctgggcgacagagtgagactccgtcccaaaaaaaaaaaaaaaaaaatagtgagtgcaaatgctctgaaagtgagctcatttagcactgctaaatttaggatagagacaggacaaagaggcgtccaaggacagaaacaactgcatttaggagatagacagtaacaaataaatcagcataattaaataagaagccagagagctggggcaaaaacaacgaggataattttttagaagcccctggaaggaagagtttcagtggtacttagtgtggagtactaccgagagttcatgtacaatgaagtctgagatgagaattcgatatggagggcaagtagggaatcttttaagaatttgatagcactgtgtttttgataagaacaagatacagrgtacacatcattgaatggaaaagcaccaggtgttcactatcctttggatagctcacgcagggaaacgacaggtctttctggaaataaagtttgtattagaaattcaagcatattttgggccagtgtgattgtgaagaatccaaccatgtacagaaagttgtggagggagagcagggatgtgagagagggaaaaacaaagatggagcaagatcacagaggagttgagaaaataaagaacataggtggaaaaccagaggaatgagggaygatggataccaataatgtttcatgtgaaggtgaagctaatgtccagttgctggtcaaatagcttgtaaatgtgggaaactggcaagaataaagaaaagagaatgtggatggtattttgttatgatgaagtgaggctgaggaggaagtaggaggtgagtttttaatacatagaatggttcaacttcatttatttttcaggattggaattaactgggcatggatcatatgaaatcacagataccttaaggatactgagatttactaaagtagattcacattacagaagtggactcccctggtatggacaggtaaaaaaaatgtttttaacataatcacaatttggggcatgaggtttttaagaaaatgaagttttaaatcacaaaatcaaaatttatttaaaaaaataatatttcaaataggaaaaaagtacagcagattataatttaaaaagcaaatataatcacaaaatccagaaaaacaaagcatgttttattaacttcctaacacacctctgtaatacatttgtgtagttcagctgcatactctttgattgtctctttataaacaatgattttgtaacataatttttataggaagaattcaaacacattctttcatctagatgattgaattttttattactggtagtttttaaagttgttttccatttcaaagtttcatatagataccaatattgatacattttagagccaataatttagtaaactatccattttctttcatataagagatgcaagatttctaggtattttaaattatattttgtagtaaataatctttgaattaacagttcatgggcaaatgcttcaagctgtattttgaattttatatttgatattttatacttgaattttacattttcttcatttatcctagtatttcatattaaattatcaagaaattaataactatatagatatagtttcatatggccatttcaggtagagagaagatcatgagaaaaactgatgacttgaaaggtgagtatgacatggtcagaaatgtaagataaaagggagaatgtctaaggctctgggtatgaaacagtttttcaagagcaaagaactaaaaagcagccagtgtgatgacagctaaggttaaagacatgaccgaattcactgaataattgcaggcaagcaagaacagttattaaggtcttttaagatatggtaagaattttggattgagaagtgactaatggttttaagaaagagagtaacatgatcaggttagctcaggmtgtatagaatggtttagacaagaatgaagcagcaaggaaatgcagaagattaaatagctactggaaaccagatgggaaaaaatgtgattttaactagaatggtagcagcagatttggagagaagcagatagaatcaatatatatttgatgggagatggggagaggagatagcacttgacaatgagtttgagataagcagtgaaagaaaatgactcattaaaaaaaacccaattcctcagtattcctgcgtcagttayctgatagatggaagacccatatactgaaagagagaacagtggaagtggagaaagtttgggaaggtagtgtgatgatcccacttttggatgttctcaatttgagkccccatgagatatccaaatagaactattcaagattttgagatgtattgcataacaggataattatagtcagtaataatatattgtacatttcaaaataataaattataaatgtctcatctgaaaaagtggtaagtgacgtgatatatatgttagtatatttaatcattccacgttgtatacatatatcaaaacatcacattgtacccaggaaatgtatataattatgatttgtgaatttagaataataatggaaaataaactgccatttagctttcaaaataatttttaaaaagaagtattaaaaagaaaaatcatagtttagagctcagaaaacaagtctcgttttcagattctaagatcttcagtaaatgacagggagtgacctggcggtaaatgtgacggagtggaagatgttattgccatatgacaatttaaccagctatgacttttatatctctaggttcttctagtcaatgaaaaccatcagccaatcaccaacaaaactgtagatgttcatgtgaatactagatactatttcagtgcaactactgatgagcatggtttggtgaacatttccatggacaccaccaactacatatcaccttttctcacartttcagtaagtggaaaggggcatctgggaccaaaaatagagaaattactgtggccagagataatttaaagatatttgagaggcatgtgaactctaggaattaaaaaaaaagtgataaagagtaaaatgtaggccgggcgcagtggctcatgcctgtaatccaagcactttgggaggccgaggtgggtggatcacgaggtcaggagatggagaccatcctggctaatgcggtgaaacccgtctctactaaaaatacaaaaaaattagccgggcgtggtggcgggcgcctgtagtcccagctactccagaggctgaggtaggagaatggcgtgaacccgggaggtggagcttgcagtgagccgagatcgcgccactgcactccagcctgggagacagagcaagactccatctcaaaaaataaaataaaataaaataaaagagtaaaatgtaaattaagcaatatggagacctaaattataaaaagagaaaagtctgccagaaatcttttacttgtaggtaaactctgttgacaatatgatttaggttcaagagacattgaatagatcatcttgatattcctttgaaaaattgaatatttttatgattctaatacaagtaagatcttgcttggtttctttggcatactactattttgttttgtgttgaatattcaaatgttcttatgcaatttgcagccatagcgtgttaagagaaagtaattgaccttgtttgtgaatgaataacatctactaaatcagtacagcataagcttaaatgatctcgaggggaakcagtttacagattctgctatatttaagaaagcagccttcttatatggctttattatattgctttatgtatatatatacaaacatatataatatgcatatttttatatatttttgcaatyatatatatattatatataaaacagcttatttattcttccattaggtcaaatacaaagagagtaacaattgttctgataactggtggcttgatgaatttcatacgcaaacatctcatactgcaaagcattttttttccccaagcaagagttatattcacctcaaacctattattggtactttgacctgtggacaaacccaggagattcaagcacactacatyctgaataaacagattctcagggatgaaaaagaattaaccttctactatttggtaagaataagacccactgtagctccttctgattgtgtagactccaaaattgctgggttcctgtctaagtaatgccatttataagataacaataatatattttgtattgtttttgtgctagaagagaagttacttcctaacaaatattaatgctttaatttctcatttatgctctattcaccactgaaacttttagaatttttccttgcagagttccaatggcaacttattgagcaggagaggaaagagcctaggataaaatgtttttagtcaaagagaaaatgttttcttagaactcagtagataaagaagcaaaagctaagaaccatgaactcattcaaaaggaaataaaacttataaacaatcttctggaaaaatattcaattctaattattttacaaagctcatgactggtgtgattgcaaggaaaaggtatattaacaggcagactataaattggagtgatacttttgaggccaatattcccacgaatgcccccaaattgaaaatgtccaaggctcatagttactcaaataagtcattttaagaagaaaaagttaaatatagggaattctgtataagagcattaactataaataacattttcttaattccataaaaaaatagaaaaattaacaataaatttgaatttcctagatttattgcttcctagatacatgaccttggataacttacctaatttcatctggaaagagaaatgtcaatcatctcactttagtcctggagataatattaatacctacttcatgraattatagtgtaaattaacagtaaattacttagttcagttcctggcatatagagaatgctcaatacatttagtttttttaaaatagaggcaatattagagaatacttatttatactttatatctgccttcactatatattgctttgcataaggtagatgtttgaaatgtttgttgaaaaaatacataaattctgtttacatatttacatatatttattagaagtgataaatattaaataaaataataaaacgttatacaattatatattttttatttaaagtatgtaaagacacatatatgaagatattgaaaaggaagtttagtgatcaaaataacttctaggttggggtaataagattatggttcacamatatatcatgaatgttttaaagttaggttaaaatgtattcttttaaacaataatgaatatatttccttctgccttcagatcaaagcaagaggaaaaatctcccaatcaggaatccaygtgttatccattgracaaggaaacagtaaatgttttcaagatttcctttttctttcctctttcatcttgtcaaattctgaacaatttagcartttggagctattctcacattagaagaaacagtcaccaacctcttcatccaaagatgaagaagctgatgtaataggatgacatactgggttygctttagcccagttaaaattttttcttcttttatagcattcctacattttaaattttattcctaaactaatacataytcattttatgtctttaatgtcttcaaaaggcagaaaataactgaaaaaatatggaaaataaccacagaaaaattttactttgtgtgcttgtgtatgcattgcctattactactgtaacagattatcacaaatttatgggcttaaaacaayacttctagttcttcrttttagtgccttaaaacaccacttgtatcttctagttctggaggtcagaagtctcactaggctaaactcaaggtgtcaggactgcattcctgctggagcttgaggggagactctttccttgccttttccagcttctagagacctcttgcattctttgcttgcggttcctttctctatcttcaaattcagccacataccatcttcaaatctctctcatcttcctgtcttcctcctagaaagacccttgtgattacattgggcccacttggataatccagaataaacttcacacctcaagatccttaatttaatcatttctgcaaaggcccttttgccatataaagtaacatatgcagaagttttggaaattgagtatcttcaggggccattattctatttaccacaatcttcccattggccccagagattcatattcatccctcatgcaaagtgcattcactctatccatcataacattaacataagattaaaagctcacagtctcattagctcaaaagttccaaatctcatcatctcagtcatctaaattaggtgttawtgaggtcctggacataatccatcctagggcaaaaagagtctttagtcccaagaagtgctgatatctggctaggaaaacagcatagttttaacacctgggaataatcctctttaattcatttctctattgtctgggctcaaggatccactcatgaaatcatttgccctttttcatgaaggatgtgtttgcagctgaattgttttatcagatctcgtttcctgcttgcatgatttgagaggtctgatattcttcttttattctatactctctctgtcccttttagttgaagctgacaatgtttctattagtataaacttttcaagaaccatgtaggtctcctgtgtgtcacagagattcattccgttaaacaaaaagccttttcattgacatttgatggataattctatctccaattttggcttttgttgtgatgggtaagggtatctaagagtcatgcacttaatmttttcgaagagccctttttttgtggctaaattactctgacattttaatttttctgcaaatcaagtctttagcaaaaagttgtccagtcacatcatagctttttttctagagcacaatttcctgacagcgaatgtcttaattttaccgatttttgcaatttagataagctgagaaatttccgaattatcaagtcctagttcatttttgatgactacttcctcattcaatttatttttctcctctccagttttgttataagcaggaagaaggaagcacttttctataaaagctttaacacttttctgtaaaagctcctccctaaatatctgaattcattaatatttggtatttctttttcttaaatattttgttgaatttaccagtgatctggacatagaattttctttgtgagaagattttaaatacaaatttattttctttaatgaagtgcaaggtaartttgctactactttagttaattttttggttgtgtatgtcatttaaaatcttgtctatttttctaaactgtctaatttattgacataaaatagtccataatattgttttaaaatatctgtaatttctatagtgatagaagctctttcattcaagatacttataatttatgtcttcttttgatcagtttggctagaagtttctcaattgtactgatcatttcaaacaactggtttttggtttaattgatttttcttgttttttwttttatttttatgtcattggtatccactgatctttatcaattaaagattgattttaatttagtcttctttttatactttcttcatgaggatgttggggtcattgattgagacctttcttctttactaatacaagtgtttattgttacacattttcctgttaataatgctttagttgcatcgtttaatatttacatgtgaaactttcattttgaatcagttcaaratattttctactttcttttttgatttcttctttgaaccatgagttattcagaagtgtgttatttagtttctaaatgggagatattttagagatctttctgttactgatttctaatttaatgacattatgattgtatgactttaatycttttaaatttatrgagacattttatagctcagaaaatatggtctatcttgataaatgttagaatgtgtattctgctgctrttaagtggagtgttctctgaacgtcattgaggtcaactgggttaatagagtttctctatcttagatcacacttttcttctttatttctttgaatcataaatatctttatttatttatttatttatttatttatttatttatgtattttgagacggagtcttgctctgtcacccaggctggagtgcagtggcgcgatctcggctcactgcaagctccgcctcccgggtccacgccattctcctccctctgcctcccaagtccctgggaccacaggcacccgccaccacgcccagctaattttttgtattgttagtagagatggggtttcaccgtgtcagccaggatggtctccatctcctgacttcgtgatccgcccgcctcggcctcccaaagtgctgggattacaggcatgagccaccgtgcccggtgcataaatatctgttaatttctgttatcctaggaagaatgtttaacatatcataaaaagataagtaaaaatatattttttttacaaaagataagtacagctggcctatttacttgttacctcttgtccccaagttgaatctcataaggaaaaaatagacttctttttgtttgtttgtttcaaattttgaaacaaaattgaatatttatgagctatcattgactgaaggaacttttattaacagagctcaaataaattttcaaataaaaattgatttttaattagtcatctaactcaactatttacaacttttcctttaaataatcatgtaaagtttgattaaaaaacttttttttttttttcgagatggagtctcactctgtcacccaggctggagtgcagtggtgtgatctcagctcactgcaagctctgcctcccgggttcatgccattctcctgtctcagcctcccgagtagctgggactacaggcgcccgccaacacgccggattaattttttttgtatttttagtagagacagcgtttcaccgtgttagccaagatggtctcgatctcctgacctcrtgatccacccgcctcggcctcccaaagtgctgggattacaggcgtgagccaccgcgcccagcctaagatacctttttaattaatcacgaatttaagtttgatttcaaaatattaatgtttgtttgtaattttttgagttccagattagcctcttaataaatttcctgtaactctacttctagatgaaaacctttttttcatagactttctcccagtctttttgagccagaaagaggcttctaaggtcatgataaggatgcagtacccacactctaaaacgccactcaccataggttcttcttcggtctgtaacatctcttaggtctatataatctcttactgattgttttctttctgcttgaaataaagcacaaaatttgaatacgttcattcaaatatgaaacatygactctaaatttccatttaatccctgattttatgttattggacattgtattgatttttttagagcaggtaaggttgtctctaataacatatgaaaaagtcactgcctcacaaagcagtatcttcaaagtttgtttctgcagtagagtttaaatcctgtatggattgggtcctaaggtggtgggatgggaagaagaagtgtccctctctttaagaaaaaatatacttcattttatttaatgacagctatgtaaatgattgttttgactttgtctttgacatttcggaaactcagtgaaaaacttaagtactctagtgtaataaccatttyattgcagcttcctaataaaattaactcctatgtttaaccctgcttcagaattccacattcatttggctttcgtcttactgtttcaaattattttgactctgctgtttctctgtattttcatgaaagctgccctcaaatcttttatagatacaggaagggtacaatttttaaagaataattttatgctacaaagatcaaacttagaacatttatgaaaataatcaagtggaatgttacataagctctatgtagttcacacagaggacaaccactgagatgaacacacagaattctattataaaaatcaaaggctcacaaggctttttatgtgatttgtatctgtatccctgctgtattataaatggcctgaaggaaaagactgttgcattgtttatattgcccttacacacacaagaattataaccaaacatgtctagaagttctctttcttctctcttgactcctttctcaataatatttttcaatttagaaatagagacaagcattaaatgtctttttcctacttaaacagaggaaatgaacaattaaacctatatctttaagggaaaatgtcattagctcagcatatatttattgaacactactacctgcacagtggtataaagtcttttcttacttcagtgtgatccaaatgtaaataaagtctatagttggaaatgcctttttaaaaaatcaaattgataattctgttgctaatgtgttattctgaacttgttcttctttttaaattctccagtgaaaggggtgttttccttctcctttcgagtggaatcagactctgctcctagtgctcatctgcttrtttacactgttttacctaatggagaaattgttgcagacactgacaagcttgagattgaaaactgttttgccaacaaggtgggttgttttgtttaagactagtccttttattcttctcccattgtgatgtgtggaaaagaaggaaattaggaaattaggcatacagtgctcctaaaacattcctcccarctacttctaaaggcagggggtgatgtcatactgagaggtctagtgctgacwtccaaaacaggcaaccacaaacacagttttttaaaagtctcttgttttgttataaaattcatatgaatttcaaaatcaagtcacctataagcctttaatagttttaattttaaaatgttttgttactaatattttgattaaaaatgatgcctcacaaggctgtgccaattttaccccatcatacactggcacacttccatgtaccactacagayagcagtaggttgtcatgagtttaaactcagcttaataatacagaacagatgagaaacagcctggacactttaaaaataatgatagcacaaaaatttaacataggttcagatggcatattttttatttaaggaatacaaarctgccatgtgaagctcactgagatataagtatgctttattccaacagaacttggtgctgtttatctgattttcactactctagcagcataatcataacattagcgatcagataagagccgcctacttcagatgcctgttttcaaatacacctggaaggattttttttttaacatgggctttgtggagattaaaacaaaatgtgtttatagcaagtgaacatttctgccctgagatctatatttaggttgtcttgttttaaatatacagtgaaataagaaaaatacacagtgtattctgatgtaaacctttaattccaccttactaaagagtgctattaaacctggatggtgtgtccaagaagcttagtgtctgttctgtttggacttctgtgtgtttcatacccactgagaagagactccttcatgcttcaatacctttactgttaatgatgggtagttagtttgttgttaaatcttgggaatggccaagttatgctccggctttcagcacatcttattcgttctagcagtggggtctctttctggtgggtcagtatcctcttcacaccctagaaatgagagaagcattataaaacagaattggcagaaaagtaattttctccctggaatccagtctgaaaaacaattctgattttgcaaaacatatgacagtccctgtgcaacagtataaaacttcaccatagaagtaaaagcccacggacattatattcaatcacttcacgttaaatacctttaaaatcatcattgatcagaattgaagatcagctgtaaaaaataatatgaacaaagattcataagaagattcagaagaaagttgactaccacaaaaattagaaaaacagtagatctattaaaattacaaattaagcaccctaaaagttagacatcttggtgggatgatgagcaaataaatagtgcactgaggatgtgaggaaagaccccaagtcagacatgcatccctgcaaaacgatacatttaaatttttttcaatctttgctgagacagagaaaaatagttttctattcaaacttcatatacttatttcttcacttacaacagatttggcatacacattaaaaattatgtaatagttggaatcatttgttatactcaaccagatataattattcattaagaataacattggtagtaattaatataatatatgaggtacagactcctttgaaatatgccttaaagttatgttttggttttcatatcagtaaaacattttctattttctaacatgtccacttcttgctaatagtgtttttagtttattataatcccaaattacctgttcttttgacatggacagtaactaacatattttaatgaacttaaattttctaaaaataaaagcaaatatattttaaagagattctccataagcaatgttttcatagtatattgagttagaragatgaatactattgcatcttgaagataaataattattgatttttttcatatatgtcttatgataagtgattccaaactgctatattaaattcagtagaccataaagctggattgtcatagtgaaatttagcaacctaagtcagatgttatttagctaaacatactgatatttcattccaataaaaatcagttttcagtccaagaatcaaggaagttacctgatgctactactatataactcagatactactcaagaaatgtcggtatcaacagaaggaactaatagattatcttgccaattaatttttttggccaaagtagaakcaaatctttgggaagattctgcacaatttcctgttgttctttattcaccattttttaaattgtctgaaccaatgaactcttaggctgtatattagatatttattttttttaaatggaccagtaaatctccaatcatgatgaacagttccacactgctttagaatttcaggtgactgagactgccaactggaggagacttctgttggctggtctcaggggtggaatgtgattttcacatcaccgtgcaaactgcacacagtcttcacataaacactgcacagagataggtcagtgatagcaaggtatgcatctttcttgtacgtgtgttttcaattctatgcagcattttatttctatatgattaagtcaatttatatttcaycatttatataaggaatggaaaacctgagttaactggaatcaaatttccaggttgttccagagacactgaattggtagttcctaggctgttcatctcttaatcctgctgtaagatgaataaagagaaaggaagtatagaaaaggctactcttagcctggagtagaagaagggcyggttactgtaataattataaaatggctgctttaatcatatcctctttacaggtaaatttgagattctcctcagctcagagcctgccagcctcaaacacccrcctgaaggtgasagccacccccctctccctttgtgccctccgtgctgtagaccagagtgtgctgctaatgaagcctgaagctgagctstcacctaaatctrtgastcmcgttccaaccttggagatcatgaaatgctcacgtgataagatcatttttggargttaaaagttccaaaaatgtttgcaaaaaacaagttcttcagagtaacaggcatagtrtaattccacaacaagcagaaactgcataaagtactttacatattttawctcattgtattctctgttatattctccttaagggagcaatcttgcttaccaagacaatctgtgccatgcctggcacagaatctttttttttttttaacttttattttaagttctggggtacatgtgccagatgtacaggtttgttacataggtaaacatttgccatggtggtttrctgcacagatcaacccatcacctaggtattaagcccagcatcctttagctattcttcctgatgctctctctccccctgcccccaccccaacaggccccagtgtgtgttgttccccaccatgtgttcatgtgttttyagcattcagctcccacttataagtgagaacattcagtgtttgattttccgttccagcgttagtttgctgaggataatggctgccagctccatccatgtccctgcaaagaacatgatctcattttttatggctgcatagtattccatggtgtatatgtacctcattttctttatccagtctatcactgatgggcatttaggttgattccatgtccttgctattgtgaatagtgctgcaatgaacatttataatagaatgatttctattcctttgggtatatacccagtaatgagattgctggatcaaatggtatttctgcttctagatctttgaggaatcgccacactgttttccacaatggttgaactaatttgcactcccaccaactttgtaaaagtgtgctttttctccccaacctcgccagcatctgttgtttcttgcctttttaataaccaccattctgactggtgtgagatggtatctcattgtggttttgatttgcatttctctaatgatcagtaaaattgagctttttttcatcagtttgttggctgaatgaatatcttcttttgagaagtgtctgctcatgtcctttgcccactttttaagggggttgtttgttttgttcttgtaaatttgtttaagttccttgtagacactggatgtttgatctttgtcaaatgaatagattgcaaatattttctctcattctgtaggttgactattcactctgatactctgtgcagaagccctttagtttaatgaagtcccaagtgtcaattttttgttgttgttgcaattgcttttggagattttgtcacaaaatctttgcccatgcctatgccctaaatggtattgcctagattttcttctagggtttttatagtttcaagttttacatttacatctttaatccatcttgagttaatttttgtataaggtgtaagaaaggggtccaagtttcaattttctgcatatggctagccagcactcccagaatcatttattaaatagggaatcctttccccgttgcttgtttttgtcaggtttgttgaagatgagatggttgtagatgtgtagtgttatttctgagttctctattctgttgcattggtctacgtgtctgttcttgcgccagtaccatgctgttctggttactgtagccttgtagtaaagtttgaagtcaggtagcatgatgtctccagctatgttctttttgcttaggattgtcttagctatttgggctctcttttggttccacatgatttttaaaatagttttttctaattctgtgaaagctgtcaatggtagtttaatgggaatagcattgaatctataaatttctttgggcaatatggccagtttcacaatattgattcttcctattcgtgagcatgagatgtttttccatttgtttgtgtccttcatgaattcttgaacagtggtttgcagttttccttgaagaagttcttcacttcccttgttagctgtattctcaggtattttattctctttgtagcaattgtgaatgggagttctttcatgatttggctctgcttgtctgttgttggtgtataggaatgctagtgatttttgcaccttgaatttgtatcctgagactttgctaaagttgcttatcaacttaagaagcttttgggctgagatgatggggttttcyagatataggatcatgtcatctgtcaacaaagataatatgacttcctctcttcctatttgaataccctttatttattttgtttgcctgattgccctactcagaacttccaattctgtgttgaataagagtggtgagagagggcatcctggtcttgtgcaggttttccaggggaatgcttccagcttttgcccattcagtatgatattggctgtgggtttgtcataaagggctcttattattttgaggtgtgttccttcaatacctagttcattgagagttttaacacaacgggatgttgaattttattctaggctttttctgagtctattgagataatcatgtgggtttgtctttagctctgtttatgtgatgaattgcatttcttgatttgcrtacattgaaccaaccttgcatctcagggatgaagccaacataattgtggtggataagttttttgatgtgctgctggatttggtttgccagcattttatggargatttttgcttcratgttcatcacggatgttggcctgaagttttctttttttgttgtatctttgccaggttttggtatcaggatgatgctggccttataaaaygagttagggaggagcccctccttttcaatcttttagaatagtttcattagaagtggtatcagctcttctttgtacctctggtaacattcatctgtaaatttgtctagtcctggaattttggttggtaggctatttattaatgcctcagtttctgaaatcaktattggtctattcagagactcaacttcttcctggttcagtcttgggagggtgtatgagtccaggaacttatccatttcttcttgattttctagtttatgtgcatagaggagtttatagtattctctaatggttgtttgcatttctgtggggtcaatggtggattcatttattttttgaagggtttttgtgtctccacctccttcagttcttctctgattttggttatttcttggcttctgctagctttggggtttgtttgctcttggttctcttgttcctttacttgtgatattagtttgctgatttgagatctttctagctttttgatgcgggtgtttagtgttacaaatttccctcttcacactgcttcagctgcatcccagagattctgttatgttgtctgtttgttcttattagtttcaaagagcttcttgatttctaccttaatttcattatttacccaggagtcattcaggagcaggttattccatttgcatgtcattgtgtggttttgagtgagtttttaatcttgagttctaatttgattgcactgtggtctgagagactctttgttattatttcagttcttttgcatttgttgaggagtgttttacttccaattatgtgatcaattttagagtaagtgcaatgtggtgatgagaagaatatatattttgggtttttttttttttttgacagagagttctgtagatatctatcaggcccacttgatccagagctgagttcaggtcctgaatatctttgttaattttctgtcttgatgatctgtttaatattgtcagtggagtgttaaagtctcccactattattgtgtgggcgcctaagtctctttgtaattmtctaagaacttgctttatgaagctgggtgctcctgtattggttgtatatatatttaggtagttagctcttcttgttgagttgaaccctttaccattatgtaatgcccttctttgtcttttttcatctttgttggtttaaagtttgctttattagaaactaggattatgacctattcttttttttgtttcctatttgcttggtaaattttccaccattcctttatttttagcctatgtgtgtctttacacatgaggtggatctcttgaagacagcatactgataggtcgtgactccatcatcttgcctagcacagaatcttatgtacaatagatgatcaacacatttttaatgagtgagtaaatgaataataattatttgagatgggtattattactttaatattatgaatgaagaaaacacaaccaggagacattaaaaatagggttagcctttctacaggaaagtgaacaaaataacaagctggtaggttaaattgttccaataataaacattccctgagcatataacctattccacttgagaaataaggcaactataagaaattgacgataaaaacaatacattttaaaggaggaattccattctcatttcttttcttttaaatccacttcctaacccaccactaatataatttcaagaaattatgcaaaaattttatgcctttcttaaaatccagacactcactcactggttttaagtgtggacaaaagagaatttccattcaatgttgtctttaaaaatgtctcttgcaatgaagcaatttcagaacagccctatattttattggcttcatggttcacttatttatttaagaaatatttattgcatcttgactataagatggacattgttttgagaccaggattattaattatggacaatccagatttggtcttttactagttttgatttataatcttgtgagatatacaaacaaacaagcaagcaacaaaaacatataaacatataataattccagatttttataaatactatgaaaagaataaacggagtattgatatcaagcataaaggtgctgataaatttttgaaataattgagcaattttgaaatgtttacattggagaatagtggagaggccagagcaagcttacaaaaaatggaagcagcrtgccaaaggttttgagtcagaatgaatttggagtgtactgaaaaggaaaaggtcatcacctaatatgtagcagtgagaggggaggatgatagaggctgcaggtaggatggaaaacggaagatcatggcgagctctgtttacttggtgtggagtttggagttgatagtaaatgcaatggtaaatcaatgaggaaatttacacagaagagtggacaattgagatgaatctattaaaaagatcatatttgctgctaagagtatgggagcaagaatgaaagcacaagaacagttacgaagttattacagtagcacagatgacaagtgacagaagccacattagaaggtctgcaggtgtgtttaatggcctgaacactgtatagtaaggccacctgaaccctgagcacatggccttaaacttggctctgggcaaaaccaaactggaattgaattatttctcagttgtccctgcacctagatttttcttaagctaaacttggtcctaatacagtagactaaaaagaaaacttggtacagccttagtcatatgaaatggaaaaaggaaatgaatcaagtatttatggggattattttaggtgagggggctgtgagaggcttttattctttcattatgtgcctctgctgtccacatttcctactttyttttaaaagtaggcatttttttttgtgggaaatagagacggttttatttttactcaaccaaaatgaattttgagattttgatcaattcatttcatctctctatatattactttcttttgcacaacaaaagaattaggatccatgacctytgatattactccatgattctctgtgttgcttttcataatgtaagcawgcacatgttaaataaacaccataatcttttaaatttcctaagggacattatcacattttaaaatctgttaaaaagaaagagatttcctttgttctctccatgttgcaggtctataacttgctaccagtaaagagtccatttacctttagagctggaggtcctgcggatgaatatgatgaagagtgcaacaacgcaaaagacacaactcacagcggaatcacttccacaccgaagcaagtcctggagggggatgacatttacagtatcttcacggtaattttttttccccaaaaacataacaaaaactgatttctacgtgtctgtttagatggagaaacaatggacttctaagctctaggatcttttctcccctccctctaacaaaatgataactaacagaaaaatattgaaatctcagagacagataactctgtggacacacagatgttcacacatgaacttctctaccaccttaaatagaaagtggtttacttttaggctgcaaaccttaaccaaatggatcccaaarctgcttaccaccatcgtattcccctctcagtgactcttggggattccaatatgtaagaaaaccaaaacaaaatattttccataatgtgtctgacactcttggaaaggtgagcaccttgttggaggccatcatctcagtcatttgcaccataaacacttgttgaatgaggcggggcgcggtggctcacgcctgtaatcccagcactttgggaggctgaggtgggtggatcacgagatcaggagatcgagaccattctggctaacaaggtgaaaccccgtctctactaaaaatataaaaaaaattagccgggtgtggtggcrggcgcctgtagtcccagctactcgggaggctgaggcaggagaatggcgtgaaccccggaggcggagcttgcagtgagccgagattgcgccactgctctccagcctgggtgacagagcgagactctgtctcaaagaaaaacaacaaaacaaaacaaaacaaacaaacaaacaaagaaaacacttgttgaatgaatacaggattgaatacataaaatgcaaaacttcagtcctcacagggcagtaaaattccaggaaaatttgaagttgtctttcattaagaaaagattaacaaaacttgtattagaaatgttaagatgtcttaaaaatgtaattctttagtattaactataactgagcagaattatccaggtcgtgaaattaaatcttatcactatcaaaaagcactaaaaactttcatcataccttcaggaaaatatgtcgttcatctgctagaggtctacagcttagctgaaagcaatttaaatctctctcttctggacsttctggaatcacaaatcagatggtagaaggatgaaaagaatacttcttggtttattaaccagctgtttaatctctaartatttatttctggtttatttctttctgttgcgtacacaaccctcactgacaactgtgttcaagagtcccacagtttcccaaatactctgagataaaatagcaaataatatttatctgtgactaacattgaagaagggggaagctggaaacaggtggactgtagacaaccgtgggcatctgaatgtgggttttagatgcagacatttgagacgactaraagaaactgagaaaaaagaggaaaggaccacaggaacgagttaagcatagatattcaggaaaagccatatcttctggtaaaacataaacaaaacagagtttactaagattgtaaagaacaacctccgatatgcaaaccttcaatttaaaatgacaagaaacaagcaaaaaaatgctctttgtaataaagccataaggagagctgtttatatgcatacacagacatagatatttgtttcatggggaaaaagaagagaagaaaacatctaagtctaaaatattcagttttatggatgcaaaaaagagttaaggagcattagattataccagacaatatttagaaataagaatcagaaacgggtttgaattcccactcctattcactcaatagcttaatgaacttgaccktctatgactctgttttcatatttataaatagctctcctcattttgtgtaattttcatgatgagcgtatgaactatatgtaacataatagtgaaagtacaatacaaattcaagaaactacttacagtctcaagattggattgccgctatgctttaacaayttttttcagtccataggattagatatttttaccaactcaaaaatccataagccaactttgtgtctaccacgaggattgcgtatcagcataataggaggtaaaggtgtgatttatttgtctgacagaatagaagaaaaatggtgctttattgggttggtttaagatgaaaacctgtttttctaagtattggatcttgagactgcagcaacttcttggtaagttagccccaaataatactttttcctcaaatagaggatttttaagcaattattattttctctttgacatcaaaatcaactacctttttgtttttgcttttaatagtcttgccattttagatcttccttgtccatgatggagtcaatacctgaattagtcagaattagattcaatggcagtaacaaacaaactcccacatctcagcgggtaagcacctaayggtttggtttttgctcacacaaaatctacttgtgagttcagacactctccagaacagccccgtgccaaacagtgagtcagagagaaccagtctgctttcctctggtgactctgccatcgccaacgtggctttcaaggtcatacccatggggaaggaggttgcactwgactcttaaagccaggagtgggaatggtatacatcacttccgcccatgttcctgccctgaatgcaaaggaggctgagaaatgggaaggctcatgtggatattaactgtctctgtcatatcttcttatggaaagagaagggatttatgtaatattgagcaaaagagagtaaygcaacttttggcagataygctacctctgcatagtctctttgtgtgtttcaagtatacctggaaatcaggaaatgttgcaaaaggcctaactcaaaattcttttctactgccatcaggcctagagaaatttttctctgcatgcttgaatgtctaccaaatttactttttaataaaaaatgaggatggcagtaaaaagtgttaaaaaaaaaaaaaaagaataaacacattttaatacagcagattcactgcctgggaaggcaaggagtaatgttctaattgaaaacaaaggagtcattaaggatatttcctcaccagaaaaaaaaaaaatcctgtatagtgaaaaaagaacactgtgttaagaacaaagggacaatttttcatcacactcctatctgctatgactatgtgactttggaaatttgcagactcacttaaccttttagaggctcaatttctttaaatctgaagtcagaatgacaacaccaaactcaytgaggtattgtgaccataaaatgaaaaaaaaaaaatcatgattcctttaatggcatgtttgtttaaaaaaaagaaactgaaaagcatgattaattgactttcatttcaccaagtgtgtattttctttccaacctaagagaaaacagatcaatggaaacaaaggtatgattcagaaaacctgaaaactcagagtacatcgttacactttgaccccaaatgttctgtaatattctatgcaaatttttcttttggtatttgttgcttatccttttcttccttctcattttcagttacagcactttaatctgtctgtcattatttcataactagattactgaaaaaccattctaatttaacttccttgcctccagcttttctttacctctatctgtcctgcatactcttaaacactgcttttctcatgtcacttgtttctcaaacatagtcaatacttccagaattcataagattattgcatttaaggttttgaaagagcacatctaactctattatcttatatatatatcatatatgtatttataattacacacgtatataattatctttaaaaagtgatgccccagagatcagaagatatattatagaataatattataataaagatatttaagataatgttaacaatatgtaaagattatatatatcttatatatatgtatatcttctgatttctggaatatcaatttcttttttatcaagctaactaactcccacttaacagaccttattcatttgtcctagccttatgttttattatatattataccttctgtttacctaattatgggaaacacamcctgaaaatagccattctactctagagggtaaatttttactatccctgtgaagcacccttccacctttgtatatatatttgcacagtcctttcctgggaataactccccattctcctccacctcccatccatgaatgatcatcttaggttccgctttggtaaagtcttttccggcctaactaaagttgattgtcttttcaytcctgactcccyattgtctatactacatactttactgaatcctgttgcttattgtttatgtctccatattaattcaatgtcgaaacaaacaaacaaacaaaaaatcattcccraaatcatcttgcttagctaatatccattcctcttgtttgattctcrctgcaaacagaagacatgtgaacacaatttcagtgtaaaagcaatatttggtgtattaaattactctttatccttcccttcaccagttgagtaatcatcttagagagagctacatttgtttttttttaatcaacttttattttagattcaggaggtacatgtacaggtcatttgtttttatttataaagaaaaatatatttagctctagattctatttraagaaaaaataggattagcctttttataggaaagtgaacaaaataacaagctggtaggttaaattgttccaataataaacattccctgagcgtatgaccttattccatttgagaaataaggcagcaataagaaattgatgataaaaatgaggttcacactgaggcctgtgtgttgtcttccaggaccaggtctgcgaggtgtacccccaggagcygtagaaataatgtacccaatgatcgaagaagaacctcagatattgcaagtgaaagagatagtccggaagtacttccctgagacctggatctgggatttggtggtagttgagtaagttgtgtgttgcctggaatttagtttaggagagggtttgaatcctgctgtatgactgatgttatcctggattcctgatccttttagttctgctctgctcttttctggtaaatatttaggtttatagttcatttatctcataattaaacaatgctaattttttttctaatttagtctattgataactaaratartagaaagtaggatgctaccagccctcttaaataaaggaaagggaaggggaggggagggagattgaaagaaagaacaaaaggaaggaaagaatgaaagaaaagaggaagaaataaagggagggagggaaggrgggagtaagggaggtagggagaaaaaaaactttaaacctcaccaggagcaccaacccttagatcaagtttagcatttaccacactaggttactgagttatcatgttctaggatcagccatgctttgtgttaaaaaaaaaaaaaaaaaagatttgcttatactcctcttctctgctccttcactagctcattaggtataagtgagctggtgaccaggtccctgaaaccatcacagagtggaaggccagcgcattctgcttgtctggaaccacagggtttggcctctctcctatcgtgtctcttcaagccttccagcctttcttcctagaactcacccttccttattctgtggtgcgaggagaagccttcacactcaaagccactgtgtttaactrcttgtccacctgcattcgggtaaggacacttctctggaagtgaatgagaatagaagatagtcaccattcattaccaggtctcctaggtaacccaggaaatcagaactgcatatgatatatcctaattttggagcagacctggtactaagagaaaaggtacctgacaggcccaaggtggtaaggttatattcattcaggctcctatatctgtgtattcctaaattcagacattatgtccacctgattgtttcatgtttttcactaaacacctctttcttctgttggcacaaggctaaatcctaaacacttatcctaattcctgtcagtttttcaattttcttgtttcaaacacctaaactacaaagtgtctgatagagctgaccatatttgcacagcttctcagcgcctctggactcatggacattgtccctcwgtccatttacctgatgcacagagcatcttttgcagtattcatgctgttctgcatcccttcataaacttgtggttgggtgtgggggacaggtcgttgtgcagctggaggtctcttccgctttcctggctgttccaacagagaagaatgaagaatctcactgtgtctgtagaaatgggcggaaaaccgtgtcctgggttgtgactccgaagtcactgggtgagtagtaatgctattagcaaattccacttcgtgtgcttggatgatttgttttctgcacygaccccaatacacactttttctcctcctttaataytaatcaagaggaagacaaccactggatacactggggaaactggaaaagaagaaactgttcaatatagaatcaccgtttaactcttaagaactttattccccaggaaaggtgaatttcacagccactgcrgaagccatgcattctcaggaagtgtgtgacratgagttgactgacgtcccrccacttgcgcagaaggacactgtagtcaaggccttactagttgaggtacgtaagtctactctctgtgagtctcagagcccttattatttcatacagtattatctaacatgcatctcacagtgacatttaattcccaagaatgtggatagatctacaatccaatttttcaccaccattttctcctttgctttcaagtgtttaatttttcttttatacattcagtatcgctttacttttttttttttttttgtcaatataaagcctgaaggaatagcaaaggaggaaactttcaacacgctgccctgtgcatcaggtaagtgtaatatatagagaaaaatttcatgttaagtgacttgccagagtatgcagttgtggaatgtcttttgggggcatgcttttctctgagagagagagagaaaaaaaaaacaactcttaccctcctccaaatctaaggacatttgatgaaaaacattgtcctgccccactggctgctctgaaaagccgtctttgcattgtgcstcgtcagcctccttgctcgccgcagccgcctccgccgccgcggactccggcagctttatcgccagagtccctgaactstcgctttcttttttatcccctgcatcgcgtcaccggcgtgccccaccatgtcagacgcagccgtagacaccagctccgaaatcaccaccgaggacttaaaggagaagaaggaagttgtggaagaggcggaaaatggaagagacgcccctgctmacrggaatgctaatgaggaaaatggggagccggaggctgacaacgaggtagatgaagaagaggaagaaggtggggaggaagaaggtgatggtgaggaagaggayggagatgaagatgagggagctgagtcagctacgggcaagcgggcagctgaagatgatgaggatracgatgtcgatacccagaagcagaagaccgacgaggatgaccagacrgcaaaaaaggaaaagttaaactaaaaaaaaaaggccgccgtgacctattcrccctccacttcccgtctcagaatctaaacgtggtcaccttcgagtagagaggcccgcccgcccaccgtgggcagtgccacccgcagatgacacgcgctctccaccacccaacccaaaccatgagaatttgcaacaggggagggaaaaagaaccaaaacttccaaggccctgctttttttttttcttaaaagtastttaaaaaggaaacttgtattttttatttacattttatatttttgtacatattgttagggtcggccatttttaatgatctcggatgaccaaaccagccttcggagcgttctctgtcctacttctcactttacttgtggtgtggccatgttcattatratctcaaaggagaaaaaaaaaacttgtaaaaaatgcaaaaatgacaacagaaaaaccatcttattccgagcattccagtaacttttttgtgtatgtacttagctgtactataagtagttggtttgtatgagatggttaaaaaggccaaagataaaaggtttcttttttttccttttttgtctatgaagttgctgtttatttttattttttggcctgtttgatgtatgtgtgaaacaatgttgtccaacaataaacaggaattttattttgctgagttgttctagcaaaaaaaaaaagaaaaaaaaaagaaaaacattgttctgatgaaaatcacttggaatgagcctcttagggaaataaatagaaagtactttttaggataaattattattattgtattttaagaataaagaaatgggcatagagaaataaaagacttgcttaaaagcttaaaagctcttgcctaataataaggtctaaggctgttgacctcaggacaggattctttctgatacctctgtgtttctcaaatgtcttcctaaaccatgttcaaaatattgaaatatctgtgtgacactagtatgatttactgttcaattgacagtttaaatgcactcatgtttttacttaaacaagttattttaagaggaactccaggttactaacttgtatagaaaaccagtattttaccaatatcattaatatagcaatacaaaaattaccactatattgaaagagaaggggaaaagctaacacttttttaagtttatttaaattatcattaaaaacccaamtctgtgccacctataatcatcttgacgataatgctcagtctgcagatctctcttctctatacgaggatcccttgataaaatcatctagtcaatggctttaataacaactatgtacttgtgtccaaaactgtacaactttgatccacacctttttcctgaactcaaactcatgtattcaactgcccactctccacttacaggcttgtaggtctcataggcatatcaaaatcagcaagtttaagactgagtatctgctcgtcctcacaaacctgctcctccctcaatttccttcatctcagatgatgaaaaatccattcttctatttgctagggagaaacactttggagttctttactacattctttcccctatcttccctacccaatccatgcacaaatctagtcgattccaccttcaaattgcatccagaatctacccacttctctccatctctactattctagtcctttctcttgcaggctctcaatagctttctaactggtctcctgatcatctcttcttgttccccttcagcgagagggatcctttaaaasatgtgtcagatcgtgtccctcctcttctctaaccctttcaggaatctcccatatcccccctaagttaaagcgtaagtttttaatgccacttagaaacccttgctaccccatgacttcacgtcttcctaatctctccttcgcttaacccgttccggccacactgacctctttcttcctattggaatacacccagcatgcttcagtctctggagtccttttactttttgttcctttttcctggaagtatcttcccccaggtttggataaatctggctccttgacttacttaaagtctctgctcacacaggactttttatcaatgagcttttccatagggagccccctccccacttcctgacctgccttgttttactagctcaccatagaaacacttgccctgctttaattttctctatagcacttatcaacatctagtatactaaatatactcttgcttttttatcgtagtcttcccctaaaaatgaaatctccaggaggccaggaaatttgttttgaaactttcggtatcattgcacttagaacctggtacatagtatacactgaatacaaatgaatggaatgaatgtaattcttgaaaagcactaacagtagcaggaattaatataaaccatgaagagaaggaaataagcataccataagtatatgcccataggaaaagccatagaaatttagcacaaatgtatatgatgaatatgaatttcactgagagatgaatcatggctttaagggaaacttggattgtatcaaagaaattatgtaataactgagccaggcatggtgactcacacctgtaatctcagcagttggggagatggaggcaggcaaatcgcttgagatcagaagttcaagaccagcctggccaactctgtctctataaaaaatacagaaattagccaggtgtggtggtgcatgcctgtaatcccagatacttaggtggctgaggcacaagaatcatttgaacctgggaagcagaggttgcagtgagatcacgccactgttcttcagcctgggtgacagagggagactctatcacaaaaaaaaaaaaaaaaaaaaagttatataatgacgaaggaaaataaaaggttggatctagatgatgtagagaaacatgattcataacaaaaatagaacatttctctcactttcccctcctttatatgtgtgtttttcttctttcattagatactggagtacctgaaaaggtgtcactgaatgttccttcaaatgtggttgaaggatctccaagggcaacatattcagttttaggtgattctttcagcccaagggaagcagctgtctggctgtataattctagtgcatgggcctcaccatccacgattaatgaagtttctgacaacaggcaatggattgagagaaagcactaagggttacactatgttacagttggaaaggggcttgaatagatgttgtgctacatattatgccttgatatattctaaaaagaaagggtcacctctcagtgccctcatcttcaagcaatttactaggtggtaatgcttcctagtcagtttgaaaatggttgtggttgagttttaccagacatgtggcccatgagaaaagatagatcacctaccattcagtttcttcccccctttctccatccttaaaccgtctattttctcaccttttgttttcctccctatttcttgttttttcaccttttttagtcttcttgtccttttctctataggttatttggcctctcagttagctaataatctattttcctagcctaatacaaaccatatctgatttctttacaacttttattccacaggtgatatactaggctctgtagtgcaaaaccttcagaaccttcttcagatgccctatggttgtggagagcagaatatggtcctttttgtccctaacatttatgttctaaactatctaaatgagacacgacagctgacagagaagatcaaggccaaagccactagctacctcatcagtggtgagagattacctcaaaaagaagagccataatctcttaaatattttttggtgaacgaaaatcaacatctgtttcattaagattcgatagtcattgtcgtgattttcaataaaatgtcccaatatacaagtagaaaattcaatagtatcatcaagcctgtgattgggggttgcgggaaattttaactaaatattagttaccctatgattcctaatagcactgagaaaaaagctcaataatcctccaatgtctttgccatttcaataaatctatgaacacttcctcttcagggtaccaaaggcaattgaattataagcacagagatggttcctacagcacctttggggacaatgatggtagcagtcagggaaacaagattattttttccctatgctctctgtagatccatgacatttcaggattctagaaacagctactctctaatatctggagttttttgtggaaaattgttagtctttaaataacgcatatgctgtatgtatcattcctgttgggtaatctcaccgtttcatctctgaaagcttacctgctgtgataacacagctgaaaatggtgaaataaggatcttctaaatggaaatataaagcagaaaatgtcattctataaaatgacaggggaagaagctcccacactgtgcattaaagaaggaggggagggcgaggacagaaggagaccgtgatgcagtaaagtcaggacaagtcattctggaaatgcagttttcatggtggggaggcttggaggctccaacaaatgtttcacaacaaaaaaattaaaaagcatcaactcagagaaaccaataaagttgagatataataaaagatattgaggtgtttgttggactagagtatattcagctcttaaatactatttccccatcaatacctcccagtaatctcctccactgaattgtgaagagcaatgtctggaggcagtgcacaaagtgagctatgaaagtgaggtggtcctcatgtgtgtgtttctgttttgctcgacgggctcactgcatttgtgctcaagtcctttgctcaagcccaatcgtacatctttgtggagagctcacacatcagggatgccctcacctggctttcacagggacaaaaggcagatggttttttcgaaggctctggatcactgctgaacaatgccattaaggtgatgccttctctgtttttcttctggtccctgaagatagtgatatgtgggaggaaatgatgtttgaattgagtccttcagtcttagcgacatagatttcaggaagaatggtggactctaaatctcctgaaatctagcaataccttagtagttttttattgaatgaaaatagtgttcaaaaaaacctcaaagccgaacatactataaaaagtgagggaaggtgatctgggacagactcaagaattttagggtagaggaggaaggggagaaaatcaacaatctagcacaagacaagaaacaatctagcacaagacaagaaacactctagtgaagatgtcaaaaagaaaagaagtgttagcagatgctgtctcatgactgttgaagtgtttgagtctctctgcctctgatccttacacggtggggtgaacgatgaggtgacattctctgcctacatcaccattgctttgctggagatgcctctgcctgccactgtatgttcaagcacatcctctgtacctccttcacacacgtaaagaataaaattataatatggtgaatccctgagggaaattaattgtgatttttatggtatttaattttggtacatttcactggaatgtaaaggaccagatccttttggaagcagcagaggaaactcctctctggtcagaactgtgaggttatacaggcacattaaggtttttaatctgcagttagcccgggaatagctcatttgcctggttctgctgttttacaatagcctttcgtcttcttcatagcacgcagtggtctgcagtgccctatcctgccttgaaacggcctggagctccacctcagaggcccaaggaagtgttgtctataccaaagcattattggcctatgcctttgccctagcaggaaacaaagtcaagcgaagagagttgcttgaatcattaaacagagaggctatgaaagaaggtaagagctgctactgcaaagtttacttctgacaaccaccagtgaccaaaagaagggacaatacctctaccgagctcatgcttaccatgctatcttaatttaatgacagaataattatcattgatctaagacccgaattctctggataacatggatcattttattaatccacacagtatagactctatacagtcccaccttctaatatcacacacacacatgtagtagacacaaaggctcaatgttattccctggaactttactttcttgataaagatttgtttgatagtgactatttaatgctttcactttgtttaatgctttcacttcattaaaatgaaatgtcaatttattaggtaaactgtaattataattatcacttatggattagattttgaaatcatcctttaagctaaaaattctacccttttctatgtcaaagaggattcgatccactggcaacgtcctgggaaacttcacgaagctaagaccctctattctcaaccctgggctccctctgtggaagtagagatgacatcttatgtgctccttgcctatcttactgtccagcctgccccatcttcagaggacctgtctgtggcatcacgtattgtgaagtggattaccaagcagcaaaatccccaagggggcttctcctccactcaggtctgtgggaagactctagaaggaaacataaatatattcacatatatgaagacacaaccatctgggagttgaataatggaatggttagtatttccaattcacactttctccatccctccatcagcagacaagttccagccttactatcttatgtatggattactgctctgtcctttttatactctctcctctcttaactccctaggggccccccaaccatgcaggtaggtttgtcttcacaaagcaatattttcaagggattacttcccttagaaaataaatctttttttcactcaaagcctaaaattatctaatattttatcaaaaatatttcctctctccagtaaacatgagtgcaccaatctgattaggcagatccctttgcttcttctggaattagctcaccgcagtttccatgacttcatatagagcattccccacccaggtcccccccccgatgcctctcttctgtctacataaaccctgctcattattcagagataatcttatttctcagataaccttcttcagtcttctcttactattctaacccatattttcttctctcttctctgaccttttataacaaatattgttacataaatttataaattattgaaatagcctgggcttgtgtcaratatctaagtcttatctccatatgtctatttaaactagctgaatgaagaaactttttaaaaatataccttcaaagtatctagaatrgtttatcattactaaccagattgaactgaattgaaatagagttagtggactgcatttatgactaaataattctgaaaaaagaatagtgttgttatggtttacatccagtgtgagtttgttactttcctcttctgtgatttctctactcattttttttttcaggacacagtggtggctcttcaagcgctctccaaatatggaacagcaactttcactaaaagtgagaaagcagctttggtcaccatcaagtcttcagacaccttttctaaagacttccaagttgatgatggcaactgcctagtgctgcaggaggtccagttgccagaggttccaggggagtacagcacaaccatgtcagggtcaggatgtgtgtacctccaggtgagactgctggggtttaggagatgctgcaaatgggagagaaagtctcaagagttatatttgaatttcaaaataagaaaaagaagtgtgtgctaagggaaggtatgaatcgtctggaacagattatgagacaagttcagtgtaaaaattaaggattttttttccatttgttttagacatgcctgagatataacatccttcccaagaaagaagggaaaacaccttttgctctgcaggttaatactctccccacaaattgtgatggaatggatgctcacagaacgttccagattcacatcaacattaggtaagtcctagatcatgaccagaccttttgcaccaaccgaatagaatatggagaaattgattttcttatgtggagaaactccactgtccaaagccacacataatgaatatggaattcttgcagtgtttattaatgagaaaattttctgaaaaagacttaacattgataatatggtattacaatatctgaagagtgtgagcttaaaatgatgggttttccaaacaaccataataacagaaacagatacagtagacatagtaacttagtgttagaaatagaaggtaaagagagagtttgtcttgaatgaattccaagaaattttgtttgaattccttattcttatgctttgattttatagttatactggggactgacccagttccaacatggtcattgttgatgtgaagatggtatcaggcttcatacctatgagagcatcagttaaaaaggtaatccctagatcccttacaaatagcaaagccatggtaaatgctggcatttatcgtgtcaatttgactttattgatgcacttttcaagaggtgtgctccctcaaaattgcttctctagagggtgtctctatcattttaatagtgtgtatcatgattatatggtgtcaagtatagggtataagtcagaaacatgataaataatgttccaacaggccccaagacacctagttatgtggaatggtattgaattattttccagctatatataaaaagagaaaaggatatatgggtgtgtgcatgcatatatatatcacatatatgtatctgcacatacacttatagcatatatagagaataaaagttcaataaatattgctactgttattttcattattattcttgaagaaatcaaaattagtagtttggatgctcctgagaagctgtttatatcataaatacctgaaaactactgccagtatgaagttttctcattccatatttctggcttatcctcttggtcaacagctccagaaacagcctcagattcagaggactgaagtgagcaccaaccatgtcccaatctactttgaaaaggtaagactttctgtgactctgctagatttggaataacaactagaggttctataaaaagaaatgaagccggccgggcacagtggctcacacctgtaatcccagcactttgggaggccaaggcaggtggatcatgaggtcaggagttcgagaccagcctggccaagatggtggaaccccatctttactaaaaatacaaaaattagctgggggcggtggcaggtgcctgtaatcccagctacttgagaggctgaggcaggagaatcgcttgaacctgggaggcagaggttgcagtgagccgagatcgtgccactgcactctagcctaggcgacagagcgagacttggtcccccccacaaaaaaaaaaaaaaaagaagagaaaagaaaaggaaaaaagaaatgaagcctggactgtcaacaggcttgattcattacatttggctgtctacaaaatgtctcttttgtccttcttttatctgtcattgagtatgttatgcaggtcacagaattcccctttcttttcataggttctggtacagatatatagcataactacagggtttgataatatcttatgaagagtggccagtaactagtaactagttaatcaaagattaactaatctttgattccaattgttttcctgtctctccagctaacccatcaaaccctgcatttttccttctttgtggaacaagacatccaaataaagaatttaaaaccagctacagtaaaagcctatgattattatgagacaggtaagattcagacatgctgagctttgaaatgaaaaaaaaaaaaaaaaaaaaagactactaacctagtaaaggattgccttaactaaagcaaaactccacagtgtttcactgggggaaaaagtgagtttgtgtgcactggataatcatgttcttgtatattaacctctcatgtccccccactaaacaagtgttagagtcattcttataaattgaccataaggcaataagagggtccattctatcttctatctaaatttccctataaagttgtttgtcctgggctgaattactccaaagagataagaagagtmcaataactgaaaaaacacatctcagtgctgatgtgtgacatgaaaaatttgatctgtttttgacttgtgcttcggatagtctcacacaatttgggaaactttgtgataatcaggaaatactttgatttgctcatggctttgagctagaaaattaccaccattgtagcatgatggtagtgctaaaactgttcttctttgattaaggaaaggttcagagagcaaggtgcaattccaatgagaaaaacacagctgtgaaaaggtactatctacggagtcctgtaactactgtaactattcttaggcatgccacccgtgtacccggcctttcaattctgttcccaagccagattttctcttagtttcctcccaccaatcccaaatagcttaatagagaagtcatttttattggttctatagcgatgctgtctactttctttcttagcttacatagtttatttacaattcacatcttgggtgcttatgcctgaatgtcttcactctttctctccaataatttctgtgtttcagatgaattcacctttgaagaatacaatgccccttgcagtgctggtaaagtataaatgattcaatctaatgccacttgaaagaaaataaataagcatctcagttaaacagtaaagtctaatcccaacttcaaaataaataagcatctcagttctctgcataaggctgcttcttgagaagactgtaccctttccatatcctaaaaaaaccctgatgtaccatgtataaattgaactatatcaaatgtattataaaatttctcagaaaaaaatgcaagttaaatacaattactggtgtctggggtgacttgtttgaagatgaatccaagaatttcccatatgtaaaaactaaattatctaacatgtagtttccattctatacccagtggtgatatattcatcccctatagcctttctaggatatttctaagtgtatactaaagtcaaaaaacttgtcactgtaattatccatatagcacagcatgaaaggtgtggtctataagaccttcctttaggctgattgacagggttcatctttgacatagaatttgccatgaaacctttgcttctccattttaaaatatgaaaacacggagaacatccctatcattaaaaataattaaaagttactaagttcaagtatttataactgaaatataaagaattattcttaagtaggtcacataatttccctttctcccttttcttttactacttagaatctgaataaagaaatgcttgaaaacagcaacttacggatctcattgggtgaacttctccagaaatgaagaacagactcatcaatagagaggacagtgagagaaagaagggaagatcattggaaatacacaaaatttgtatgttgaataaatttatggcatttayaactctaycttttcttttgttctttatcaatatcatattcacttttctgaatatgaatctattctccctagcatttattaaatcacagaaaagctatacaaagaggtacactcaaaaacactatagatgaattaaagcggaatttttaaaaatgtcaattaaaccacaaaaaggaaaaagaaaacagtttttccaaacattggaaacaacaaaaagttcatcagtagatgaatggtttggcaaccatacgacatagttctgctggacaaygaagaggaacaaacgactgacatacacaacgacttaagtggatctcagaagcattaggctgtgtggggaaaaagccaatctcaaaaggtcacaatctgaatgatttcttttatacaacattccttaaatgacagaattatagagacgaaaaacaaattcgtggttactaggggttacagagagtacgggagtgggatgggtgtgaccgtgagtagcattagagagtttttgtggtgatgaaatcctgcatgtgtggaagcaaaagtcctgctgcagatttttccatttaattccatctcaaattattttcttgtttattgggtggtgagcaagaaagtatctaaattaacttttttttccatgtagctttctaatagccctattaatattgattgaccaactcaatctttccctgctaataaaacatgcctcctttatcacaaattatcacgtatactaaggcttgtttctgaatggtctattctagtccattgagtacctggtctattctttcataaggattacaatatttgaattgctgtagcttaataaaatgttttaaaaactactgtggctgatgtcttttcatttctctgttttcactttttctttgcatcactgatttgtgtcctcaccaaatctcatgttgaattgtaatccccagaattggaagtggggtctggtggggggtgattaggtcatgggggtgaatccctcattaatgggttagcaccatccccttggtggtgttctcatgatagagttctagcaagttctggtcatctaacagtgtgtagcacctcccccacaccttgctcatgctcccaccacgttagaagccttgctcccttttagccttctgccatgattgtaagtttctggaggcctccccagaagcctagcagaggccagcatcatgcttcttggacagcctrtggaactgtgagccaaytaaacctcctttctttataaatcacycaatctcaggtatttctttatagcaatgcaagaatggactaatacaattactaagatcattatttgttcaagttaaaactctagaatcttttaagttcattatccccatagtcaactaggtattgtttggaattgcattgaatatataaatgtataaaaggttttaaggttatgaatatatraaaggttttaagcacaagtgtcaattttttgcatttcatcttccctattcagactcattttatatttattcaattcacatgaagcaaattctaattctgacttaatttctaattttggactgaagtaccaagttaaagattagcttcatagacatatatagtaggataagttgaaaaataaaacaacgtatacatggaggcaaacgattttcacaagatagtgaaaaactagaacaatatttctcatttgttgatggatgtcattgaaaggttttaagcaagataatagttcctatttgcattatggatagtcatcagaagacgggtgatttctgcatttccaactgaggtacctggttcatctcactgggactagttggacagtgggtgcagcccacagagggcgagccgaagcagggcagggcatcgcctcacccgggaagcacaacaggtcgaggatttccctttcctagccaagggaagctgtgacagactgtactgggaaaatcaggacactgccaccgaaacactgcacttttccaaaggtcttagcaaacagcataccaggagattatatcccatgcctggctcagtgggtcccacacccacagagccttgcttactgctagtccgagattgaatggcaaggcagcaagcctggctggggaaggggcatccgccattgctgaggcttgagtaggtaaacaaagcagtggcgaccgggaagctcaaactgggtggagcccacctcagctcaaggaggcctgcctgcctctgtagactccacctctgtgggcagggcatagctgaacaaaaggcagcagaaacttctgcagacttaaacatccctgtctgacagctctgaagagagcagtggttctcccagcatggtgtttgagctctgagaatggacacactgccccttcaagtgggtccctgacccccgtgtagcctgacttggagaccctcccagtaggggctgactgacacctcaaacagccaggtgcccctctgagatgaagcttccagaggaaggatcrgacagcaatatttgctgttctgcagsctctgctgatgatacccaggcaaacagggtctggagtggacctccagcaaactccaatagacgtgcagctcaggaaactgatggttagaaggaaaactaacaaacagaatggaatagcatcaacatcaacaaaaaggacatccacacaaaaactccatctgtaggtcaccatcatcaaagaccaaaggtagataaamccacaaagatggggagaaaccagagcagaaaagctgaaaattctaaaaaccagagcgccccttctcctccaaaagatcacagctcctcaccagcaacagaacaaagctggatggagagtgactttgatgagttcacagaagtaggcttcagcaagttggtagtaacaaacttctccaagctaaaggaggatgtttgagcccatcgcaagggagttaaaaaccttgaaaaaagattagataaatgactaactagactaaacagggtagagaagatcttaaatgacctgatggagctgaaaaccatggcatgagaactacgtgatgcatgcacaagcttcagtagccgattcgatcaagtggaagaaagggtatcagtgactgaagatcaaatgaatgaaatgaagcaagaagagaagtttagagaaaaaagagtaaaaagaaatgaacaaagcctccaagaaatatgggactatgtaaaaagaccaaatctacgtttgattggtatacctgaaggtgatggggagaatggaaccaagttggaaaatactcttcaggatattatacaggagaacttacccaacctagcaaggcaggccgacattcaaatacaggaaatacagagaacaccacaaagatactcctcaagaagagcaacgccaagacacaaaattgtcagattcgccaaggttgaaatgaaggcaaaaatgctaaggtcagccagagaaaaaggttgagttacccacaaagggaagcccatcagactaacagtggatctctcagcagaaaccctaaaagccagaagacagtgggggccaatattcaacattcttaaagaaaagaattttcaacccagaatttcatatccagccaaactaagcctcaaaagtgaaggagaaataaaatcctttacagacaagtaaatcctgagatacattggtgtgtccaagaagcatagtgccaaacagcagataccatctcacaccagttagaatggcgatcgttaaaaagtcaggaaacaacaggtgctggagaggatgtggagaaataggaacgcttttacactgttggtgggactgtaaaccagttcaaccattgtgaagacagtgtggcgattcctcaaggatctagaactagaaataccatttgactcagcgatcccattactggatatatacccaaaggattataaatcatgctgctagaaagactcatgcacatgtatgcttattgtggcactattcacaatagcaaagacttggaaccaacccaaatgttcatcaatgatagactggattaagaaaatgtggcacatatacaccatggaatactattcagccataaaaaatgatgagttcatgtcctttgtagcaacatggatgaagckggaaaccatcattctgagcaaaactatcacaaggacagaaaaccaaacaccgcatgttctcactcataggtgggaattgaacaatgagaacacttggatggggaacatcacacactggggcctgtcgcggggtggagggatgggggagggatagcattaagagaaatacctaatgtaaatgacgagttaatgggtgcagcacaccaacacggcacgtgtatacatatgtaacaatcctgcacattgtgcacatgtaccctggaacttaaagtataataattttaaaaaagaaaaaaatgatttattttcctctcatccatatactcatacctctttgaaagccaaacctgtatcttaatcatgtctgtgcagcctgttcacccaacacagtgctgggaargttgtaggcactcattaaaacaaaggggtgattaagtgtgtcagtgcctgagtragcgtattcctgtaggtagggaattagaggagaaatggagtaacactaaggtgttagcacacaccagtaggaaacatgagctagaaaaatcattttgactcgaacctggtttgagttgcttaatgtttcacaaacactttaaggaagaagattttgatattttcccaaagtcaaataaatgagaaggaaaaaaatggttatttattgggactttgagcaaaacttgtttgaaagtacattttatacattcagtgagctctacatgggaaatcatggcctctatcttgcaaaaggaactgttaacaattatcagaaaggtaaatacaaatgatctttgttgtagtttgatttgtgtccccaaaaaagatatgttgaagtcctaacgcctggtacctgcgaatgtcgctttatttggaaatagggtccgtggagttgtaattaagatgtaagttaagataaagtcatactggagtagtgtgggtccctaatccggtaggactggtgtcctgtaagaagaaatgatacgtgtacagaggaaaggtgatgcagacagaccacaaggaaaactctgtgtgatgatgggggcaaacacaggaacactaaggattgctcacaacaccagaagctaagagaaaggcatggggcagattctccctagagcgttctgtgggatcatgaccctaccaataccttgattttggactgtgagcctccacaaccaacagagaataaatgtatgttgtgttaagccgcccactttgcagtattttgttatggcagtcctagaaaactactataatctccaattaaaatagtatcttttcattcgttggccaagtttacttagcaaatttttaattgtcttttaagcagatccagatggttgggtggaggaagaatacatgttttacatatttccacagagtttaacttaacaatgaaaatgtcttggctgggcgtggtggtttatgcctgtaatcccagcactttgggatgtcgaggcaggtggaccatgaggtcaagagatcgagaccatcctgaccaatgtggtgaaacctcgtctctattaaaaatacgaaaattagctgggtgtggtggtgcacacctgtatttccagctactcaggaggctgaggcaggagaatcacttgaacccaggaggcggaggttgcaatgagccgagatcacatcactgcactccagcctggcaacaaagtaagactccatctcaaaaaaaaaaaaaaaaaagacaagaaaatatctcatataatttaaaataagcaaacaaatattaaaatctggcccagtgcagtggtcttacacttatagttccagctactcaagaggctgagggtggaggattgttcaagcccaggagctggagtccaaccagggcaacatagtgagacctcatctctatttcaaaaaaaaaaaccagataataaataataaaatctgagacgtggggttcagctttccatttctagacctctgtcatgcttagagcktatctcagaaaagacacatctctttgtgttcttaaagttctccaggaagaattttcttgtttatttctgtgttaataaggaaaattaaaagatgatttataataaaaaagcaaatctggccgggcgtggtggctcatgcctgtaatcccagcactttgggaggccgaggygggcggatcacaaggacaggatatggagaccatcctggctaagacggtgaaaccccatctctaccaaaaatacaacaaaaaattagccgggcgtggtggygggcgcctgtagtcccagctactcgggaggctgaggcaggagaatggcgtgaacccgggaggcagagctttcagtgagctgagatcatgccactgcactccagcctgggtgacagattgagactcygtctcaaaaaaaaaaaaaaaaaaaagcaagtctatgaatgaatgtttgggtgaagtgttgatttattcattttaatctgtctggcacacccccaaggcgaggtttgattattatttaatgcaaagtagaagtattgtaaaagacctttcttaggaatttttaaaacgtaaaggagtcacttaaacagcaataatatgagaaatatctttatgcattttacttaatagtctcagacatcttgtaaaatttaggaatgggaattaatgcaataacaaagaatattcaaggtactaaaggcaagggttctatgtggattcaaattaytgttgagcaaagttttgcctaagaaartctgtgccaagatttaatgtgtacttaatcagacaagatgaaacttgtcatttccagtaaacgatctctgattactcaaagtctgttcatatattaacaaaagactttcatcatcagtacacttgaataacacttggcccaaaaatactctttccacatcacagagcagctgaatgaaaacttaaattgcttctttgtagcaggcataaaaaagtaaaatattgaaaataaaagagaatgcctttgtcaaattgtataaagagtacttttctataaaatattttataattcatactgaggctcataggtaagtattattaactgtggtaactttctttctttctttctttctttctttcttttttttttttgagacatagttttgcccttgttgcccaggctggagtgcaacggcacgatctcagctcactgcaacctccgcctcccgggttcaagagattctcctgcctcagcaccccaaatacctggattacaggcacacatcaccacccccggctagttttatattttcagtagagacgaggtcaggctggtcttgaactcctgacctcaggcaatctgcccaccttggcctcccaaagtgctagaattacaggcgtgagccaccgcacctggccaactatggtaactgtctattttgacaaatttttggtaaaaacataatttgaaaaggataaaaccatgattcttaggcaaatgtaaaaacaacacacatgtcaaagaaataaccagtaggatgttattaccaattcaaagagcatattaaaaaactaacatatttgcatacaattaaacaaacaaacaaacaaaaaatctgttaggataagaatgacatgttatgtataaaactggttaatgttacaatatggtaaaaatcttaggtttctattccattggacagaaatgatttatactggtacttgataaaagtcaaaaagtaactttagtaagtttggaatctttatgataaataatgagatgaactaaggatattcccctagataatacttaagtgacccttaccccaaaatagtattgaaagaatgtactaccatcattttaccttatttttgagtttctgatactttttttcagagtctcccctcaccaaaaattgttcttttttaacttgtattttaggttcaagggtacatgtgcaggtttgctatatagataaattgtgtgtcatgggggcttggtgtataattattttatcacccacgtaaaaagcatagtacccaataggtagtttttcaatcctcactcttccattctccacgtgcaagtaggccctggcatctgttgtttccttccttatgtccacgtgtactcaatgtgtagctaccactaataagtgagaacatacagtatttggttttctgtccctgtgttagtttgcttaggatgatggtctccagctccatcaattttgctgcaaaggacgtgatctcattctttcttayggctgtgtagtattccatagtgtatatgtggcatgttttctttatccagtctaccattggtgggcatttagattgattccatggcttagctattgtgaataatgctgcaatgaactgcatgtatgtgcctttayggtagaatgatttatattcctttgggtatatacccaataatgggatttctgggtcagatggtaattccattttaagatctttgagaaatcaccaaattgctctccacagtaggtgaactaaattacattcccaccagcagtgtataagcattcctttttctctatgacattgccaccatctaatagccattctgactggtgtgagatagtatctcaatgtggttttgatttgcatttctctaacgattagtgatgtcgaatattttttcataagcttattggccacatgaatgttttcttttgagaagtgtctgttcctgtcctttgcccacatttttatggtgttctttgtttcttgcttgttaatttcttaagcaagttccttatagatgctggatattagacctttgtcagatgcatagtttgcaaatattttctgttttgtaggttgactgtttcctctgttgatagtttcttttgctgtgcagatgctccttagtctaattaggtcccacttgtcaatttttgattttgttgcaattgcttttaacatctccatcatgaaatctttayaagggcctatgsccagaaargtattttctaggttatcttccaggattttatagttttaggttttacatttaggtctttaatccatcttgatttgatttttgcatatggtgtaagcaagaggtccargttcaatcttctgcgtatggctagccagttattccagcaccatttattgaatagagtcctttcccccttgcttgcttttgtcaacgttgtcaaagattagatggttgtaggtgtgtggcattatttctgggctctccattttgttccattggtctggaagtctgtttttgtaccaggaccacgctgttttggttactgtagccctgtagtatagtttgaaattggggactatgatgtctcccgctatgttctttttgcttaggattgctttgggtatcagttgtttatcagatcaaggagcttttcggcagagatgatgaggttttctagatatagaatcatatcaytcgcaaacagggagagcttaacttcctctcttcctatttggatgccttttatttctttctcttgcctgattgtgctggctaagaattccagtactatgttgaattaggagtggtaagagaaggcatctttgtctcatcccagttttcaagaggaatgcttccagcttttgcccattcagtatgatgttggctgtgtgtttttaatacatggtttttattattttgaagtatgttcattcaatgcctagattttgtgggtttttaacatgaaagaattttgatttttattgaaagccctttctgcgtctattgaggtgatcatgtggtttttcagttcggcattctgtttatgtggtaaataacatttattgatttatgcatgttgaaccaagaataaagcccacttgataatggtggattagcttttttttggcatgcatttatttatttatttttatttccataggattttggtgaacaggtggtgttcagttacatgagtaagttatttagtggtgatttgtgagattttggtgcacccatcacacaaatgttagcggtagagagtatycaaggttcttggtgtcttgaacaaagaattggacaaaactcactaacaaagcaaggaaggaatgaagggttttattgaaaatgaaagtacattccacggtgtaagagcgggactgagcatagggacacaaaggctccattacagaacttttgggagtttaaataccctctacttggggtacaccctatgtaaatgaagaagatgaagtaaagttacaaagtcatttacttggcctacgccttatagagaggatatttcctgttatagctgaagtgtgaatcagccttatgttccctgcctccagaccctattttccagcctcacaaccagaatacaccgaacccagtttgtagtcttttatccctcacccatttcccaccctttcctcacaagtccccaaagtccactgtatcatttttatgcctttgcatgctcatagcttagctctcacttatgagcgagaacatataatgtttggttttycattcctgagtcacttcacttagaataatagtctccagtcccatccaggttgctgtgaatgccattaatacattcctttttatggctaagtagcattctatcatatatataccacagtttctttatccactcattgattgatgggcatttgggctggttccaaaattttgcaattgcgaattgtgttgttatcaaaatatcatcatcattcttcacagaactagaaaaaaatcctaaaattcatatggaacataaaaggatcccrcatagccaaagaaagacttaaaaaaacaaacaaataaaaacaaacaaacaaacaaacaaaaaactatggaggcatcacattacttgatttcaaactaaactatgaggccatagtcaccaaaatagcatggtactgatataaaaataggcatatagactaatggaacagaatagggaacctagaaataaacccaactatttacagccaactgatctttgacaaagcaaacaaaaatataaaatgggaaaaggacattttatttaacaaatagtgctgggataattggcaagccatatgtacgagaatgaaactggatccccatctctcaccttatgcaaaaatcaactcaaggtggatcaaggacttaaatctaagtcctgaaaccataaaaattctagaagataacatcagaaaaacccttctagattttggcttaggcaaggatttcaagaccaaaaactcaaaagcaaatgcaataaaaacaaagataaataggtgggacttaattaaactaaagaacttttacatggcaaaaagaacagtcagcagagtaaacagacaacccacggagtgggagaaaatcttcacaatctatacatctgacaatgaattagctttttgatgtgctgctggattcggtttgctaatattttgttgaggatttttgcatctatgtacattgagtgtattggcctaaagttttctttttttgttctgtctctgtcaggttttggtatcaagataatgctagcctcatagaatgatttagggaggagtccttcctcctcaacttttggaagtaatttcaataggaatggtaccatctcttctttatgtatctggtagaatttggctgtgaatctggtcttgggctttttctggttggtaggcattttattactgattcaatatcagaaattattatagctctgttcagggattcagtctcttcttggttcagtcttgggaggttgaatgctttcaggaatttatccatttcttataggttttctagtttgtttgcacagaggtgtccttagtagtatctgaggttcttttgcatttctgtggagttggtggtaaattctcattttcatttctgattgtacttatttggatcttctctctttttttctttattagtctatctagtgttctatcaaccttatctatcctttcaaaaatccactcctcaattcattgatcttttgtatttatttatttatttattttgcatcttaacttcctccatttaaattctgattttggttatttcatttctcctgctagctttggggttggtttactcttatatctctagttcctctagatatgatgctaggttgttactttgagatcttgtaactttttgatgtgaatgtttagccttataaacttccctcttaacactgctttagacgtgtctccgatattctggtattttctatctttgttctcattcgtttcaaagaatttcttgatttctgctttaatttcattgtttacccaaaagccattcagggcatgttatttactttccatgtaattgtatggatttaagggatcttcttagtattgatttctatttttattgcactgtggtctgagactgtgtttagtatgattttggcttctctggatttgctgaggattcttttatccaattttgtggacagtttcagaatatttgccatgtggcaatgagaagaatatatattctgttgttttggggtagggagttctgtagatgtctattaggtccatttggtcaagcgtcaagttcaggtcctgaatatctctgttagttttctgcctcagtgatctaatactgtcaatgctctattgaagtctactgctattattgtgttggaatctatgtctcttcataggtctgtaagagcttgctttatgtatttgggtgctcctgtattgggtacatatatatttaggatacctaggactttctgaagtcctctcataatgggcttatcatgcctgattaaatgagtattttcaaatactaacacacaaggtatactttaatataactgtatcgatgtatccaattatatayaggttaaaaggaaaacagatttttattaaataatgtaaataactacatgccatgaaaagtaaggagactcagtaaaagtattctttttttctgaattctaatggagtccacaaaaatcaggtatcatttaaaaatgtttaattcaacccacagatgtaaaatcttctaaattaagagttacatattgtataaaaagaaagagaaaggacttttttcgtatttattaaaaacgtaattaaaataatgcctaccatattccaaaaaagtaatcacaatttaatttttttctcagttttttttcagtcctagtaattcttcttttgtttgatcttgtgtcaagcattcttttttaaggaagtatgtttgcttctgaactaaaaagagtcttggaaatcctgcctcaagccactggtacagtctgaaagttgacaaaagaataacacctcagaggattcaattcaagggtccattgtttgaaatatcaaagttcacagtgtctaatagggttctttccagatgccttcagcaagcataaagaagcaacaatctgcttcataatgagattaatttattagtataaccaataatgtaagaatggaggagggcaaaattttctattggaatactaacaaaatgaataggaaatctatggaatgagagggaaaaaaattcaaatcatatatctgataatgggttaaatgggttaactttcaaaatatataaggaacccctacaactcagttggaaaaaatcaaatacctgattttaaaactgacttaaaaatttttttttaagattctatttttggaaggcaaaagcaagagttgccactggttactccattaaatagcattatatgcccaagaagtaatactcagttacacttaygtaatcaaaatgacaagcaaatattttaaaattagcattagaaaaggtaacataactgtaaagtcaacacaaagcagagagaaatattctagtgagtcatcaaataactgctatctggacggacgcattgcaacaaaaggtaagtaataatctcataacctttgttaagcactctaaaaacaatatgtcatttaaaaaaaagaaagtaaaattatttctgtataaatatatttggcagtaatcttttataaacctttaaattaataagccaattaaaattaagccaaaggtgacattagcacaaaaggcagagtaaggaactctaaaatacctccatgctcacgagttggaagacttaatcggataaagataacaaagatagtccccaaattgatgtacagattcaacacaattccatcaaaattacgaccgtcttttatacagaaaggacagactgattcttagattcatttggatattataaagattcatattagtcacaacaatgttgaagggaaaaaaagaactaagagcttttctactttctaattttgaaacttaccacacaagctgtagcaatctcaagacagcatggtactagcataaggatagatatatagatcaatggaagaacattgagagtccataaataaatccacacatttttggtcagtttatttttgaaaagggtgccaagaacatttaatggggaaaggataatattttcaacataaatgatgaaaaaaacaaatacccatatgcaaaagaaagattggagttggacccctaacacacattatatacaaaaaattaactcaaatcgattacaaacccaaatgtaagagctaaaataataaaactcctaggaggagacataggtataaatccttgggaccttggattaggcaataatttattaaatatgacatcagaagcacaatgaaccaaaaaatgttttaaattgtattttattaaaactaaaaacttctatgtgtctcaggacgctatcatgcatgaagagacaacycacagaacaggagtaaatatttgcaaattatatatctgataaagatcaaagatccaaaatatgtaaagaactcttacaattcaacaataaaaagataaacaattgaattaaaagatgggcaaaggaattcaacagacattcctctaaagatgatacataaatggtcagtaagcacatgagaatatgctcaaaatcattattcactaggaaaatacaaattaaaaccataaagagatacctctttatatccactatggctatcattctaaaaattaaatatagacagaataacaaatgttgccaaaaatgtggagaaaatgggatgttcatacactgctggtgggaatttaaaatgtttcagccactgtgaaaaatagtctggcagttctgcaaaaagttaaacactgagctaccatatgacccacagattcactcctgtatatattcccccaaaaaatgaaatcatatgctcatgcaaacacttgtatacaaatatttatagcagaattattcacaatagctaataaatgagaataactcaaatgtctatcaactgaggaatggataaacaaaatgtggtatgtccatacattggaatattgttcaatatcgttcactcatgtaaaggaatgaagtactatatatatgctacaacatggaagaactttgaaaacatcacgctatgtgaaagaagccacacaacataggccacatatattatgattctattaatatgaaatgtccaaataggtaaattcataaaaatataaagtagattagtgtttgcagagaatgcacgaattagtatttctacttgttgaaaataggaagtgactactaacatgtatgtagtttcttttgggggtgatggaaatgttccataatttcatagtggtaataattacataacaccatgagcatactaacagccactgaattgtacactgtaatgtaataaatgttatgtaatgggaatttgtgtccatttaaaaattgtaaaaaatagccaactatggaaaaaatttactggttttttttttcagattcaatgttataaatgaaggaaataatttcctttcctgcaaactttattgcacattcattcagattttctctttcactgtcccatttcacattctggaaaaatcagatattttaagacaaaactactcttttcctcatttggaaaacatttgtcctattatcttgcatagacagttatgttttttgtcactactgtttctaccatggcctcaactatacatattagttataacatttaatgaaagaaaataactaacataaaaaaactagaaaagatgattggctactttctttcttatacagtgaatcctaaaatggccttgaaatctggtaccagctcctctatgatgcagtctaagagcagtcttgccctcacagggacctaatgggagaaatgctcacaagtgccctggtaggctgaacttggtcccactgtggatcttaaaacagcactgtatactggctccaggccctctcatctgtgatttgagagcaggcctgcccactcagggacccagtgggacacatgcccattcatgaacccagaggcaggcctgaagacctgggtctcagctgtaggccctgaggcagccctgttacttggttctcttttctctcagctgcaatctggaccagcactgtctgcctaggaacctacccagtgacccagtaggagccctcctaaggacccagaggaagccacattcatccacatatctcgtaactagcctacaatctgtggactctaaagtagaccctcatcccagtgccagacctactgaccaaggtctaggaggcagtccaatttacccagggaacagacagaatctaagcctactagagccccagttaacaggcctgccaaccacagacctcactgttgacccagcaaaaccatgtgacctggctctacctccagttgaccacaattctggaagcaatcttgtcaatcctgggaacccaacaggaggatcctgaggatctttacctgtaaaaccagtctataaagatgggaaaaggtgtttgctccttcagatgcatagaaaccaatgcaaagttacacagataatgatgaaccaggcaaacataataccaccaaaggaaacyaatgaagttccagtaactaatctccaccccaaatggagatctacaaatttccccccaaaattcaaaataatcatcttaaagatgctcagtaagatgcaagaaaacacagatagacaactaaataaaattagaaaaacaatgtatgaacaaaatgagaagtttaataaagaaatagaaaccattaagaaaaaacacacaaaaattatataagaacagaactgaatattttaatggagagcttcaacagcaaacacagtcacacaaaagaaagaattagtaacttgaagacaggtcatgtaaatagttaattaaaggtgaaaaaagaaaaaaaattaaagaagagtgaagaaagtataagggacctatggaataccatcaagcatgcaaatacacatattatgggagtcctagaaggagaaaagagggaaatgagcagaaagcttatttaaaggaatactggaagaaaaatgtaaaagctagagtattggtggcaatatggggatacgaaaatcctcatgcactactggtagaattgtggtgtgatgcaaccattctggagagttatttgtcactatttagtcacttaagtacatgcctctcatacaacaatctcactcctgtgtatgcgtcttgcaagaggatttacctgtctcaaagggtatatgtaaaaagatatttatcaaagcattatttcctcatggcaggacaatagagacaatcctgtttttatcattaggagagtggaaacattaaacctcttggatgatcaccaaagagggctatactgtaataaaatgcaattaataaaatacatacatataaacatataaacatgggaggatgttttaaaactagcaataactaaaaagaataagaaacaggcaaggtctttttccaatactctttatataaaataaaaatacacacttaagactttcctttccagtaatggtatacaaggtaattgagaccaaacttcccacttaaattaggaatggttggttatatatatattcactggaggtattgaaaagcaaagactgtgaagaattatgaatccaaagttcagaagcaacatagcaacccaaaggggcaattctgtgtttaagggcactttccccttagggtatttaacagctccagaatatttggctgagagatttagaagcacattttaaagcctttagtaaataaaattgcagcgtctagagtccaaggctcatgaaactggggcaaggagatgttcctgatagaccctttacatattgtgttgagatatcaaactgatggtakaattcaaatggtccataaacatatgaaaagatgtgtaaagtcattaataatgaaaattaaggcaagatactgcttcactcatcagattgataaaaagtaaaatgcctagcagagtaaaacgatggtaaatatataataaactgaaaatatccactgttgcagatgggtattcaaatccatgtaatactctgaagagcaatttaccaatctgatagatttcaagatgtacatacatatatagcctataacccaatctctgctatataccctagagaaagtcttgcaaatatgcttaagtagacataccgtatttgtagcagtattatttgtaatgttgaaaactatgaagaatccaaaattcagcactaggggaatagagtaacaggttcggccacattcatacaatagaatgtcgtatagatggtcattaaaattaataaattttatcctcattatcaatgctaataagtcttaaaaccataatagtgatgacatattttacaatatgtgcataccacttatacatataaaatacaaaacacaaaattatgctatatattatttacataaatatggattaaaaacataaacacatcttgaagaatacatatcaacttcctaatcccacaacattggaagggaaatgagattggagagaattacaaaggaaactccaaccatatttgtcttgatttatttctttttttgggttggtggatctggtaaaaactggaaaagcttctagacaaattttaaaagagcrctaccattgccatctttcatttcttaagaagaaatgaccttaaacaaacttggcaagtgtttamttttattaaagttgggtgcatgtaaggtacgagtgtyttttatcttgctctctatatttgtgagtatatatatatataacatttcataatttaaaagaaattatttcattctatgataatgtgacaaaagaaacaaagatgtgaaataaaaactaataggaaggaatccactttcagcagtgtggccaggaatttgctctccaaagaagggatgattaggctgaaatatggagaaagagaaagaaagttgattyaaaaagtttcaagcaatacagtatgtaaacagacaccaatgtctgcagtctaaggatggcattaaayctgctggtggtttatatgtgatcatcattgtactacaagttctatgagagcatggatactgaatatcctgttcaatattgtattttcatcaccagaatagcacttagcacacagtatggctcaaaaaaaaaaatctcagataaagtcaatgacatggtttaagggactcaaacgttagagtgctcagacagtaacaaggacagataggatcaactaagaatctgatcaggtcaatgctgtgaaatagacaagtgtgatctttgataactcctttctaaaatctctttgatcttttatctcttttatctttcattgatcctctactcttgaaatccttattttatatcactttcttccaggaccatgtactcaatcaactgctaaaaaagaaaacccaaaaaccctaaagtctatagttataactcactcagtcccagaaatgaatctgcaatgcatgagctactatcatggtaacatgtccctgacattctttgtcagcatcctttgtcacctgcttgtaaggattttgaaagagatggagaaaggtaggttgaaggttccttatcaggaggtttgctgtcaaagctcattctaaatggaatacaaattttatcttccagacatgcctcagtacctatcagaatttagccttgagaaaaatgaggcaaccactgagagtaatgacccttttagggaatctgtgctcaattctgaactctattcagaggccttggggtggggcttgtttgtacatagtggccacataaagcctggtaaactcagctggtctccagggcgaggctgagggcagagagttggacacaaccctgagatttatccctcacaatgcggaaagacagacttcttcatttatgtcttgtgctacttcttatcctgctttctgccagtgactcaaactctacagaaccgtaagtctcactcaagaccccttcctccagagtgcgtttcagtctctcccttgtgtcttcgctttgccttcctttgtaaatgccacctttccactcattacaataccttccaaatataagaaattattccagttaatcccttgtttgtctttcatttatcctctattcttgaaatcattttttctacactgggccaatcagagtcataaatacgattagtcactaggaagcatgattaaataaaacactagatcccaacttcacagaacagttcttttggatggaaggcactgaatatagagatattcgaaatatatagtgaagtgcaacttaacatgtattgtaggccatatatatatatacagaaagtatagytcctttatttttcaatcatgtatcaagtcttcaccaacagcccccagtgggggaccaaagcagggaaaataattttaaccctatccagttgtaagttggtacaactcaataattgtaagacttcttttccacctctccccagttcctctcctctatagtgtctagagaactgtggtctccattaactcctaatagagaaaactgtcagagtccttggtctcaaagttctccgtccttcttggctactgtcagtctgacttctccttacttgctggcatgcactgttgaagtttagccatctggtttctcttgtgtgttcaggacccaacagtcctctctaactgactgtctcacttcagctgtttcatatcccatagaactcctacctttgcatcctgcctcaaatactatggctattgtttcaacacagcctgtgatgcagggtcaccttgcccctttgcagtccaggccatttaaggtccctggccttaacccagctgcctttacatttcttccagagaatggtgagaactcttgggtccaataatagcacataggcactgaggtgtcctggagaggttaaacttctacctctctcttgcatacccacactgcacttctagatgcctatcgtgtctcctgtattccagactgatacagggaagtcttcagagtcccaaatcgggaaagggataaggggtccctctgctctgtgtgttacccttatccatctaacacaaatagccttcttcaggccaaagcgcagaaagcagaaataaggagttcaatccagtaagtctcctgctttcctcaggctttttccttgcacaatttcctggcaaccggtaggggtacatttctcccccactatccctctacctcatctacagcagtgggctctactacttccagctgctctccatccagaaagcatatgggaatatgtggaggctattttgctttctgagagcagactgaatggataaagcgagtagcgtgtattgggtcagaaacattaagcaatttgtggttctggatgcattcctacactacattggaccatgctgccattgaaaccatccttttacgttgtgtctgccactgaacaaagaacaacaagcctcatgccctagttgtcacaagcagaaggggtgttttctccctttataaggagaaaacttaacttcatccctccagaattaacccttgatgtgataaatgtgagagactacaaargagaaccaatagccattctcccctgccttggggcagtaagcttcagaaagatgaaggtttcaggggaataaaatgaaaaagagaaaattaaaagttatcactttaatatttgctacatttagtccctgctaaagaggcaaatatttaaaatgcaaacattcatgattgagtaaacatatattaaaacattttagcagctcactaccaatgacatcttgggcaagtttgtcaacctggatttgttctgayttcaatatctgttaaaaaaatattaactgaactcatataaaatagttctttagaatatcaaatatatgtggaattaatttttaatcgtgatatcttttaggcttataatttataagaataaaaatagtaaataaattataaatatatatataccttcttattaagatcaaagaactaaaggaaaaattttttgatggggatgtaaaaaatgatacatttttattatttattatgctgttaaaagagcagtgatcaggagatcagaagcatccagataccagaaaaagattaagacataagagactagctgaatgactatcagtgagttactgaactgccctcagcttctctgctagagaacaaaaccttactactcatacagtaaaatcatctgaaacttggatgatttcagagtggccctggagattcatggcatatagttttgcccaggaacactttaaaacacatgtagcaagactggtgtgctggagcagactacatggaggatgaggggaccaaatttgagttccacattccacaactcaattatccttggattctctcctcctagtctcacacctattaattttgtaaagcaacaatattgggtttcttgtgtcaaattgcctgtccagaaaacaatttaaaaagtaagagtttatgttggcaatggaaagtaagggtagtaaaataatayaagaaaataatagtttttacttgcaaatttactctataaatggcctaaccctgcagatattgaatcatgaatcaytgaatcattaaagctttgaagagttacattttagtcacaatttactgattttactgatttggcatgggggcagggattttatccatctgttatggattcaagttttggggactgatgaggatctcatgttttagcttccatgaacatggagagtatcatgcatgtaccttacagcattgctgggaagattaaatggcttaatacagagacagcttaacaattcttgtcatgtggcagatgctcaaaaacagcaacaacaaaaacacattctctttcagcccatgggatttcagagtgtggagagattatattgaattggaggcttctggaaagtgacaggaaaatatggagtggggggcattagagacaaaggacactcatcaataaagctaaggccagaatgtgaggcttacacaaaaaattgcctgtgcctctgaaaaactgaaaactttcaacaatttaaataaaaaagaaaagacttttcaaaataatatgacttttagtactcatataaactttgttttgtttttttttgaaacagggtctcactctgtcactctgaaagcactggtgcaatcatagctcactgtagcctcaacctcgtgggcttaagtgatccttcttgcctcagcctcctgagtaactrctactacagccatgtgccacctggctaaattttttattttaatttttgtagagatgggggacctcacaatgttgygcaggctgttctcaaactcctggcctcaagtgactctcctgcctcagcctcccaaagtgccgggaactaggtataagccacttctcccagcctgaacctgtttgtttttttttattgaaaagataacctatccacccatgtgattcgaaacaaacatgtttataaacatggacatactaatattaaattattaatgttaattgcctcaagaaattgagcataaagggaaatgataataaaatacagtgtgtgtttgtgtagtgtgtgtgtagcagggagttgtgcatgtaaataattgacaaaattttcaaactcgttgataaaatattgactttgactgagctgtatctgaggagcctaagagaaacagcaaatactttttttcagtgttgctgatattaagaaaatgattttgcaatatagacatgtgttattttgtgtaatgatatatgcttactgaagttctttcagttgaatttctgtaaatctagtcacggtgttcattccaaagtgatgtttatctagacagattttaatgtaagtcctttttacaatgaataatcactcccaattttttatatatgtgtgtgtgtttgtgtgcgtgcacttttatggatatatattcaagaattcagattctttttaaaggtcaaagttaaagtttaaagagctcagactgctctttacagcaaggaatgcctgtgaaattgtaacatcttggaaagcaatctccagtgttgtatggctccagattgtgtggctgaggcatggctgatgagtaaaagataaaatttttgtgctgatctgtgacagaacctccattgacttagtccattgacttttagaataaaactgattgcaccaattaatacatattgttatgaaaacacmtttatggrtgaaaacgcttactatcatcagtttttctctaatttagacttcttcctttcccaggcagtatatggtgctggtcccctccctgctccacactgaggcccctaagaagggctgtgtccttctgagccacctgaatgagacagtgactgtaagtgcttccttggagtctggcagggaaaacaggagcctcttcactgacctggtggcggagaaggacttattccactgtgtctccttcactgtgagtgctacggtgccagctggctatccctgcttgatacattttattgagctctataggtcatggtgatggagctctggtgtgcgatcccaaggtatgactttaagaatgtagttaggacttcaggggccaggtgcggtggctcacgcctgtaatcccagcactttgggaagccaaggcgggcagatcacgaggtcaggagatcgagaccatcctggctaacaagatgaaaccccgtctctaccaaaaatacaaaaaattagccgggcgtagtggcaggcgcccgtagtcccagctacctgggaggctgaggcaggagaatggcgtgaacccgggaggcgaagtttgcagtgagccgagatcgccccactgcactccagcctgggcgacagagcgagaytccgtctcaaaaaaaaaaaaaaaaaaaaaaggaatgtagttaggacttcagaaaggactaaaaatagtgagttttcaactattaaggaacaaagcattttttaccagagtaaggaagaaatactcttctaaatttcattcctaaataataatcctattgcccacaaaaatttcatgacttagaggagttttctagttttgattgtaactgtctctttaaggatcgggctggacatttcctagaaatagatcatatgaaaatttcatgataaaaactttgcatgcaacataattttttgcacatgcaggataccctaagcaaacacctagtacctctttaaagttgcctaacttgggaaactcagctcctatgctctcccatattttttcagagatgtttctctccattgcttcagaatatacatactcagttaaaaggcatctaatttaataactagagctctaggtgaactccatggagatctgggttctattgatggccactcttactgataccattcctccatctcacattaatatcgtcactcttatgtctgaagaaatagtcacaccttccttctccttggtgaagctgaaggagagataggaaatagcaatgactgaagaatgcagagggagaagactgcacagttcctcagtagtaaaaaatcctttgctttttagctcccaaggatctcagcctcttcagaggtggcattccttagcatccagataaaggggcctacgcaagatttcaggaagaggaacacagttctggtactgaacacccaaagtctggtctttgkccagacagacaaacccatgtataaaccaggacagacaggtaagtagggaaattccactgtttggggcaacactgagaagggccacctgaacagccaaagtctccattatcctagccccgtagcctcctgtcttattacccaaattacctgctttatcatgtctgaatcttatcggagaactacttttccagtaagattccgtgttgtctccgtggatgaaaattttcgccctcgaaatgaactggtaagcatccactatctgtggtttgggttgtgggtagagtgggaatactcacccagagtgaggtagaaaggtacaagaaaagcgagaggatgaaagacacttgtttttgaacttggctccagcctcagcacagatttgcagtcttatacaaaacaaaaattgagggacaagagatgaggaagttctttctcttataacagtatttaatcagtctggcaatagctgcatttgttactctgaacacactgcattaagaatattaaagaagcatagaaaaaaggcactattcctattcatactttcaaggaatttatgattaaaaaagcaacaaagaattatgcttttatgaatatataggtatatacaatagaccatattataattttattatatattcgatacatatagtatagaaatatattatacacaaagacttttttatgctaattgaatttcccttttttcaacttaccttcaatattagtgcaaaggaacaaagctrcttttaataggtagaaaatagacaatgttgaaattagaagaaatattcttggtttacttkcaaccaaatgattctgggaattctatttctgttaggtctaaatcataatgacatataactctattaatatctatttcccaacttatgaaagtaagcagtatagtcatattattcactaggagaattttagtatccaaataatattaatacttaaagattcaataatatcattcaccaataataattttcagggaaatggcaacacataataataattattgaatatattgtgtatgctcatcctagaactatttaataatttccctgagatttttccagttctgttatgtttcttgttgaatttagctacagataatattcttcctcagtttgttgtttgatcacaagtctgaaattgtagcctttgctggaattctaatcacatctcttctttccttttatcatatagattccactgatataccttgaggtaagtatcagaaaaagtatcttataaggaaattagtgcttttagagrgtaggaggttctgataatactctagacagatgaactactttaaaaawtttcagatctgaattcctcctactcccagttgtcaggttgattgtattttctcttccttctgtatttgtctttccagaggcaatgctaattatcaccttcaaaatcatttgagttgctcaaggactattgtgactaaatgattaccgcccatgtttcttgtttcccttcagaacccaagaagaaatcgaattgcacaatggcagagtctcaagctagaagctggcatcaatcagttgtcctttcccctctcatcagagcccattcagggctcctacagggtggtggtacagacagaatcaggtggaaggatacagcaccccttcaccgtggaggaatttggtatggattatggaagatgaaaaaggcataacattttggttcctagagtgtgagctcacttagatcctttgaatttcctgtagatatgttgaacttgcagtagagtcagacttactgcttctaagaccattaggacggtgtgaacacagaagctcataagagcttgctgattttcagtagcaaattacgctttgccaagtatgaaacttcttgtttcagtgaaaccaccatcatttgttaacgtcactgagacccgctgtgctcaagaagtcagttagattctgcatgaattgttaaaccttaccatcttaaagttgatacattggaaagtaaatctaacattcagagtgttattttgggaaaaattatagacatactgaaattatttgtatttccaataaatgtttaccaaccttccttattcctattatctctattaacagtgcttcccaagtttgaggtcaaagttcaggtgccaaagataatcagtatcatggatgaaaaagtgaacataacagtctgtggagagtgagttacattgtttttatctaaaattttatattttgcctcaattttgagkgattatgtaggtacaaaattataaatttactttgcctcagcacttttgtaatattactcctttgacttctctttatttaacgacttactattaaaattttcaaatacataaaagaayagaaacacacttaattatgatttaacaataaacatctttccgtattgtttcatcatatattttgctttaacatcttaggataaatcacaaagatcatgatatttttctgtacatgcagtagtatgtacctctaaaatacagagacatygtccacttctgcgacaacacgatcacttaacaaaattggaagtaattttccaaaactaattgcaagtttacagtcaagtatcttcaattgtcctaaaaatggtctcataaagctgggtgttcgcacattggttttggttattatgactcctaagtaccttttctttttccaaactctctacaacggaaattttcaatcacgtgccaaagttaacagagaagtaaaacacaatttcatgtacctatcacctatttttaaaattgtaaaatttgccaggttctttttgtcccatttcctcctctacagtagtttttttgctctaatattttaaagcaagccataggaatctataaatatcttagaggtttaaaagtctataacctcctttttttaatgacatttcgctgaagatcatcagttggcctctagaagtcttgcttgcagaatctgcctgtttgttttctcatggaacattgaattaattatgcctaatctttcctctgggcaattttaagaggatacattgaatgttttacattgatctttttgatagaacaattgttcaataaccagaaatagtgcaatggtagaacaaattgtttaataacctgaaataatctctcccccagaaatttccactccaggaaatttcactttctccttttcttcatatgtataccataaatactaatcctgtcattgaggaaggaggatgcgctgatacgatggactaaaaatgtgacagagaaacctaaagatcacaggtcacaattactgggcaaaagccaatgattaggattttatagaagtgacttaaacataatataaatgatccagtgactgatgtcatgattatgaagggtactagactcagaatcggcagtgatgagtgtgcctcccctatcagaacttactgttttcactaggcattctgctgcttctctgtgcctccatctcttaagcagtagacagagggcatgaaccttacctatgaygttcctttccactgttgccctctgtgattacagatacctcttacagttccttttaacctgaagaagcaaaactgatagcctacaaacaaacagtcccagagggagcacgcagggtaaaggaatatgccagcctaaatattatataccagaaacaccaaaacgcctagatctctgcctcatttcagcctcagagcaatggccaaggagttatgtgtccaaattaatagtgccgtagtgcagatatctatatgttggagaagggcttcagaataagctgctttgattctatctttttatttgaagtaatttcagagccatttgcaaataggaaagaaaaccaatgtccaaaacaaaattattgtgtattattctgttacccattatctaatcagagaaaggactaatataacatgtgcacacacacataaccccactaattattttgtatttacatgcctcatgtgttcctaggcttctttttctccctctctctcccttctcttctctgtgcatgtgtgtcagtgcacgtgtgcgtgtgtctgtgcattttgtgttagatttgcttagttattatgtacttatttttattcaattcatcatctacatttgctcacttggtatacagaataagctttgatattattaaaacaaaataaagaagaatgatagaaaataagtaggttaaaaggaagaaacatttttttagtagacagagtctctcacccaggctggagtgcagtggagcaatcttagctcactgtagcctcaaactcctgggcttatgtgaatctcctgcctaaacctccttaagtagctaggactacaggtgcatgtcaccatacccagctaatctttttaaaaagcttgtagagattgggtcctgctatgttacccatgctagttgggaacttttggcctcaagcaatccttcttggcttcccaaagtgttggggttgcaggcatgagccaaagcacctggccaaaggaaaaacatatatatatatatgtttgcatatatatatgactgcactgtaccaccacattctctttgggattaaatatatatataatatatattaatatataatatataaatatgtaatataaatataatatatagataacttatataatatataatataaatatatataatttatatattattaatatttatattatatattatatataattaatattatatattatatattgtataatatataattatatatattatgtattgtataatatataattatatatattatgtattgtataatatataattatatatattatgtattgtataatatataattatatatattatgtattgtataatatataattatatatattatgtattgtataatatatataataattttatattatattatataatataatatataatataatatataaatatataatatatattatatttatatattatattatgtcatatattatatattacattatatattattaatcagtactctaataattaataattattttcaacattatacataatatatttatatataatatattatattattatatattatattattatatattattaagcagtactccaataattaataattattttaattaaacattaaaatataataattataatattatatattaaatatataaaaatatttatataaatatatatattcaatcccaaagagaatgtggtggtacagtgcagtcaagtttcaaaggttttaatggctaatatttttgagggagacattttccagacagctttctacttggtgggcacccagatgataaagatgtgtaggcaactctaaagagggacagttctgtggaggagtggtagtggaaaatgcaaacagccattctcaattcctgatttatttctcatgtaccagatacayttatgggaagcctgtcccaggacttgcaactgtgagcctgtgtagaaaattatctcgtgttcttaattgtgacaagcaggaggtctgtgaggaattcagtcaacaggttagtaggyggtattctccctcagtgctatcactgtttacraccagtgagactccattttactaactagaaagagggcatcaggacaagcttgtcgcaaaatatcccccaccaaaaaacgaatttctgttcttagtcaacaagattctcatttggacgactaactttggaggttacaaagcagatatgagtattaagttctcgaaggtcaattaacttacttaatgcaaaaaaaaaagttttcttgtcattagagacagaatagtagattcagtgactattgatctcaatcagtttgacatttattggttttggtatttttctcagcttaacagcaatggctgcatcacccaacaagtacacaccaaaatgctccagattacaaatacgggctttgaaatgaagcttagagtggaagccaggatcagagaagaggggacaggtgtgagtaatgaacgaatatgggaaataaaacaatagtttactttccataacaaaataaaggtcatttgtaagaaagaaattttatgactaaagtaayttctaaaagtactgactctttatatttttcagacctggaagtcactgcaaacaggatcagtgaaatcacaaacattgtatccaaactcaaattcgtgaaagtggattcacactttagacaaggaatccccttttttgcacaggtaagatatgttgtaatgcacaggtaagcaaagtatccagttgcacctaagcacaggacacaatgatgcagcccacacttggttagtgttatcagttaattaatatgaccaaaaaccatgaaaccaaggagaaatactttcctttctaaatatcactgatgaaacaaacagacacatactaaattattatgagaatcagagataatattttaatatgtagctaataaagatacttaatgtaatgtgacttagttgttatatcaaacctcttctttcatgcagtttagaataaatgatatttctatcatgacctgggcagcatcagaattttcagagtttgtaacatttatggctgtcagtgttctttttatatctgttgatctcttctgacataaataaataagtctttaattttaggcataggtattaaaataacatgcatttcatggttattattattatatttttatatgtttaacttatatattttaacaataataaagccaataaaatattaattttattcatattgataattaattttacctgttttataattagtaaattgagacatttggccaggcatagtggctcatgcttataatcccagaactttgggaggccaaggggggaggatcgcctgaggccaggagttctagatcggccctagtaacatagtaagactctacctctgcaaaaaaaaaaaaaaaaaaaaaaattagcagtgggctggtggcgtgcacctgtagtcccagctgcttgggaagctgaggtgggaggatccctcgagcccagaacttcgatgctgctgtgagttataatggcaccactgcactccagcctgggcaacagagaccagttgtgaaagaaaagaaaagaaggaaaggggaaggaaaaggaaaagaaggaaaaaggggaaggggaaagggaagggccaggggaaggggaagggaaaggaagggaagaaaacattctcatgtgtattttcttagctggtttgttgcaggagataataataacgttagtaactaacatttatggaataattatcgtacaccaaatatcttctaatgtatttttattattttaaattttttaaaaattgatacatcatagtatcaattttggggagtacatgtgattatttaatacattcaaataatttttgaagatccaatcagcataattgagatattcatcaccttaaatatttgtcctttttttgctaaaaattcaaattattctcttctggctatttttaaatcacaacagattattggaaaactatagtcgccctactcctctaatgtatttttaaataattatttaatcttcaatactaccatataaaggaggcacaactattatcccccttttaatgaaggtggaaaactgaagcgcagagaagtaacttttttagctagtagagttcagaacacagccaagcattctagcctccgtctatgcgaaaagggaaaaacagccagtttaaattcatttcttttattcttattccaagtgcatattaagtggcaagttgtagttattaaaaatctccctgactttggccgggcacggtggctcacgcctgtaatcccagcactttcggaggccgaggcgggcagatcacgaggtcaggcgatcgagaccatcctggctaacatggtgaaaycccgtctctactaaaaatacaaaaaattagctgggcggggtggcgggcgcctgtagtcccagctactcgggaggctgaggcaggagaatggcgtgagtccaggaggcagagcttgcagtgagccgagatcgcgccactgcactccagcctgggcgacagagcgagactccgtctcaaaaaaaaaaaaaaaaaaactccctgactttactggaaatactacaaagtttcatagataagctatgtaggacatgaggatccaaatggaaggaaacattttgtcgtaaatatgaaggtttggtggggtttttttgagggggaggttgttgttttagttatagcagcaaaagcatttgttcacatgagttcagtcctctctgggtgttgttcacatcaactatcaagtacttttcttctttaggtgcttctggtggatggaaaaggtgtgcccatccccaataaastcttcttcatytctgtgaatgacgccaattattactccaatgcaaccaccaatgagcagggtcttgcacagttttcaatcaatactaccagtatctcggttaataaactttttgtccgggtaagtatagaaagacaaatctctgaggacaaaggaaatgttaggaacagtgatatattcagaagaaatgtacagattgcatttaagagtaagaaataagaagatatctaactttgagtttacaaatttgaggataatagaatttcatgaaaaacaataaaggcattagaaaaggcactgcagaagtgcctgataatttcactatcattatctgtaacattttatatagtatgaaaaaaatcttatttgatttgggtcgtgaacaatatcagctgcttcagtaattcatgtactttgttttatgttattttttccaggtcacttagaaattttgtaaagtgatcacacacacacacacttaatatacactgtctaatgacgatgatcaaaagatttccctagctaaaaagttttcatgcttgttatctcaaagaagtgataaaagactataatttatggatttcagtgtcgataaataacatatacattatttctgtttctcagtttcacgtgttaactcagtttaaaaacatgtaatgatgtttaatgttttctatgtgatagacactcgctctccctaggatttaaaaggtgactaaatagtgtccctacactttaaaatttcctattttcatggagttaaaagatctgtaaattattagtatgatgtgtttatgcgcaaaaggtttttttaaataggaactttattatgagaccaaatagaagagtccacaaaatatgcctaataaatttagaaaaaaataagtgcactttgaagaaaagctaaggagcagttaccacaagggaaatagaattgtgcgcaaaacattatctgcaaggcttaaagtttcagaartcacataggtcttaaaggttggaagtcacaataatgataagaggcataaatgctaatttactaaggattactaaaaacaattttgaagctcataaggtaatagaatgttttattaatacaaaccctaattttaattaagccaattcatgaggtaattctaatatctgaaaaatcccttttccacttgtttgagttatttatcattctcatttttcctctagttctgaggggcaggaggaaaatgtcaaagtagtaatgagttagcagaatcagggcaaaagagataaatttgtggatgatttccttttaatatttgaatgttgggagactgaaaattcatttatttggctgtcgaccagtatgagggagaggcatagtgtattttagagtggaagacaccgttgtaacyattcattttggtgagaagctaaggtgamgaatttcaagacagtattctttctttgcttttctgtttactcaggttttcactgtgcatcccaacttgtgttttcactattcatgggtagcagaagaccaccagggygctcagcacactgcaaatcgtgttttctccttaagtggaagttacattcacctggagcctgtggctggtaccctgccctgtggccacacggagactatcacggcacactatacactgaatagacaggccatgggagagttatcggagctcagtttccattacctggtaagaatgaggccatggaatacaattgcagcttatcagtaggacaaaagtggtcaataggctcaggaatgtcaaaataaactacttgcacacagccaccttgtgttcttgttgtgcgtccttcattccatgagttttcttgaggytgattctctccagcacagacttgacaactgaaagtgggtcatgtggggaatagaaggctgagaactgtgtccagctcaagaaayttccttcactgttttttcatttcagatcatggctaagggagtcatcgtcagatctggaacccacactctgcctgtggagtcaggagacagtgagtatcctcagattcatctctccttgctcccctaacacatccttacccttccctcggtgacagttcataaatgggaaatcgtttccatcatcccttcacaataaggaggacacgcaggaaaatactcgtcttatgactctttggcattttaaaattcaacagtcaacagataaatgtgattgtctactctgtatcagtcactctgctaaggtacactagtttttcactttagtttgtttcttctaacagcaaaacaaagctcttttcaaaatctaagctgccttctatttatctccacccccaataaagtgtacattgattaaattaacattgcagagaagaaaaaagtaattatcatgggaaatgggaaggaagaaaggtgatagatttttttttcttgtgccaggccatgagtactttatatacgaaattggattcacttcaagaataaattgaggcctggggaaccaagatcgttttctattctaagtcaaataatctagaggttaaaccactgaaaagagaacccgtgaacatttttgtaattaacctaaactaagggaaacattttaccaatttccaccacacccctaagctaaacttaataaccattaggatttgctccatgcctaatattttctatttatgtagtttctcttcctgctaagctggaaaaattaaatattaatttttaatttttatttttcagttttgaaaattgaaacaattttgagaaagttaaaatttatgcattattaatcagtactctaataattaataattattttaattaaacattaaaaactgctgccagttttgaatatcagttttttcccaatactagtgtagaggtagttagatatggagaatggaccccactgtgtacattgttcttcaatttttgttgaataattttcttctaatactggtctatgtatcacattcacagaaataatcaaaggttttaaaacatttatttgattttttcttttataatattccaatttgaattttattcataacaggaagagtctgtatgaaaatctctatatagtaaaatgaggactagttatttaatcatttactttgtgaagatgccacaaaattttattgaaagtagctgagtcaacaattggaaaaaatttctctatatagctaattaaatcataattgtttcatcataaaacaattttaaccacatattttaatagttattaattaccgatttactcttcaccaaagaattatcaaaagcacttacacctctatgataaaagaacaaattttattcacaatttgtctaaattcaactttttaaaacttttcaaattgtccaagttgagcttcctcatattgttctcttttcacactattcttcatactgtccaaattattattacctaaattatttgcctatttaattttcagaattgagattttaaataatgaaatcttctcaaattttattatttattattatgtttaaaacttttattttaggtttgaagggttcatgttcaggtttgttatgtaggtaaactcgtgtcatggggtttgttgtacagattatttcgttacccaggttctaagcctactacccaataattattttttctgatcctctttctccacctaccctccaccctccaataggcctcaatgtcttctgctctccctcctcccgccctccaccctcagataggccccactgtgtgttgtcctctttgtatccattatgttctcatcatttagctcccacttataactgagcacatggaatatttggttttctgttcctacattattttgctaagaatgatagcttctagctccatgtatgctcctgcaaaggacatgatggcgttcttttttatggctgcatagttccatggtgtrtatgtaccacattttctttattcagtcttccactgatgggcatttaggttgattccatgtctttgctactgttcattgcaacagggttgcaatgaacatatgtgtgcatgtgtctttatgacagaacaatttatattcctttggatatatacccagtactgggattcttgggtcaaatgatagttctgtttttagctctttgaggaatcgccacactgctttccataatggctgaactaatttacattcccaccaagagtgtataagcattcccttttctccacaaccttgccaacatctgttattttttgactcttaataatagccattctgactgatgtgagatgataatctcattgtggttttgagttgcatttctctaatattcagtagtattgagctttttttcattggcttgttggccacatgtatatcttcttttgaaaagtgtttattcctgtcctttgcccactttttaatgtggtggtttgttttttccttgtaaatgtgtttaaattctatacagatgctagatattagacctttattggatgcatagattgcaaaagttttctctcattctctaagttgtctgtttactctattgatagtttcttttgctgtgcagaagctctttaggttaattagatcccatttgtcaatgtttgcatttgttgagattgtttttagtgtcttcttcatgaaatctttgcagttcctgtgtccagaatggtattgcctaggttgtcttccagagtttgtatactttttggttttacatttaagtctttaaccaatcttgagttgatttttgtgcattgtgtaaggcggggatccagtttcaatmttctgcctatggctagccagttatctcagcaccatttattgaatagggagtcctttccttgtgtttgttagctttgttgaagatcagatggttgtgggtgtgcagcattatttmtggtctctgcattctgtcccattgatttgtgtgtctgtttttgtacaagtactatgctgttttggtaactgtagccctgtagtatagtttgaagttgggtggtgtgatgcctcctcctttcttctttttgcttaggattgccttggctatttgggctctttttttagttccatatacatttttaaatagttttatctaggtctgtgaaggatgtcrttggtagttttataggaaaaacattaaatctataaattgctttgggcaatatgaccattttcatgatattgattcttcctatctatgagcatggaatattttttccatttgcatcatctctgatttctttgagcagtgttttgtaattctcattgtagagatctttgggcaatatgaccattttcatactgattcttcctatctatgagcatggaatatttttccatttgtttgtgtcatctctgatttctttgagcggtgttttataattctcattgtatagatctttcacctccctggttagctatatttctaggtattttattctttctgtgacaattgtgaatgggattgcttgcattcctgatttggcttttggcttgactgttgttggtgtataggaatgctagtaatttttgtacattgattttgtatcctgaaattttgctaacatcatttttcagcttaaggagctttggggccaacactatggggttttctagatataaaatcatgtcgtctgcaaacagggatagtttgacttcctctcttcctattctgatgccctttatttctttgtcttgcccgattgttctggtgaggacttccaatactgtgttcaataggagtggtgagagaggacatccttgtcttgtgccagtttttaaggagaatgcttccagcttttgcccattcagtatgatgttggccatgggtttgtcatagatggctgttattattttgaggtatgttctttcaatatctagtttattgggagtttttaacatgaagaggtgttgaattttactaaaatccttttctacatctgataagataatcgtatttttgtcattggttctgtttatatgaatgaatcacatttattgatatgcctatgttgaaccaaccttgcatcccagggatgaagtctacttgatcgcggtagctaagctttttgatgtgctgctggattcagtttaccagtattttattgaggattttcrcatcratgttcatcaggaatattggtttgcaaatattttgttgaggatttttgcatcaatgttcatcaaggacgtttggccagactattttttatgtgagtcccacttctcckcatgggggcaaccccacaacctgggactgcagccaccaccaccccacccccatcagggttttcaggctggtagcaactttacatttccctgggacggagctcacagagggtgaggctggctgccattttttccatcttgaagcttccgttgctgtaactttcaggttccgaagagcaagtagtgattagggtgtagcatggatcacctgcacagcacagctgacccactagttctttyagttgtgatgtgaggttaagttgagatctttctaacttttcgatgtggatgtttagtgctataagtttccctcttaacaccgccttagctgtgtcccagaaattctggtgtgttgtatctttgttcttactggtttcaaagaacttcctgatttctgccaaaatttcattatttacccaaaagtcatgcaggagcaggttgtttaatttctatgtaattgtatggttttgagtgattttcttcttattgaattctattttaatcacatggtagtccgagagtgtggagtgtatgatttcatttttctaaatttgctgaggatagttttatgtctgattgtgtgatcggytttagagtagtgccgtgtgcagttgagaagaatgtatgtgttgttgttttgtagtggatagttttgtagatgtctatcagatccatttgggtcctgtgctgagttcagatcctaaatttctgccttgatgatctgtctaatactgtctgtggagtgttgaagtttctcaatattattgtgtgggagyctgagtctctttgaaggtctctaagcacttgttttatgaatctgggtgctcctgtgttgggtgcatgtagattttgtttagttaggtcttctcattgaattaaaccctttaccattatgcaattctcttgtcttttttttttttttttgacctttcttggtttaaagtctgttttgtctgaaattagtattgcaacccctgcttttctctttttctttttttttaaattatactttaagttctgggatacatgggcagaacgtgcaggtttgttacataggtgtacatgtgccatggtggtttgctgcacccatcagcctgtcatctatattaggtatttctcctaatgctatccctcccccagccccccacccccgacaggccccagtgtgtgatgttcccctccctgtgtccatgtgttctcatttttcaacttccacttatgagtgagaacatgtggtgtttggttttctgttcttgtgttagtttgctgagaatgacagtttccagcttcatccatgtccctggaaaggacatgaactcatccttttttatggctgcatagtattccatggtgtatatgtgccacattttctttatccagtctatcattgatgggcatgtggcaacccctgcttttttctattttccatttgcttgacagatttttctcctttcctttatctcgagcctatcagtgtcattgcatgtgagatgggtctcttaaagacggcataccactgagtcttgcttcttcatctggcttgccactctgtgcctcttaattggggcatttagtctgtttacattagaggttaatattgagatgcgtgaatttgaatctgccatcatgttgttagctgtttgtcaacttgtttgtgtaactgctctatagtgtcactggtctgtgtacttcagtgtggttatgtagtggctcgtaatattctttcctttttatattcagtgcttctttctggagctcttgcaagttggatctggtggtaacaaattccctcagcatttccttgtctgagaagcatcttatttctccttcacttatgaagtttagtttggctagatatgaaattcttggttggaatttattttctttaagaatgttggccaggtgcagtggctcatacctgtaatcccagcactttggggggycaaggtggtcagatcatgaagtcaggagatcgagaccatcctggccaacatggtgaaaccccatctctactaaaaatacaaaaattagccaggtgtgatggtgcacgcctgtagtcccagctactcgggaggctgaggcaggagaactgtttgaacctgggaggtgggggttgcagtgagccgagatcatgccactgcactccagcctggtgacagagtgagactctgtcaagaagaaaraaaaaaagaaaagaaaagaaaagaaaagaaatgttgaacataggccccaaatctcttatggcttgtagggtgtctgctaagaggcccaccattagtctgatgggcttccctttgtaggtgacttgtcctttctctctagctacctttaacattttttttttcattcatttcaaccttggtgaatctgatgattgtgtgtcttagggatgactttcttgtgaagtatattttggggttctcttcatttcctgaatatgaatttggcctctctagctaggaggggaagttctcatggatgatatcctaaaatatgttttccaagttgctttcattatgctcatctctttcaaggatatcaaggagttgtagattcagtctttttacataaataatcccagatttctcagaggttttgtttattccttttcattcttctttctttattcttgtctgactgttgtattgcagaaagtcaattttgtggctctgagattctttcctcagcttggtctgttctgctgttaatacttgtgattgcattacgaaattcttgtagactgttgttcagctctgtcaggttggttatgttcttttctatactggctattttgtctgtcagcttctgcatcattttattgtgattcttagcttccttagattaggtttcaacattctcctgaatctcaatgaccttcattcctatccatagtctgaattctatttctgtcatttcagccatctcagcccwattaagaacccttgctggagaactggtgtgattgtttggaggaaagaagatgctctggctctttgagttgtcagagttcttgtgctggttctttctcatctttgcgggctgatgttccttcactcttagaaactgctgttgttttgattttttccttttatcctattcgatgaccttggaggtttgattgtggtataaggtgagttcagtcaactgactttgttaccagaagatttgggggcagtggaggcagggaggagcaaggctcagttcaggactcctggattgcatgctgtaactctggggaactggtatctggctccagctttgttctctggctccttgaggttaagaacatgttgcactgaagggaccaaggtgctcccagaccactggtcacaacacttccatgggtgatgtcagccaaagcactttgcaggatggtagcagtgggatccctcctcattcacatgtaccagcagcatggcagtggcagcgtggtggggtacacgctcatcagctgtggcagggtgctagcaggtgccaggttgctggcctttgtgcaggcattcatagcaatgatcatggcagtatgactcaggggattgggggatccccactagcaactgtgcatgcatttgcactgacggtggtgttagcatgggggtggggcactggtgggtgcaggactgtatgaaccttttgtgtgcattcatactggtggcagtgtctgtacatggctaggggtgggtttgtgtgttttgtgcctagttttgcactggcagctccattgcaggggcagggtgctggcaggggtggggttggcgagcttagtgcctgccaatgctctgatgtcagtggctgtgtggtaggagtaggggtgatggaggacactcacgctgccagcagtggcaaggcagggtgcacacacacacatgtgttggcaaattttattattaaaagctttaatttcctaccactattctttgccataaagtcaccayaattttttttctggttttatgacatttcaatctaccccactttccttgttgaactcaagacagtgataaaagggcttccttccttttagaaggggagcttatttcctttttgaggtctgagctaaaacttgatctgtccaactgaacacaaatatgaatggcataacactgccttaaggatattttaagcttcctttcttcccaaacttaagagctttgcagtataaacacatagtgatataaaayaagtaatgttaagctaaagtcaaatttgcatgaagttggaaaaattccayattctacgtagagttataacaatttttaattgagtgccaccaatctcaggctttaatataatcattttaaaaaagtaaattttggccgggcacattggctgctgcctgtaattgcagcattttgggaggattgcttgaaccgaggagtttgggaccagcctgggctacatagcaagatcctatctctacaaaaatatataaaaaattagccaaacgtggtgttgtgcacctatagtcccagctactggggaggctgaggcagtacaatcacttgagcccagaaattcgaggctgcagtgagctatgattgcaccactgcatttcagcctgggcaacagagcaagaccctgtctcaaaaaaaaattacatttatttaaggtgtacaacataacgttatgggacacatatagataataaaatgactactatagtgatggaaagtaacatggccatcatctcacctacttactcatttgtgtatgtgtggcaagaacagctaaaatgcactcatttgacaaaaatctaaaatatagtaccattttattaactacagtcttcatgttgtgtgttagatagctagccttgttcatcctgatattatactttgtaaaatattcctaagggtattagacttaatttttaatacatatggttaagaaaaaaataaaatcaattatagttcttctacaattctaattgtccttgtcctacattattttgagtttcaacaatgtcgagagactctgttatcctatgtattgtctaactgcaccaagaatatgttactggaaaagaacttggaagcacaggaatttaaagccatatagctgggaatctgggacaggagggatgtagagaaaaggaagacatggaaataataccagagagtatctgtcctttatgtacaggcatctcagaaacttttcagtcattaagtctctcgtggttttataattaccgttattcaactaaatgtgggccatctactcaagtccccagtggaccattcagaaaatggaacttttgttsttgcccttttgtagctacctggtggcccttcaccctgctttaaaatgtaaagtattttctgaagtgttatctggtaccatttaatgcttccagtagaaatataccaatgtacttataagagtttaacactgcaatgaaaactccaagaattaaatattcttttaggaagttcaattagtatgaacttttttttacatacagagctttttaaaagtcatatatgacaaaataaacttattatatcttacaaattatagctctatatttaaattgagaatcacctctagtctgaaatgtaaataaaatagttgtcacatatatatgcagaaaatttggagctactgatatttaattgatttaggcaacagttaagtggaatatcaaataaaaaagatgtgagtgaaaggaactttgttaacttctgctataattaaagttctgaagggagacattggcctactaatttcaccaaataactaatggcacatagagagactaagccattagaatgaatggacgcagttctcaagtggataagaccaagcaatagtgtccttatgacactatttttatgacctttttgtctcacttatgaccattttgtctcacttatgaccattttgtctcactctctccatgttccagtgaaaggcagttttgccttatccttccctgtggagtcagacgttgcccccattgcacgaatgttcatctttgccattttaccagatggagaagttgttggagactctgaaaaatttgarattgaaaactgtctagccaacaargtgagcgatttaacataaaattaaaagaacacaaataaatgatactgtaggtgccatctattttaccccagagaaaactaagtccagaaaagtaaaatgagttgcccaacagttcccaacaagtttatggcagacccaaatttctagggatctagtacagcactttttcaattacacaaagctgctaccaaataaaatacaatcagttttgtgttcatgatgctcttctctgctgattcagttgtgtgagtatgtaaaatgctaagactcaaaagttcccaaaacctgaagaataagtgtaaacacctagaattaccttatcatgtgtcagagataaagatggccatctaaaaatctaacaaggtatctatccttattctgcctcagttatctccttaggacaagactaagctaccgagaagctatattttgttaagattccccacttatgtaatagtcatgtttaaaagagtgagtaaattaatgtgtcgccaaagcattagataatttggatcctgtctaaatagaatcacttttgatcactggagtaggtaagcttgttataaaattaatacttgcaaacataagggaagtcatgtaccttttaacagatctaactatttatgtctctagagttgttgggatctgtgaaagtggtaataartgatttacaaattattttctatttttaaagtgaaggaaagttgtaaaaataggtttctgactgacattaccaacatagtcatatgaactgaatataagggtggcttaggaaatgcaggtgactgcaagatcacagaagtagggaaaacactggttgaygtttccttcatttcccacaggtggatttgagcttcagcccagcacaaagtcccccagcctcacatgcccacctgcaagtagcagctgctccgcagtccctctgtgcccttcgtgctgtggaccaaagtgtgctgctcatgaagcctgaggctgagctctctgtgtcctcagtgagtttccagtggccttggggaccaggaagggccattccagaggctcagatcaagaagcctctattagccctttgtcagatgagtaggttgcgaaaattttctcccattttgtaggttgcctgttcactctgwtggtagtttcttttgctgtgcagaagytctttagtttaattagatcccatttgtcaattttgtcttttgttgccattgcttttggtgttttggacatgaagtccttacccatgcctatgtcctgaatggtgatgcctaggttttcttctagggtttttatggttttaggtctaacatttaagtctttaatccatcttgaattgatttttgtataatgtgtaaggaagggatccagtttcagctttctacatatggctagccagttttcccagcaccatttattaaatagggaatcctttccccattgcttgtttttctcaggtttgtcgaagatcagatagttgtagatatgcagagttatttctgagggctctgttctgttccattgatctatatctctgttttggtaccagtaccatgctcttttggttactgtagccttrtagtatagtttgaagtcaggtagtgtgatgcctccagctttgttcttttggcttaggattgccttggcgatgcggrctcttttttggttccatatgaactttaaagtagttttttccaattctgtgaagaaagtcattggtagcttgatggggatggcattgaatctgtaaattaccttgcgcaccagcatggcacatgtatacatatgtaactaacctgcacaatgtgcacatgtaccctaaaacttaaagtataataaaataaataaataaataaataagcctctattgagagtaaaatataacagtaaaaatacgtaccacttgccgagtacttgatagtttctcaagctgtctcatataggttttctcacttaatctgcccaacattccrgagaataatagtcccattttaagattagaaaagtggattcagaatagttgagagatttgttcaagataagtggcacaagctgagatgtgattttgaaattctgaatctgcctgcaactttgattccttctatgacacagcttctatttctgtaaagaatcaaatcttaacctcagttattaatgtcttacagtgatcttaatgaaagctatattttgttaagattccccacctacgtgatagtcatgtttaaaagagtgagtaaattaatgtgttgccaaagtattagtttggatcctgtctaaatagaatcacttttggtcactggagtaggtaagcttgctacaaaattaatacctgcaaacataagggaagtcatgtatcttttaacagatcgaactatttatgtctgtagagttgttgggatctgtgaaagtggtaataagtgatttacaaattattttctacttttaaaaaatgacctactacacctttgttagcaatgttgattcacagactaaaattttaattatctgcttttgactatagttatattaattcatgggggtgacacttggcatgtcgtgatgatttatttattttattattattatttcaagcttactacatgctggatctattgtaaaagctggggaaacagaaggaaacatatcacagtccttgtccttagagagaggcaataaaaaaggatataggtggatcagcaaaataaaaggtgaacattggttaataattgccatttggagaaaatgatatctaatatggggtttttgaagaataattatcagaaggaagggaaaagttcagaaactacttgtctaacctatttaaaactagattactcgtgtttggaactttttaacataatgcaagaaaaaataatgttatgatttgatctttgataaaaagttatgagaaattttatagctttaactccctcatgaatcaccatttaaaagggtcaatcaacttatctgtttgggaggtattattacctttcaatgttggttggtaaattcgtaatatgaaattttcttttgtttattctagtttctacttcatgtctattaaaattttaaactgtgagataactatatctgagacccctgtcctatttttaattatcaaaattaacattcttcaggttggagcatatccactagtgccccctgatctgyaggggtgtgtcccaagaccttcagtgggtgtctgaaactgtggatagcactgaacccaatgaccatcagctggaacacatttctgttcctgtcttccacccacaaatttaatgccttttccatcttaacaaagcacttatcgcgtgctgtagccataatttttgtagtttgagatgtgacagcaaaacaagcatgattttctttttccttcttcaccatttgatagatagaagattcgttcttaccgtagatcttggcaacctcagcatacattattttttctttccttatcaagtggggaactttcaccttttcacctaaaggaagcactttacggcttctcyttcacctcccaattgccagcatcaatactctggtgcattggggccatgatgaagtaaaataagggtgacttgaacacaagcactgagatactgtgacaatcttgtaactgaggattctgggtgactaaggggcagggagtggctacagtgtggatccaccagaaaaacagaggattcatatcccgagcaagatgaagcaggaaagtgtgagatttcatcatgctgctcaaaatggcagcaatttaaaacgtatgaattgtttatttctgaatttgccatttaatatgtttggatcacagttgaccacagataatggaaatcttggaaaccaaaaccgcagattgggggattgctataatcaaaatttttcttgatcttgatttgtattttattaacaggtcaaaatatctcctcatagcgtaataattattaggcaagagacaatgactatatttctgtattttagttagaagaaacaacaagaagttaacccaaaacaagaaaactttctctctgagtgctttctttggtaatatgcctgatatttttacactctctgtttatggaagtctagtctaagctattaatttcagcatgtagtacaggaatttagtctacctttcaacagtttatgtctgtcttattccgtttagtcacataaatttaacagtcacttcagtaaggtttggtaaactttgagtgttgtggaagtgagaagaaactatgaacataactgaagatttcagatgataaagttatagaaacgtttaagcgtggtcgctttgaataataatagaaatcattagttcacccaatataaataatacatgttcatttatgtacctatttaattctactcaaaaacaaaggtaaataaagaagtagaaagggtgtttgcgttacctatctactgctgyataacaattttcttcaaaacctagtggcttaaaacaataaacatttattatcacatgcaatttctgtgagtcaggaattcagagcagcttagctaggtgggtctagcttgtgacctgccctggttgcgattaacatggcggccaaagctgcagccacctgacagcttgacagaggttggaagatctgcttccaagacargtttcttgagagctattggcaggaggcctcagttcctcaccacacagaggtcctagggctgctggtgtcccacaatgtgacaactgattttctccagagcatgtgatccaagagagctaatgcgttccaagagtgctaaacttgcaatatcttttatgacctaggcctgaaagacatgtcccctcatttccacaatatcccattggctacagaggtcaaccctattcattgtgcgacgaacaatgttcgggcatgaataccaggaggcagagattattgtgggcaattctggaagctgtctccacagcctgacctctgatccccagcaattcatgagctctcacatgtaaaatatactcgatcctctctctgagattctcattgtaaaataggaacagctsaaaggctaaatatcatttaaatcaggtccaagtacagataatgcctctcaggtgtgattcctcaggtacaatacctctagatacaaagacattgaactaaagtgtactcaagttatttggccccacacacttaacatgcaatggtggaactggcatagaataatcactattgacactcctgttcaaaaaaggggaaacaagaggcactcaggagttactcgtccataattactctgagatcaagcctggcaaatggaagttctctgattaagactcaatcttacatctgtccagggataaatattcaggcctctggccctgccctgtgggttcttgaatctgttgaatcatccattttccataaaaagtacactgcatagacattggtctatccaatataatggcataagttcatttatgtgcctatgtggttcttttatttttattttgaatatggactgcgttttatttatttatttctttcttcaacttttattttaacttcaggggtacaagtgcagaatgtgaagggttgttacataggtaaacatgtgccatggtgatttgctgcacagatcaacccatcacctaggtattaagcccagcatccattagttattcttcttgatgctctccctccccacaccctaccttctaataggccggagtgagtgttgttcccccatgtattctcatcattcagctcccactcataagtgagaacatgtagtgtttagttttctgttcctgtgttagcttgctgaggataatggctttcagctctatccatgtctctgcaaaggacatgaactcatcctttttatggctgcatagtattccattgtgtatatgtaccacattttctttgtccagtctatcattgatgggcatttagattgattccatgtctttgctatcgtgaatagtgctgcagtgaatatatgcaagcatgtatctttataacagaataatttatattcctatggctatacacccagtaatggaattgctgagtcaaatggtatttttgcctctgggtctttgaggaatcaccacactttcttccacagtggttgaactaatttacactccccacaacagtaaaaaaagcattcctttttctctgyaacctcatcagcatctgttgttttttgactttttaacagcagccattctgactggtgtgagatggtatctcattgtggttttgatttgcatttctctaatgattagtgatgttgagcttttcttcatatgtttgttggctrtatgtatgttttcttttgagaattgtctgttcatgtcctttgcccactttttaatgggtttttatttcttgtaaatttgtttaagttcctcgtagactctggatattaggcctttctcaggtggttagattgggaaaattttctcccattcttaaagttgtctgttcactctaatgatagttccttttgctgtgcagaagttctttaatttaattatatctcatttgccaatttttgcttttgttgcagttgcttttggcattttcatcatgaaatctttgcctgcgcctatctcctgaatggtattgcctagattttcttcaagggtctttatagttttgggtttcacatttaagtatttaattcatcttgagttaatttttgtatatggtgaaaggaaggggtccagtttcaattttctgcataaggctagccagcattcccagcaccatttactaaatagggaggcctttcctccattgcttgttttygtcaagtttgtcaaagatcagatggttgtaggtttgcggttttatctctgagttctctattctgtaccattggtctatgtgtctgttctttatcagtaccatgctgttttggttactgtaaccttgtagtaaagtttgaagtcaggtaacatgatgcctccagctttgttcttcttgcttagaattgtcttggcaattcaggctcttttttggttccatatgaattttaaaatagatktttctaattctgtgaagaatgtcaatggtagtttaatgggaatagcactgaatctataaaatactttgggcagtatggccattgtcattacactgattcttcttatgcgtgaggatggaatgtttctccatttgtttgtgtcctctatgatatccttgagcagtggtttgtagttctccttgaagaggtccttcacttcccttgttagctgtattcctaggtattttattctttctgtagcaattgtgaatgggagttcattcatgatttggatctctgcttgcctgttgttggtgtatagaaatgcctgtgatttttgcacattgattttgtatcctgagattttgctgaagttgcttatcagcttaagaatcttttgractgagataayggggttttctagatataaaatcaaataaagataatttgactttctctcttcctattcgaatacactttatttatttctcttgcctgattgccctggccagaaattccaatactatgttgaatgggagtggtgagagagggcttccctgtcttgtgccagttttcaaggggaatgctcccagctttttcccattcagtatgatattggctgtgtgtttgtcatatatggctcttatgaggtatgttccttcaatacctagtttattgagagtttttaacataaagggatgttgaattttatcaaaggccttttctgcacctattgagataaccatgtggtttttgtctttagttctgtttatgtaatgaatcgcacttattgatttgtgtatgttgagccaagcttgcatcccagggatgaagcctacttggttgtggtggataagctttttgacgtgctgctggatttggtttgcaagtaytttgttgaggatttttgcatcgatgttcatcagggatattcgcctgaagctttctttttttgttgtgactctgccaggttttggtatcaagatgatggtggcctcatagaatgagttagcgaggagtccctccttttcaatttttggaatagttttagtagaaatggtaccagctcttctttgtacctatggtagaattcagctgtgcatccatctggtcctgggctttttttggttggtagattatttattactgcctcaatttcagaactcgttattggtctattcaaatattcagtttcttcctggttcagtcttgggagggtgtatgtgtccagtagtttatccatttcttctagattttctagcttatatagacagaggtgtttatagtatttgcggatggttgtttgcgtttctgtgaggtcagtggtgatattcccctatcatttctgattgtgtctacttgattcttttctttttttcttctttattagtctagctagcagtctatctattttattaactttttttcaaaaaaaccagctcctggattcattgtttttttaagagggtttttcatgtctctatctccttcagctcagctttgatctttgctatttcttgtcttctgctagctttggggtttgtatgctcttggttctacagtccttttagttgagatgttaggttgttgatttgatatctttctagcttttagatgcaggcacttagtgctataaatttcccacttaacactgttttagctgcatcccagagattgcagtacattgtctctttgttctcattagtttcaaataacttcttgatttctgccttaatttcattgtttacccaagagtcattcaggagcagtttattcaatttccatatagttgtgtggttttgagtgaatttcttaatcttgagttctaagttgattgcactgtcgtctgaaagactgttatgatttcagttcttgtgcatttgctgaggagtgttttacttccaattatgtgtccaattttagagtaaatgccatgtggcaatgagaagaatgtatattctgttgaattttggtggagagttctgtagatatcaatcaggtccacttgatccagagttgagttcaggtcctaaatatctttgttaattttctgtcttaatcatctgtctaatattgtcagtggtgtgttaaagtctctcgctattattgtgtgggagtctaagtctctttgtaggtatataagaacttgctttatgaatctgggtgcttctgtattggatgcatatatatttaggatagttagctcttctggttgaattgaatcctttactattatatactacccttctttgtttgtttgatctttgttggtttaaagtctgttttgtcagaaactaggattgcttttttctgttttccatttgcttggtaaattttcctccatccctttattttgagcctgtgtctgtccttgcgtgtgagatgagtctcttgaagatagcatactgatgatgggtcttggctctttattcagcttgccattctgtgtcttttaactagagcatttagcccatttacatttaaggttagtatttttatgggtgaattagatcctgtcatcatgatgcttttttgcagacttgtttatgtgattgcttcatagtgttctggcctgtgtacttcagtgtgtttttgtagtggctggtaatggtctttcttttccaaacgtagtgctttcttcaggagctcttgcaaggcaggccttgtgttgataaatttcctaaccattcacttgtttgaaaagaatcttatttctcctttgcttttgaagcttagtttggccaggtataaaattctgggttggaaattattttcttttagaatgttgaatattggcccccaatttcttctggcttccatggttttggcagagaggtccactgttagtatgatatgtttccttttgtaggtgacttggcctttctctctaggtgyccttaacatggtttctttcattttggcattggagaatctgatgattttgtgtctttgggttgatgttcttgtggagtatcttactggccttctctgcatttcctgaatttgaatgttggcctgtcttgctaggttggggaagttctcctggatgatatcctgaagtatgttttccaacttggttccattctccctgtctctttcaaggatcccaatcagtcataggtttggtctttttacataatcccatatttctcagaggttttgttcatttcttttcattctttcttctctattctagtctgcctgtcttatttcagatagataatcttcaggctctgagattctttcctcctcttggtctatcctgctactgatacttgtgattgcattgtgaagttcttgagatgcggttttcagctccatcaggtcagttatgttcctctctaaactggctattctggctaccagctcctgtattgttttatcatgattctcagcttcttttcattgggttacagctcagcaaagtttattgttatccactttctgaagtctacttctgtcaattcttagcctcagcccggttctgtgcccttgctggtgaggtgtcacagtcatctggaagagaagagacactctggcattttgagttttcgttgtttttgaattaattctttctcatctttgtgarcttatctacctttaatccttgaggctgctgccctttgaattagatttgtgttaggtcttttttgttgatgctgttgttttctgtttgtttgtttgtttttcttttagcagtcaagccactctatcatagggctgctgaggtttgctgggggtccactccagaccccagttgctttggtttctcccrtacgtggaagtatcaccagcaaaggccatgaaacagcaaagatggcagcctgtgccttcctctagaaactccatcctgtgggggtactaacytgttgccagcccacatgcaactgttggaggtggctggagaccctcattgggaggtctcgcccagtcaggaggaatgggatcagggaccttctcaaagaagcagcctggctgctttttggtagagcaggtgggctgcattgggtgggatccttcctcacctggatcacctgtattctccaaagccagcaggttggagtggcagagtcaaccaaactgcagagatggcagacacccctgccccccaggagctcrgtcccagggagagatcaaagctctgtctttagaaccctggctggagtacctgaagcccccacagaaaggtcccactcgatgaggaggaatggatcagggtcccacttaaagaagcagtctgatcacaatctggcaaggcagctgtgctgcatcgtgggggaccgttcctcatccagaccatctgtattccccaagccttcaggctggagtggctgagtcctcagaaccacagagatggcacccacctctccctgcaggaactcaggtccatctcaggtggactccaacccactgccgtcggctggctgagattccaagacagtgagtcttaacctgtgaggtgctgtggaagtggggtccacaggatgatgctctttggctctctgaatttagcccccttcctagggatatatacaaacagatttcctgcctttccagggatcccagggccggattatgtaaaactccagggtttctgtgtgcctgagcwgctgctctgccaagactccacatagctttgtgtatcagacccaagaccctggtggcatgggctcacaagggtatctcctgatccatgggttgcagagatccttgggagaaatgtgatttcccaggcgaggtcgcacaatcactcaccgcttcccttggctgggggtgggggttccttccgttgccctcccccacctccgcccctgctgcttttcattgttctctgtggctcaagttgcttgcctagtcagtctcaatgtgagaacctgggtatttcagttgaaggtgctgcatttaataagctttttcattccactccgtaagtgctgcagaccgcagctgcttctaatgggccatctatacgattttctgtctgagaataagcctgagtagacatagatgtttaacaggtggcaataataatatgtagctaaattcctcagggcattatgtattaattaaacacagatgcaagttacgtcktctttctatatttggtctatttttacctctagactctacaatgaagttttaattaatccttcataayttaagattttgttaatctttggaagcattttcccaagtaggtttcatttctttataacaaaacaacactgttaaatataaggaaaatcttcaactatctctaaggtaccaactacatgaacgtactcaagaaaagattggtgataattattttatttctctcagttcattctatttcaaaagaaaagtaagtaacagttctgcctttgatccccccactgctacaggtatataatctgctaactgtgaaggatctcaccaattttcctgacaatgtggaccagcaggaggaagaacaaggacactgtccccgtcctttcttcattcataatggagccatctatgttcccttatcaagtaatgaagcagatatttatagcttcctcaaggtaaaattctcactacttattaacatgctggcttgtgagtttttgaatgttaataaaactctgtatctattcataatcttagtaattatgtagccttgcctctccatttttcagcagasaaaaatgaagccaataaaaaggttaaagtctcttgtraggatcacacaaaagctcagtatgtgagtcagggctagatctaacctctgcctattcatctggatactttttagttatatttaggtttttttwtttgcaaaccaaaaaataatgaataaagaataaaatcttaataatccataagtttagtaatttcactactctatatttactgtcaagtgtttcgccatagaattaatataaggatactggaattacatagagaagtctctaaggataatatgttttatatattctaatcaagcttacaagtagattgaacaattatttttttccaggggatgggattgaaggtgttcactaactcaaaaatccgaaaaccaaagtcgtgttcagtcatcccttccntgtctgcaggagcagtaggtcaaggrtactatggaggtaaaacagcaatttgcttttaattttatttcatgtccaacaatattactatgcccaaaatgctaaaatgaggtaatgtagccctatttccactttatacacacaaagaaaccaagattcaaattaattgtttcttgctgaggtgacttagctggtgatagctagaactgatcagagatttttttttagatacatccratacttcagggcacaaaatcagataaaatacaagattctgatgtactgtaagagagggaaaatgctgacaatggaaagaaagagtaattctgattatggaaacaggaaagacattcatagggatgctgtattttaaaaaacmtaaagaaggacaaagggcttcactggtgacaagaaacaacgtgaacatcacagaaatatctcataatccatggccaaaaccactattcaaatacagcagcctttttcaacacccttgaacttattaaaacatctgtcccatcaccaggtctacttacacttgaacactacccagccatttgtcatccctctctcatgaatccaactccctttttctccaaaatattcctgacatccatctgctcacaaatatttatatgctcggattggaaatcagatatcctatatgtgaagtgggtgtgtcatatctcctctctaagcctcaaatccttcattaataaattgaaggaatttgactaatggctcttcaagaccttgcaaaacgcccaataagataactaaatataatgcaccaacacaaattaagaactttgattgtttaaatagcattttctatgttccttggcatttaagattaatatccatctttaaatgagctttattattaagaaaatgacaccttttaaagggccatggactgtttaagtataccttcaatgatagcacaaatttcaaacaatttctcaaaaatggtaaatatgattttgtcttgtaactgagatgttatataaataacgagaataaagaataagggaaaggaaaatagccatgagatttacatagaacaaacttcaagtttaaaccattgaggtttggggggaaggaaatgttcttgaatttattaaattcaagatggaaaattgacggcatataataacactcaggaaaaaaagagcttctaaaatgtgtgatgaatacataacagggattgaaattagtagctataaatgaatcaggtatatgaggaaataaaagagctaagaaaactgaaatatcttgtgaaatttcttgataagaacttcaacaacatgaagccatttccatgactacagagaacaatgaaaagcagcaggggtggaggtgggggagggcaacggaaggaacccccacccccagccaagggaagcggtgagtgattgtgcgacctcgcctgggaaatcacatttctcccaaggatctctgcaacccatggatcaggagatacccttgtgagcccatgccaccagggtcttgggtctgatacacaaagctttgatgcagagactatgaaaggacacgtggaaagtcaagttgacagtaagagtaggaaggatatagccatggtccactaaatggagttgaaataacacataatgccatggtttgttaactgcaataactggaggagttggagggcccttgacatatccagtagaaaatggaaaatagttcatttaggtgcatcatccttttagatatttcaatatttaagataagagtgaagacagagaagacaaaacagtgagaaatcagagtcagagatagaaattgttaccacttggaaggacatggggcaaggtgtatgatattcactaaagaaattactactgatgctttcttcagtggagaaaactgttagggtgaaattgctagaaatatatttttccttgtaagtattctttcacaaggtatttctgaaatatcagatgggatacatggagggagatcttaaatcaaattcaattagtaagcatgatttcaggcacaacgtggacaaaattgctttcatgtctagctctccaccctctcacgttggtaaatgatttctttgtctgaaccacacagccattccaaatggaaatatctgtttttgacaactgaattgtttatttcagatgtcaaaaaataagtggaataaaatctaatgctctaatcttatttcccagagaacaacagttttgcaaagttccatacagtratttaaagtaaatttaatttatgtaaaagtaatttaatgtaaatcattaaattctgttcactccactggtaatttcatttttagtatagcaaccactctcaatgtctaaagagcattttacaattcctgctcagtttctctaagaatgaagcaatactgtctcaatttcaaaattggtccttcgccacaaaacccataaaactgtctccaagtgatctcrtttttccagcttccattcacatcaaattatgctatgtctaggatacatagaatttccacctttgacaaagactcctctcttttcagggaatgagggatcacaaagtatttcccaagttctacaacttctacaagacttttaggacagtctgagcaggaaaactgaaaattttgttctctaacgtctcacatgtgcaccatgaaattaatgaatgtttttccctaactagacaattttctcttactttagcaggtctaggagtagtagagagaccatatgttcctcaattaggcacatataatgtgatacccttaaataatgaacaaagttcagggccagtccctgaaacggtgcgaagctattttcctgagacttggatctgggagttggtggcagtgaagtaagtaactttactttcctccatttgctggaggggagggaatgtggttcctccaacattttcawttctaagacaatcttcctgaaaagttctgaataattatcttaacctcttcctctttaggatagacctaagtaaaatgcgcaattgcataggctcattaatacaattgtctcagtgctgagcaattctaaaataattatttctgatactgtcaaatagtagacatgagaactataaatattcagttctatatatactgcttaatgtcgttcagggagccttctgtaaatatcagggctggagcaggcacataaacaaatcaggctacattaatccagtggtctaattgttggtcatgattcttaaaaatgcttatttatgggattatacaatagcaagggaagttaaggactaaaatgaatcgcaattcaaatatttttattcaaagtacagacatgtgggatatgatcatttgttgataagggggagaggtaccattcagtggctttcattttcccaactcagatcccaggacataatctagtgttcacacgaatgcacactcgcatatacccttaagtggattcagttcttgacgttagctttatgcatattaattctcacttgagaaaaggtggcttacattcattatttctgttcttcacttgccctccyccccagctcatcaggtgtggctgaggtaggagtaacagtccctgacaccatcaccgagtggaaggcaggggccttctgcctgtcygaagatgctggacttggtatctcttccactgcctctctccgagccttccagcccttctttgtggagctcacaatgccttactctgtgattcgtggagaggycttcacactcaaggccacggtcctaaactaccttcccaaatgcatccgggtaaggaaaatgagggtgaacaggaaaggtgggtagaacaaaagattcctttgatcagtcagctactgattctgttcctgagactaaggataattcaagggattgtgtgttagcactgtgaataattagtgctatgcaaagcaggacatgatcagaaagataatacaatgatatatgtgctatgggtgcttaaatcacggctctctaagccacaccttgcttttctatttcttagcgcttgcagaattctttgctgcaagttaggttatatgccaggaacattcttgaagctgacacacaactcagctttctcagttccacgagagtcattmtccaacccgtcatcttgaaatctccaaaatatataattttaatttatcttatagcacttatctctttgtaaattatgtaatagtggttgtatatagatcatctttcttgtgacacaatatcctcaagatcgggagcctctcatctaccattcccagtgttttatgtcttgtatggattagacatgtaatatatgttgtaagaaataggagaagaaaggaaggaagaaactatgaaaatctacatagcagcagatagtattccctagggcaatatacaatcactgcttttccctttcctctgccactgccaagcctgcacgtccacaagctaccctaaggcaaatgccaaatcctcctaatacacaaccaatcttgatttgtatcattgccattgccatgcttcttaaagcatggatgaatctatgtgacatacatttttcttmcaaatcccaatttactgcagcatctyacacttggccccaattctatgtgttcrtgtcgttccatattctgatcatttctgtctctgcctcacatggggtgataggtcagtgtgcagctgaaagcctctccagccttcctagcttcccaaaatacaaagggagaagaatcctattgtatctgtggaartgagagacaaaccttgtcttggacagtgactcctaaaactctgggtgagtgacagtacccaaaagggcctatcaatcaacaaggacggtggctgtctgagtacttttttcatcatattctctcttttatttgccatagatataattctataaagttagttttttttcctatttctatccactatgacctcctcccactgttctcacccaagctagtccccagaatcactatcttggacattggctacttagtatacattaaccttgtgggtttctttttttttagccttattttctattctggacaactataagtttaaggtgcagcccttaaaggtgattggactatcaaagtggatactcatgttttcaatattccttgttttagggaatgtgaacttctcagtgagtgcagaggcaatgcagtccttagaactctgtggaaatgaggttgttgaggtccctgagattaaaagaaaagacacagtcatcaaaaccctgttggtggaggtaacatatttttgggagtccctaacamctgtaagaatgcaacaccgggcggtcactcttgagacaacaaagaaccattaatatcatgctcacacaatacatcctgtaagactaatggaatttcctgccctaaaagcattgcagcagacaacattgccagctattgtaaattttttttcacaaattatttgagtgcaatttccttttttttttttgagacggagttttgctctgttgcacaggctgaagtgcagtggtgcgatctcggctcactgaaagctctgcctcccgggttcatgccattctcctgcctcagcctcccgagtagctgggactacaggcgcctggctaatttttttttttttttttgtatttttagtagagacggggtttcaccatgttagccaggatggtctcaatctcctgacctcgtgatcctcccttctcggcctcccaaagtgctgggattacattgagcgcaatttcttgatctccacctctctcctaagattcacatatctctcatacccattagctttgatttactgcccttattatctcttcccattttctctctaccaccctccctggttcttcaatgttttatggatttgtaataattcaataacaagtaggatgttatgttctcacttataagtgggagctgaatgatgcaaacacatagacacatggaggcgagcaacatatatggggcctgtctgagagtgggagtgacagaagggagagcatcaggaakaatagctagtggatgctgggcttaatccctaggtgatgggatgatctgtgcagcaaaccaccatggcacacatttacctatgtaacaaacctgcacctcctgcacatgtccccttgaacttaaaacaaaagttgggaaaaaaagagtaggatggtaaacatcattcgtgtaaaccctacccatcaaagaaaggaatccatgtggttctcttgtcaccaggatgtttctatcttttctccttttctttcctttcatccaaggctgaaggtattgagcaagaaaagactttcagttcyatgacctgtgcctcaggtaagagtccatcttcataatcatagtgagatcaaaaccacaaaggggtataaacctcaagttacaatgcacattcattttatctcccagttttcagagtgttccatgaaagtcagcataatactaaatatttctttatgtatgttttacagatgaagacattgagcccaagagagcaagttaatgtgactcaggtggtacagacaggactaatacctgggctttcttggttcatacgtagcccttttacctggatagcccagtggctgctcactgacaagcccagctgcagaagcttagagtgtcccaggatgaggtagaaagagagcagggttggccgggtgtggtggctcacatttgtaatcccagcattttgggaggctgaggcgggaggatgacttgaggtcaggggtttgagaacagcctggccaacatggtgaaaccctgtctctacgaaaaaaacaaaaattagccaggcctggtggcgggcrcctgtagtcccagctacatggggggctggggcacgagaatcgcttgagccgggcagggggaggttgcagtgagccgaaatcacaccactgcgctccaacctgggcaacagagtgagactcttaaaaaaacaaacaagcaaacaacaacaacaacaaaaactaaagacagcagggtcatgataagtttgaatcccaagagatagtctctaaaacagctgctgacaaaacatatagcatttcctacccatctcactaaaaatgtgtgttttccgtgtagaaaataatttacatttaagttcatcatatcattaagaagtagttgtagcttttatacagaaccgccacattattagttctatgtccacagtgtatacagcactgtatttgtcatttgagaaggactaatttaaggtatattcatgttatctatttataaacatgggaatccattcaaatatagtgtaagggaggcagtaaaataacttgtattatcayggttataagtcttaatattgctacaaaagtggagagcgatagttcccccactaagtcttaggcttcttttagaaagctactgagcacagccatgcaaaaatatagttaaatgagaagaggaaggactctggaagtcacacagtgccaaaagcaattagactatcaaaggtagtctcatcattaagtcaaattcttattccttgcacccagagttccacaaggagatataataatattactgctaactctaataataaaataactgcaataataacaattgctcacattcgttgaaattgaatatgttgcagatactgttctgaatgttttacatgtgttttttcctcaaatcatcacaatttacccaaggtcacaaagcagggccagtaccatatccagggagtgtggctctgaagctctcactacattataatcactaaattatattgtaatcatagatgtcctcctttaacatgggctgtctgtttctaaaggtgctaatgtgtctgagcagttgtccttgaagctcccatcaaatgtggtcaaagaatctgccagagcttctttctcagttctgggtgagtcaccttccatttagtaaacctgggccaaaagagttgccactgtacatcttatctacgtatttgtatttgaattatcaagttcttgatagctgctattcttttttwtttttttgagatggagtctcgctctgtcgcccaggctggagtacagtgacgtgatctcggctcactgcaagctccgcctccygggttcacgccattctcctgcctcagcctcccgagtagctgggactacaggygcccrcyaccacgcccggctaatttttttgtatttttagtagagacggggtttcaccgtgttcaccaggatggtctcgayatcctgacctcatgatccgcccgcctcggcctcccaaagtgctgggattacaggcgatagctgctattcttattaggattctggaagtcacactctgtgtatataacttttctcttacctaaatgatagactctgaatataaaggccatttttgttaataatgttggctatttatgaactgaaattattctgacatctaatctttcacattccccaggtgacatattaggttctgctatgcaaaatatacaaaatctcctccagatgccatatggctgtggagaacagaacatggtcctatttgctcctaacatctatgtcttgaactatctgaatgaaacccagcagctgaygcaggagatcaaggccaaggccgttggctatctcatcactggtaagtgagacagagaaaaatttactttgttactctartgaaacttttcccaattaagcttcagttatatcatcaaatattaacccatgatgataatttttatgaaaacaacaatcttcccacactctaataggatgttgtgtttgatctatccataacattcacaaaactatggcagatcacagaaggtcataaaatgtccatggcgcctggatgcatgagcctaaacatatggatggcctgcctttctttaatgcttcatgaacaatctgaagccttccatttcaggttaccagagacagctgaactacaaacaccaagatggctcctacagcacctttggggaacgatatggcaggaaccagggcaacacttggtaagaaagaaaatctattctgagtttcaactatgagttcagaacgtgcacatagattacctgtcttagtccattttctgttgcttataacagaatacctgaaactaggtaatttataaagaaaagaaatttatttcttatagctatgaaggctgataagtcaaaagtctaggggccgcatctagttgagagtcttcttgctggtgtggactctgaggagtcccacggtgatgcagggcatcatatgactagaggattgaatgggctcacttgggtctctccttctcttcttttcttttctttgttttactttgtagagactgggctagcatctcctcctcttcttatgaagccaccagtccaactgtcatgatagccctttaatctaggaatagattcatccattcatgagagcagaaccctcatgagccaatcacctcttaaaggctccacctctcaatactaccacattggggattaagttttaacatgagttttggtggagaaacmatttctaaaccataatgttaccttatttaattcttatagctaccctgggaagtgagagttattagcttcattttacagaggagaaaacatattcagtgtggataaataaatgtgtcaggagcaaacatctaataagtggcaaaattgagaacacttttaggttgatttttttaatccaatatacccagaccctcttccttctcatgttgctaagggaacattataggtttgtaacttgcccccttaaattgttgctcagccctaagaggtgttagaaaaatgctagaataaaaccacaaccattactggcagagcataccttactaccttctactagatgatatcctttctctctctctctttgtagttttaccacacaggcaaacacaggggaaaaaagtggaagggcaggatgatggagggaaatatttactgaagcagaacattagaagttagctgattagagttaaaactacagaaagtaagctaagaaatctaggaaaggaaataaattcataragcccacagtgtaaaagcaaatgacttagttaaccaaccaaraaaactggaaggaacctgaacctctgaagtggcataraaatgctttaggaagcaaggacaagctggtaatgaattgaacaacatgtggcagcaaaaaaaaaaaaaaaaaraaaagaaaagaaaaaagaaaaagagatgtctaagctaaaaagaaaaagtctccaaactctcagtaacagctrattgactttcttgggkgcacactgtgatgsgggagcctgtgtgtacaaaacagagcagtaaagtgctcaatgaaaagagcctcagcactgcatttttcctccccctaggctcacagcttttgtactgaagactttcgcccaggctcgatcctacatcttcattgatgaagcacacattacccaatctctcacgtggctctcccagatgcagaaggacaatggctgtttcaggagctctgggtcactgctcaacaaygccataaaggtgaactgttccacaaacttctgagcctgacacacatcaacataacatcccccaggrgtgaagggaggaaggaggcacaaggaaattgcaaagatgaagtcctggatgatgtgggatggcatcagggaaagagtattacactttctacagagaaggaagaaattgggccagatgcagtggatcacacgtagaatcacagcactttgggaggccaaggcaggtggatcacttgagcccaggagtataagactagcctgggcaacatagcaagacccagtctctacaaaaaacattttacaaaattagccaggcatggtggcctgtgcctgtagttgcagctacttgacaagctgaggcagcaaaattgcttgagcctaggagcttgaggctgtcatgtgtgatagtgctactgcactccagcctgagctacagagcaagaccctgtcgagaragagagagagaaggaaatggtatactttgaatggaaacagatactgaggagcgtttccatcaaacaacagaagagaatatactaacacttggcactggaattaatcaaatcaatgttgtattcacagggaggtgtagaagatgaagcgaccctctccgcctatgttactattgcccttctggaaattcctctcccagtcactgtaggtaccagctcaatcccattccctaccatgaaaactgtagatttgctgtctggaatgccaccctgctaagggttgagtctcaagtatcttttggttcaatgatgagggatttctcagactgataagctctttggttgatgcattaagagagatttacacttgcccagtaatgcccatagactatgtatcaaaaccaatcctaaaaacasgttctctagtcttattctttaagactgaactataaagggaagagatcgaaatatttttctatttaaatatgatgaatatctagctgtctgcctatctgtctgaaatctattaataacatctgactgtcaatatccagctctcggcttgctctgccytctattcaccctagtttgacacaaccacattttgcctttacagaaccctattgttcgcaatgccctgttctgcctggagtcagcctggaatgtagcaaaggaggggacycatgggagccatgtctacaccaaggcattgctggcctatgctttttccctactgggaaagcaaaatcagaatagagaaatactgaactcacttgataaggaagctgtgaaagaaggtgagagcacttataagtgggagctgaacaatgagaacacatagacacagggaggggaacagcacacattggggcctgtctgggaggtgcggagagggagagcatcaggatagatagctaatgcatgggggacctaataaccaggtgatgggctgatacatgcagcaaaccaccatggcacacctatgtaacaaacctgcacatyctgcacatgtaccccagaacttaaaataaaataamatttaaaaaataaataaataaatagataaataataaaagtttttttaaaaactgtgcaaaaaaaggtgagagcaaacagcaaatggtaccaaatttccatttccatttacactgattctacaaaaagaagaaatatattccttctgaaatccacaagcttcatctgtaattccttagccaagtcatacattgtgagatcagagcacctcttataaaactgtcttctctgggattgcatatgttacacagagcagaacataatagacataatgctgcagataaataatgcagttttatttctacttgctaaaaccaatataatagacaaatagattcattttctcatgatttctctctacttacttgaatgaaaagaggtacaacagctcttccataccccctaaattcccacccaatgccgtcctggctgcaccatgctcacttcatgctctgggcttctcctaagctagtgctgctatagtctcctttcagctaccatcataattatctaccaggatctcatcagccacgctgagatgttctctgacatttacaagatccagagatggaggaaggactgtgcctggaggtggaggggaagatggtcagtaggacaaagggtgacattgatgactcgcttattggtggagatgccttcactgaagtttcccaaagcgaaggtactggaagcagagtaatcattggtgttgatattgtcatgaacaatcacttgcaggaactgacttcacaaaagaagcctacaagaagtacatcaaagctgacataaaatcaaagacaaacttaaagaacagagaccagaaacagtaaaaccttttataacaggagctgcagaacaaatcaagcacactctttctaatctcagaaactaccagttcttcatttgatcttagccaaaaggtcaagaagcaataaaaactaccagttctttattggtgaaaacatgaacccatatggcatggtgcctctgctggactaccatgaggatggtgtgactccatagatgattttccatggtttagaaatggaaaaatgttaacaaatttggcagttactttggatgtatcacctgtcataactggcttctgcttgtcatccatacaacaccaggacttagacaagtagaactgatgtcatcttgagatcttcatttattttgaccatgatttatttggagcagaggcattgtttttaaggaaaaaatgtcatagaggttgtctaaaaacaaaatgcattcaaactcatttgaaagagtgtcatttagtttagtacatatttaaactcaatctatcttgtagtgttcttggagaaactagagtctggttgtagaccactactagaaagaacacaactgccatgagataacttctacagtggaaactatttctgagtatggagtacaaaaacaacaacaacaacaacaataacaacaacaaaaaacaaaacaagaatcaaaagttttaattctgagttgaattagcaggaaagaacatgcttatagcagtgccaacatttgaagtggtgccttatacatttcatcacctacaatggaagtagttaactctggaagaggttacaaaacaacaaaaasggactgattcagttggagagaaaaaaaaagaaagaaaagaggtacaacaaacagaaaatgcaataacattttcaaactatttttatctctatttgccagagagagcatcacaaaagtcacatgaggtcaatagttaagttttatattctagtctatactgcaattctcagaaaatatcacgaacaataaaagaactctctctaccacttttctctttcatcagtccaactaaaataacattggagagattggtgagtatgctctatgcttcttcctccatcaacctaccctaccttcgtaccacaggactaaatcaagttcagcatagaagtgtgagttagtgagttttaggagtttatgacatagaagaccttgcttctcctgtattattttcagctccatgtattatgaatgtgcattctcttatctaccagttataattacttattgatgagttacaattatctcctttttctcacccttaagacaacctcgtccattgggagcgccctcagagacccaaggcaccagtggggcatctttaccaamcccaggctccctctgctgaggtggagatgacatcctatgtgctcctcgcttatctcacggcccagccagcccccacctcaggggacctgacctctgcaactaacattgtgaagtggatcatgaagcagcagaacgcccaaggtggtttctcctccacccaggtcagtggttcccaaagagtcttctgctccaggttcacttggcaattgggaggcttaaaagtagaacagttaatggaaaagagaaggcaattattaaatcattgaagaagtatttaggaatatttgaggaccatgagaatttaaaggaaagacttaagacatcccccataacacttttcactaagccctatgttaatatattagcaacatggagacktacaacgagcatctttaccctctaaagccacgctatggtcattggacacattctagaccagagtttttcagcatcaacactattgacatttcgagccacatcatcgttgtaaaaggaactatcctcagccttataaaatattcaatagtatccctggcctctccccattagatgccagtagcacgtcacttccagttgaaacaagaaaaaatttcctccagttgggaaccaatgttccagacatcttcagaatctaacaagaaatcctctaagatgtattccccaaaaaatgtgtgattaaaagtacagtgactaagtagaatccactttgatctttttggaatgagaagttccatttcaactactccaaggaactcagcttcttcattcctttctactttccctgagagtgctcttcttactttctctttaagttgatcttttttaagctgaagctcttgaaaatgtatttttctagcataattctaaaagtattttatcgagagtataaatgattgtattaaacacccagagtgtctggcttttccctcctacatgtcttctttcaacagttaggatctccatagtgaaacttttgtttttcagagagattaggtggggtaaataaaaacaagctagatgaaggtaaaaagaaactcaagaaagtgcaacttgtctcataccattttcatgtacagtaaatttttatcactcttccatctaactggtcaatcatctacttaaaaatggtcactatttttgtcttaacttcttagttttagacctattctttgaaggacatatccaaaaggactgtcaatgaaaataaacagtgacattaataaacattattagccttttatttcatttggagaaactgcagcatgattttgataatgtctgaaaggcagagaaaaaggaaaggtaattagtgaagatctaccttaggggtaaaaagccagcttccctcatggtaggctaacacagactttgggggaaaatcccagaygccaaaaatttactctttggggcggttgtccactcgtctcttccaggacacagtggtggctctccatgccctgtccaggtatggagcagccactttcaccagaactgagaaaactgcacaggtcaccgttcaggattcacagaccttttctacaaatttccaagtagacaacaacaacctcctattactgcagcagatctcattgccagagctccctggagaatatgtcataacagtaactggggaaagatgtgtgtatcttcaggtagggctccaagcttatatgggtgagartcaactttaaacttgccaattgaaatggaaactctgttccttccttcctgggaaagtaaaaggcacctctggagacgttaagtaatgaggaagtgaggggtccagaaaaagagagaaactgatagtgtctttgctgtttcacagacatccatgaaatacaatattcttccagagaaagaggactccccatttgctttaaaagtgcagactgtgccccaracttgcgatggacacaaagcccacaccagctttcagatctcactgaccatcaggtaagacgttctaacctaatcacctatctttggcccaaaagcaacttggaattaacagaaattaatagtccatttggaagctatgttattagattaatataatttagaattgatatatctataaatgaatttaggcttttatcattatgacgtgatcctttctctactaaaaatataaaagtaatatatactaaataacaaatgaactgtatagtgaggtgtgcaaaaaccatagatatgttaaaaatgccaattagcaagattcactaccaaagattttgatttgatagttttggggtgatgcttaaacatctgtaattttagcaagtggtagatctgatgtatatgcatgtgtccaatgtcagtgttgcacaagtccagggaacacagacctttgtagaatattagggacaacttcttgaagacagacaggcttaaagtgatgcttgaaagcagaaatttggctttctttcacgtataaaaccctaaattctttttcctttgacactacagttacacaggaaaccgtcctgcttccaatatggtgattgttgatgtaaagatggtatctggttttattcccctgaaaccaacagtaaaaatggtaggtgtattttaatcctaatagacttcatacaaaagtatgttctgtatccccaaactaagaccataccaatatcaaaaccatgtcaacatcatcctgcctcaaaaaaatatttttcccaaacccaggaagtaaatgaactatttagttggccgtaagctaagggacatatgtgataccagagaaatgcacaaggagtacctatccttaggccactcatagtttagtcaggaatttaaagcacatgggcacaaaacaataaaaccacccaagaaagataggatatggtttaaatcccaaactgactgatatgcactaaaaatttgggaaggaaaaaaaatcaacgtgaactaaaattatcaaagatgccagaggctctaatgtgttacttggatattgaagaattgtggaactcctgacctgaaaacaattagctttcttctcttcagagaatgaccatttgtcccttattacaatctgctctagatctcacaccattctcacatctgttctctaactttaactgaagttttctaattctctccagcttgaaagatctagctctgtgagccggacagaagtgagcaacaaccatgtcctcatytatgtggaacaggtgagggctctgacatcctggctgagactacatatgggtcgtctttctaagtgagtctctttactagaatagtcggtaacatgaggaaaacaatcattagtaatgcccttccagaaaggtttatctattccaagaagaataagaggggaaacctttgaactccatgtagtgttctgttctatttttaattgtgttaaaattggaatatgaatatttctatgaaatttaaagtacaaaatcaatagaaaaaaggtgtaccatgtattcctgttgttttaaaggccccactccctgacgatatgaataaatattaaacttgaagtgataaatcaataggactaaaggttatcatgcattcctgttattttaaagaccacctccacaaaatgaataaatatgaccccagtggttgcctaatgataatgttaacattctaaaatgtcaccataaaataaaatgaggattttatgaatattatcaaatatgaccataaaacaaagaaaatgttttatgtatccaaacagaaagaatacttcgttgttttaattacagattgtatgaaaccatgtttctccagcttagaacacattcacatgggcccagagagttaatctcataacaagggactacaaaagaatagggttggctcagttgtttagaagaaaatctgtgaaaatttgttgactktaaatagagttcccaaggatgcattctaaaacccatcttgacatccacaaatgtctggtcacctaaagacacyggtgaaaaagagtcaaagaacaataagaatatgttttgctcatgggagaaagaaggaggttttctaggttcttgattactcccacttttcstttcaggtgacaaatcagacgctaagtttttccttcatggttctgcaagacawcccagtaggagacttgaagccagcaattgttaaagtctatgattactatgagacaggtgagtgaaagaaaaatgaaacaatcttaaccagagccaagaaatggatcctgttgtgacagttgatcctcttcttagcccacttagtcaacattaatcttttgtttctttcctccaagatgtacactataaaaacgacttactacagtctggccaacatagcaaaaccccatctctactaaaaatacaaaaaattagctgggtgtggtggtgtgtgcctgtaatcccagctactatggaggctgaggcaggagaatcgtgtaagcctgggaggcagaggttgcagtgagctgagatcaygccattgcactccagcccaggtgacggtgcgagactccgtctcaaaaaaaagaaaaaacaacacaaaacaaaacaaaaacttactgaacaaatttatcaattagtgtttcttgagtcagaaacttaagaattaaaaagaatgataatatatagtcactgctttcaagtagtttagagacatagataacataatacagataaaaatattacataacaggaaagactattagtgacaaatgagtgttagtgagctaagcaataagtttgagaggcaaaaacagcacagaaggctggtgctcaggaagaacaaacaggaagaaagatctgatttggatcctagaggatgagtggagttttgggggtctatagaagtaggaggagtgtttcaagctggaacaataatctttgaaaagtaattaagggagcaagctgaacaaagtgaatagaagcagagaggtcatggaagagagaactacaggttagtgcaattatgatcatcttcccaagaatttaaaatttgaacagctgccatctgaacaggcttcagtccccatctccagtctcagggaaagagaatataaatatgttaatgatcctgtttaattcttgtctatttacatgaagttytgacaattctgatagggcgtgcttttctccagtagtaaagtgactagacagatttagcatggtccctagttcatagatctttcgtttcttccttcacccaacgttatctttcagatgagtctgtggttgctgagtatatcgccccctgcagcacaggtaagagttcaccacttatgaccagtrctagatggcattaacccactctccaagggcccctgcaatttaaattctctacaaggcttttcctacatctgagacaatccacatggcatgtcctcacaccaagacaaaactgtggcgtagcatgcctattctgtagcggactctccaatttcagatattcactcccagaaaagtcaataagctttgtttatttgtaggacagctatctctaaaagcgacatttcacttcacagctaattgggcttccttcaacacaatggtcaactaatcacacacctaaaaccaaatctagccttacacttaattttgtaaatgaagctttattggcacatggccacacttattattaacattggctatggctgcctttgtgtgctgattagtcatgacagaccacatggcatataaacctaaaataattaccatctggcctttcacaaagtttcctgaccctgcataagctcactctgctgcccacactcaactgaatgctcctcaggaaatgatacaacctccttacgtttttcttttctccatagatacagagcatggaaatgtttgaggaccatacaggctgtatattttggtggattctctgtcctatacatttacttagaaggaatggagttatttgtctctataaaatagacactaaaaatatttgctgaataaatatgtacttctggtcaaactatcacttgttgcatcattcattcatcagacattaataacatgttcacatgatgagttatattctttctgtttaattttggtgcaaaggttggattctaataggttagcattctagtaggaaagcagagtggaggttgcaggtaaagaaattgaatgaaaattcagttgagaaaggtggaaggtgagaacataaggggatgatagataatataaacgtggtaatataactggactggaagggtcagaagattagaagaagagacatcagaagagatgtttgagatgaggagaagtgctgttataggaaaaactaatatctagagaattgataattaaagtgcattttaggataagattattatatggattaaaaaaataaagagatgagagtgaaggatttagataaaccatctacaaacatggataataaaattaataagtttaaagataaaagtaacagtggtgaggatgcagtgactcaagggttaaaatcttcaaagaataaaaggggagtaacctgcatcctatagattattttaatagaaagagacatggtggctacagttaaccatattgtattcttgaaaaatgctaaggagtagagtttaaccatatgacaactatatgaagtaatgtacatgttaattagcttgacttaaccattctacaatgaatatatatttcaaaacrttgtacatggtaaatatacacaattttttctgcttaaaataatttctaaagtaatttttaaacatcatttaaaaataaacaaaggtatagcagatggtaaaatcaaatggcatgagagtagttaatgccttttatggagagaaaaaaaatcaagtatttgagaagaggcaagaatgacattatcctatctacagaaacagggataaatgtagtgtgggagaaaaaaaaaactggtcacctcttaatggagacataaaacaagtcaaggtctcaataggaagacatgcttcaaattcatacataaaggcaacatttggagaaggctataagatattttgctaataataggttctgagttccagaagacttagcttgaagggttcaaggagtcatagaagaatggtgggtggatataccagagtggagccataacacagtaagaaactggctgatgaaagatacatgagtggagaagtgaagtcagcaagatgacagagtaggaaaccctggtcttcccccaggcttccccyctgtcccacacatgaacaccagtttagtaacaatcatggacaaattccctttgtgagaaattcaaaggctaattgaaagactcctgtatcctaaacaaatgcaaaagcagactcaccgaagccagtaagattcaggacatgctacggcttatgagaggctaaaaaacagaaaaaagaagattcagaacactcccagcatagcataatacaattagaaagaggccccctagctcccagcttctcttaggggagagaaggggttacttcacacatcttaacttttctgagggttctccccagagaactggtttctatcttgccagtgatagagttctgacaggacaagcacagtctagctgcttgaaggagaatgaagatggcaagttggactggtaggcactatagatccttctccctggtcagcagagtgtgtggacaaaaaatttcctgctctcagctttcccttagggagagaaagagttgatccatgtgtctaatgccctaacttttctgtagatacccaaacaactgacatctgccttgccagtcggggagctcagatgagtctgcacagtctagccccaccttggaagaaaggaggtggcagcttggaattctagatgccattaatccttccccttgctagcagacagtaaatggatttttttaaatcccagctctcaacttccgcctgggaaaagaaagagttgatctttgcatccaatactccaacttctctgtggctgaccaaagaattggcacctatcttgccagtcaggtagttctgatgggtccagcacagactggctgcctgggggagaaagacagcattgatttgaagtggtgaacactataactcccctagctcatcacaaaacaagcagacaagaaccacagcttcctgcttctccctgagaagagaaaggattgttagaatctcccacaacctccaacaaggctgattgataggaaccttctcctatacaagactagtctgtgaagaatgggagaggtgccttcctttgtctaatgcagaggcaacaacacagagagtcaaagaaaatgaagaattaggcaaagatattcctttaaagaggaacaaaatacattctagaaattaacactaatgaaatggaattatgtgatttactttatggagaattcaaaataattctcataaagatgctcactgaagtcaaaagaacaatgtatgagcagtgagaatttcaacaaaaccacaaaaagtatcaaaaggtaccaagcagaaatcattgagctgaagaacacagtaacttaaaaattcactataagagttcaatagcaaactagataaagcagaagaaaagatcagttaatttgaacaccagtcattggaagtagttcagtcagaagagaaaaaaagacaaagaaataaaaagtgtagaaaacctaaggaacttatgtagcaccatcaaattgaccattatacaaattatgagagtcagaaaaggagaatagaaagagaaagaaagaaaaaacttattcatagaaataatgactaaaaccttctcaacctgaaaaaggaaatggaatccaggttcaaaaataactaagtaagatgaacccaatgaaatccacataaaaatacataatcattaaattatcaaaagtaaaagagaattttcaaagcaataagagaacagtgacttgtaagatagacaagatgcctgataagatgatcagctggtttttcagcagaaatttgcagtccagaaggcagtgaaattattcacagtggtaaaataatacaaacctgctaaccaagaatactatacctgggaaacctgtccatcaaaaatggawgagtaataaagactttctcagacaaacgaaagctgagggagttcatcacctctagatttgtcttaccagaaatgctaaagagagtttttmaactgaragaaaaggacactaaacagcaacacaatatcaagagaaggtatgaaactgattggckaaggcaaatataaagaaaaacacatgatactgtattactgraatgctagtaagtcacttttacttccagttaaaagttaaaagagaaaagtattaaaaataacaaactaaaatatgttttaaaacataaaatagatatcaattttcacaaaaataaagtgtgtagggacagatgataaagggcaaagtttttgtatgtgattaaactgaagttgttatcagcttaaaacagactgctataactacaagatsttttgtgtagactccaaggtaaccccaaaaagtctataaaagttacacaaaagacagagatttaaawatcaaagtatattggtacacaaaaaaacaataaaacacaaggaagacaggaagagagraaaagacagacaaaataattacaaggctaacataaaacaastaacatggcaaaaataaatcttcccctatcaacaattactktaaatgcaaattgagtaaacctcccaatgaaaacacatatagtgactgaaaagttaaaaasacagacccaaatatattctatatacaaggtacttactttagatttaagaacacacataggctgaaagtgaagggatgaaaaagatatcccatgcaaatggtaatcacaagagagtaggtgacagggcaggagtatcatcatcttggacaagcactggcattttaaagttccccttaatsaaaaactgccccaaagggcattggcctaatggctaacgtcagcatgaccataaaccacaaatgacatctctgaccagaaacattccaacacgaaaataaaccctccccgaccagagatatgcctgccccaagataacctcccctccggccagagagatgtcagccccaagataactttccctctgaccagagacattccaaccccacaataaacttctcctccacacagaaacattccaagcctgtgataagctctctcaccctaaaacccttaaatactcttagtctgtaagagagagtggtcctgactaaaattggccagaagcccctctcaggtttattctccaaaataaacctgtctttgactgttgagccactaatcgtgtttctttcctctttctttaactcttamatttggtgccaaaacccaggacgggtgttgtgggtagaggctctcttgcaycccaggaagcagtgggcagyggcagctmatcccactggatcctgagagtctctggccaaccaccccatcttgcctsttacttcacttttcaagtgatttacatgagcaggacaactaacctgaagggaactgtgaggctcaggctggggctactctccagtgggctctcagagtcctgagacctgaccacttctgaccacccacagtgggtattttgctctctaacacttgtcccctcctcctccctcatcctcactttcctttctctctgtctctctctgtctctctctctctctctctcttcctcatgtggctctggttcaagaggccctttgccaattccaactggaacatccaatattggacactaatccagccaactggtaagatctgccttcccctgactttctcatggtacccgggaaagtcaggtatgccatcctgatcctcagaggaccagtgggactaggctagaagaaatcttggggacacccagtttcttctcagcttaattgttctctttagaaagaggattctgggtctctgtcttttgtctggggacacctacaacaaaaacagacaccctaggcttcttcttaccagtccacataggtgctcaacaatccaaaattcctatgtcctctccactgagctgtctccttcacagccttgccaaacttggcttatgggaagcataaagccaaagtgtktggctttttattgcaacgtggccgggccccagtgcaatatagataatgacaycyaatggcccgaaaatggcaccmytgatttttcaaattctcagggaccttgacaactttataaccaygaacagcaaatggcaggaggttcttgcctgaatattcaggctttcttctacctaagatcctgaccctccctgtgtcaagcttgcacccctcatgaaatccttcttaataaaaccctccccaggtttctccttcctctgaaattccttcyttctaaaccccttcctctgaaaccccttttgaccctacagatgaatgccctctctatcctcatccccctggatccacttcttgcctgtccgaaccctcagccccaaactccactcttcctccttctccacctgttactcattcaaaaactgcttcaaccattcaaaccacctctgcctttctcctactctgggaagtggctagggtcgaaggtattgcttgtgttcatgtccctttctccatgtctgatttgtcacagattaaacagcaccttggatctttctctgaaaatccctctcattatcacagggaattcctgcacataacccaatcctttaatttaacttggtatattatttayataattctaacctcaaccctcacccctgatgaaaaagagcactcagcttaaytaaaatcgatgtccaagctatgagtatattcaaaggcctttatgtttttctcttcataaatcttyttttcctggaaaaggttttttcccagtcaactgaattacttttctccattctttcttgccactcttggtgcaggtattaaagaccctaaaatgactyctggtggcctgggattccttgggaaaacagaaaagttgccacaaatcccatttgrggaaaaacctttgttttcgttgtggaacccctggaattagaggtaaataagtacctctcaaaatctgtctttgtctctcagctttacttgtttattaggccctggaaattattttcctagccctgttcttaaagggcctcacccaaaggccaataatccaattggaaaattagaaaaaaaatcttataactactggattttcttctggttgtctgtgtggctatatatgtgttaggtgtgcaatgtctatttaaaaagctctaattgactggcctaagaaaaataagtgcttaaatcaaatatttttagaggaaaagtaaaagctatgggacctttcagttcacgtgactttaatctttaaaacttactggcacagtaaaattagaaatgttttaagagttgccagcatacatttttgtttgcatttattaatcaagcaatttcatacttatctctgccaaatactattaggtgtcaaaatttggcatagagactacaaaactataactcagcccaaacagaataatctttgcttgtgtaattttttaataaatgaaacattaatattggtttaataaagatagcttcatcttgaactatttagtgaaataccctaacttctaattttgtggccttaggcagtctagtgcacagacatgaaggaagtttgctttgggaaaggactgttatcatctttgatattaaagaaaagagaatttatacaaaaaagaatcatatatggtaaattcctgtcctgaagtaaattaactagttgtttaaagagagggatgtttacaacaaagtcgaggcatgtcagagactgtccatgtaagtcatgaaaaaatttataaaagggaatttatgcaagaaatgttgtacaatttaaaagtgattaggactcctgaatgctttataaaatgccatataactcttagctgtacaacttgcctgctttgcagctaggtaagacctaggacacatggagttaaatgctggaataagtcggaccttatctgaacttctgtctgggtcctaggctctccacctagtacataattaaaatccmaaacttaccaacaaaagtaaaggttgctaaaagttaacagtgtaacatgtatttaagactattgaaaaaacagtttacatatacttttggtaaaaagattataaggaggcatgagaatgtggatttttacctagattaaaaggttaaagaattgttttaagttgaataaaataaaaatgaaggtttaagcaagttttggaaggttaattgtaaaggaaattctgtgtgtaaatatattggctaaagttgaagaagtatcatccagtttttctgtaaactgacattaaaataaaagcacagtgggtttggtttctcttaaagcactaacctgctctttaacaaaaattataaagggttaaaaagggtctatagaaatcttaccttatggtcaaacattaaaatcgggtaaatgtatctacaaggttctattaaaaattgagtttaacattagtagcacactaatataaaggtttagcttatttggtataaaatcatacaggaagcattgtcaaatataaaatggtgtttggctttctttgggctatatttgcatacatatgttattggtatgtgttccaaagttataagagactcctatatttctgatatatcttagtgtacgttatcagtaataattataattgttatgttaaaatattgcatgccacaaaggtaacagatattcttgtcaattgtaactttatggctactataaaactttttgtcatccataaacaattgttgtcttgtttttggtcccctagagactgaagtaatcttttttactttttgagtatatttaagttatggcaatatagttatttccatcagtgcaataagaatctgttttattttgtaacagaacatgatttgaaaaactggttattttaccaaggctttgactggagaggtgtgcygtcctttaaggaatcaaacttgacttatggagccaataaaactctcgggaaactggcctcatattttatgtgcacagtccctgtacagggtttctgacctgtggtaagtaaagaatgtcactttctgacaggccagtacccccaagttatcttggaacctcaggargagaggaattcacccaactcataggtatttaatggtacaattccatgactgggctcagctttaaaaggccttatctcagattccttctatggaacaaaattccatcaatgccagtttaaaaggcctaggtaacaaataattattcttgctgcactgtatgcaaataattaaaccaagtataataatgcaaaccattcctaccatgatttattttttaataacggttactggcagaaaataacacgtggccctttccaaacatgtgcctctgcctctcattaggtaaggaatgttgcttctatctcaaccaattgggccgagtaagaaacactgctaaataacttaaagaaagggccaaagagctaagggaattccaaaacaaccaaatggattcttgatttgggaaaaaaaccatagcatgggtcatcccattcctgggcccccccctactactatgcctaggactaatgttcttaccctgcctaattaatcttttccagagatttttaactgacaggatcatggccatttcacagacaactacccaaaaactgccccaaagggcatcagcctaatggctaatgtcagcatgaccataaaccacaaatgacatctctgaccagaaacattccaacacgaaaataaacccctccccagccagagacatgcccatcccaagataacctcctctccggccagagagatgcagycccaagataacctcccctctgaccagagacattccaaccccacaataaacttctcctccacacagaaacattccaagcctgtgataagctctcttaccctaaaacccttaaatactcttagtctgtaagagagagtggtcctgaccaaaaaattggtcagaatcccctctcaggtttattctccaaaataaacctgtctttcactgttgagccatttttcatgtttctttcctctttctttaactcttacaggaggagtggctacacttatatcagataaaatagactgagttaaaaactgttacaagagaccaaaagggaaattttataatgataaaagggtcaattcaacaggaatatataacaattacaattatatatgcatccaacagtagaacacctaaatatataaagcaaacattggaaaaacagaaaagagaaatagggagcaataaaataatagtaggaaacttcaatactatttgcaataatggatacatcattcagacagaaatctgtatccataagaaaacagcagacttgaataacacaatagaccaaatggaccaaacagacatatgcagaatattccaccaaacagcagctgaatacatactcttctcatgtgcactcagatccttccccaggataagtcacatattaagtcacaaaataagttataacaaatttagaaagattgaaatcacaccaagtgtctttctggccacaacaaaattaaactataaatcaataacagaaggaagactggaaaaataaaaaatacatagatattaaacaacagactcttgaaaagtcattgagtgaaagaaggaatcaagaaggaatttaaagtgccttaatacaaatgaaaacaaaaataaaaaacactaaaattatggtattcagcaaaagcactattaagaaggaggtttactgtgataaatacctacattaacaaagaacaaagatctaaaataatcaacccaaatttatacttcaagaggctagaaaaagaacaaactaagctcaaaattagcagagaaagaaataacaaaaattagagaagaaataaataaaacaagaaaagaaaaaaatcaaagaggctcagtgggttttttgaaaaaaataattaacacacccttatttagactaaaaaaaaagaaatgaaagaagatacattataactgctcttttagaaataaaaatgatcataagtgaacaaatatgtcaactaatcgaataacctagaagaattgtgtaaattcccaaatacacaaaacatgtcaaaagtaaaaatcaagaaagtttgaacagacctatcattagtatggagatttaatgaataacaaaaatccttctaacaaataaaaayccaggatcagatagcttcacaggtagattctaatacacatttttttaaaaaagtgccaatcagtctcaaatgcttccaaaaagtgagagaacacttccaaactcattttataaggccagtagcacactgctaccaaagccagacaaggacactacaagaaaaaaaaaatgacaggccaatatctctgatgaatatagatgcaaaaaatatttwaaaaatattaggaaatagaatccaacagcacattaaagggatcatacatcatgaccaagtagtatttattcccaggatgcaaggatggttcagtatgtataaatttgtaccacattcacagaataaagggaaaaaaaatcacataattatayaaatacaagcagagaaagcatttgacaaaattcaacattctttcatgttaaaaactctcaagaaactataaataggagagtatctcaacataatacaggctatatatgaaaggcccatagataatatcagactcaacggtgaaaagttgaaagcttttcctttaagaacaggagcaaggcaatgatgcccactcttgccacttttattcaatatagaaccaaagccctagccagaacagttaggtaagaaaaataaattaaagcctaccaaatcagaaaggaagagataaactttttcctgtttgctgatgccattatattatgtattaaaaatcccaaaggctccattttaaaaaactgttaaaactaatacacaaatacagtaagattgcaagctacaaaatcaacttacaaaaatcagttgcatttctatacactagcaataaactctgaaaaggaaattaagacaacaatcccatttacaatagcacaaaaaagaattaaatacttaaggaaaaacttttccaaggaagtgaaagacctgtgtctggaaacaaaaacattgatgaaagaaattaagacacaattaaataaaaatatataccatgttcattgattggaagatttactattgtcaaaataaccataatatcaaaagcaatctatagattcaatgcaacccctgtcaaaatcacattggtattgtttaaaaaaatagaaaaggaaatcctaaaatttatagggaatgagaaaacaccacaaataacaaaatcaatcttgagaaagaagaagaaagctggaggactcacacttcctaatttcaaaatttagtacaaaaccacagtaatcaaaacagtatggtgctggcataaagacagataaacatcaatgacagaatagagatctcaggaataaatgcacccataaaaggtcaactggtctttgacaagggtaccaagaatacactagggggaatggatagtcccttcaacaaatggtgtggagaaaactgtatatccataagcaaaacaataaaatttgatgtttatcttacaccatacacaagaattaactcaaagtggattaaagacataaaagtaaggcctgaaactgtaaaactgatataagaaaaaataaaagacatgctttatgatcttggtcttggcaatgatttcttggatatgacaccaaaatcacagacaacgaaaacaaaaacaaataagttgaactatgtcaaactggaaagctcttgcaaagcaaaggaataatcaacaaagtgaaaagacaacatatggaatggtagaaaatatttkcaaaccatgtgtctgacaaggggttgctatccaaaacatataagcaactcctacaactcaactcaacagcaaaaaaactaataacatgactttaaaatgggcaaggatctgagtagacatctttcaaaagaaaacatacaaatggccaataggtatatgaaaaaatgctcaatgccactaatcagggaaatgcaaatcaaaaccacaatgagatatcgcttcacacatgtcaggatgcctattatcaaataaaagacaacaagtggttggcaaagatgtggagaaaactggaatctttgtatactgttggtgttaatgcaaaatggtgcaactgctatggaaacatggtgtatatattcatctatatttgtatatatgtatatgcatattatatatacatgcatatatatatgcacacatatatgcacacacacatgcacaatggaatattgccttttttaaatgccaagataagaaacaatttattacagaagaaaaatttctcatccaaaatatagaaatcaatacaactttgccacaatcaatatacacgaactgtacaaatgtatacccattcataatttaccaaataaaakatgattaacaaagttcacaaaatagatgaaaatacttttacccaggaaagttacaaaccagacctccaatttctaaaatagaagtttactcagtcttagaaaactacaagctagcaaatgtacgtagagctggctggtgccaacaccacagttgaaacagtctttctaagggtctttttaaaaacccgttgccatggcagattctggtcacttgctactttcaaggtcaaaaacacaatacaaagtctgaccattttcccaggtcatgtttgctagcttgtctttatgtacatttagaaatatttgctaggtaaaagtcttgtcgtaaaatttccagtactactatgtttaaaacgttgagctcccctattgagctgccaaaaaggtaaacaataattttcaagtgtgatagttcaaattcctctgcgagatctactacagagaaaggttctttgacatacggattttctttaaaggaattgatgtaaaaatttaagtatgtctgggagaagctgaaatcactctaggacttcactccctagcaaataaagtgatcatttacttggactcataggctattaaattattgaaagatactgtacaaactatggcactgtcacttttaaaaaaatgtttaccactctatcttgtgccggatcttcacagctgtgacatggtttaaattccataatccatccccaataggagcccacccaaagccaaaatcaaatttatccatgcactataagatgatccatcttaacctgatacagtcatcatactgtagtttttggaagggctggttctgcccaagagaaattcgtccttacagtttattcagctgtctaccatttgtatgtcggtgctgttttgagtgctaccccctgctggtggggctttcatacagcacacagatggagccatcttctccaattctgcaggacagacatctcataggttgaggtgagcgtgagtccaacccagagtgtgagttcacttgggaaaagcttgaacagctcctgactgctcggtccaatccactgtgctgcctgtccaggggatccatttcatggttgatgcgaatacaaagataacttgatcttttgtatggcttttctgggaatcagtgatgtttataatgttctgtcagcagttcctgcaggctgtggctgaaggtctgcagctgttgcccgttcgtgagccctttgctgtggagaaacttggagacgaaggacatggaggcggccatctcgcctaccctggtggtggctctggggtagaagggatgcaaggaggcagaggtggggcggcccgggaacgccggggctcggctgcgctgcctcagcagctgagcagcccccagggcttcctcacagagcagagggctgacaggaagaaagggtgtgaggggcagacagctacttttttctttcattagagtaaaaaagttattttctagacaggaagaggcagaagagaggaagagaggagcgatggcggtttggttacatggctaggacctccccagctgcctccacccctggctgcagagcctctgaagatcccaacagttgcctttccagcaccgaagggcgaacttctttaaaaagaagaaaattctgtatacgacaaaactaatgaatcttgaggacattatgctcagtgaaataagtcacagaaagacaaatactgcatgattccacttacatgatttatctaaaacagccaaattcatagaatcaaagagtaaaacagtggttatcaggggctaaactgaagagggaacggggagtttgtaatcaatggacataaaatttcagtgaagcaaggtaaataagctctggagatttgctctacaatgttgtacttatagtcgacaataatatattgtacacttacaatttgttaaaagggagatctcatgttaaatgttcttaccacaataaaataaaatttttaaaagaaaaaagacacctggtgtctttttcttgtagcaaccgaagtaaatagagatgtatgggtgtataggcattagtttgattttctcttacgaagaggtctggattatagcctccatcttgagaccggagtcaagcacttgaggtggggaatgatggagagattggaagtggcattcttctccacaacaccrtgggttctgtagtcccttgtgcaattctgcaattctgccatgatagttattgagaccaagacaggcaaagtctaaccagggaaagaagagttctgtagacttccttccaattctaccaaggttgatattgagagcaggcttcttgccagcagcattaaacccaacaatctatacttcctaggacaatctctacctttgatttrtgtaaaataacacttttctgtttttcttctgaggcccctcctccacagaccagtttctggatatcttcttctttatcagatctctaaamgttgagattcttctagatttagatctatgctgcttgttctttgcactctacattrrcttcattcatttctacaacttttaatagtgtgtataggtagctcccagattgctattttcaccgtgattctcttgcctcatacttttcccctctttggtgatgatgtgtcagcacattggccctctctctaatcttgaatactttatttctgtctggggagtttagcacatgcttccctctgcctataatgctgtataacttgccctctccctttttgcaaggataaattcccagcttaaatgccatatcataagagaggtcttgactgaatgcacaatctatgttggatctccctggatgttcagggaagaaaagaaacatttttttctttcacagcatttatcatcatatggaattaccttatttaatttatttgtttatatactttgatctgtattcttccacaggaatgtataatccccaatggcaggaacatgtggtttttgttaaccacagaacagtatctgatacaaaataygcattaaaattcttgtgaactgactaaataatatccatctctccacttgattgctttacttgccacacatccccagtacctaattcaagagcttggctcattgtcagcctttaaatattgactgaacccaattaatcacttttttctttaacttctgaactctgtgcccagctccctacttgaatagcttcactggatatctcaaaagaacctcaaattcaatatgtctactttccctatctgttattagcaacaaacccagcacttgccctagtaggaaatctacaatcatcctttacttatctctaaaatgaaaaaaaaacccacacctttttcataaagttttgagttcactaagtgaaataagcaaggtgcctatcacaatgcctggcatacagtatctataaatattagtttagctataccagttttcattcattcaaagaggcacatcttttcacatctctgaaatcaagatgtgttttgtgatcagtagtgtttcataattggatatacatctaatcattaatcaggtggaaattttttctttaaatactttattagaaaattgtgtcctttacctcaatggtgcttcagatgtgataatttgcagtaacacaacttctctctccaatgtgcccatatatattaaagtagttattaggtcacatcacgtacatttgaaatccatattttttctcactcttcccactgttgtaatcttactttgggccctcattttcttccaactgaacactgaattagccccctgaatggtcttcctgctgactatattgcccttctccaatgtgtgtgtcatattcatgccagagtaatcatgtttctctcatgcctaactcacttcattatctacacaactgcctgcagaatggaaaccagattctttcacatggcacacagggctctgactctctctctctttagcctaatccctaagccacagtcaagttgacctcctttctgtacttgcagatgacttaacactgtatgttgtttcacaacccatgtcgtttatcacactgacctatcttgaaaatattttgtatcagctggaatccctctggcaataaataacagaaaagcaactagcagctgcttaaacaaataggaaagtccataggttggtgttccaaggttgatagaattgcccaataatgctgatgaggaccaaggcccattttatctttcagacttccttaacatgcagaccttcatccccctgcttgttactttgctgtctcaagatggtcattgaaatattaaatatcacatctattttccattaagtaagaacaaggaaggacattcaggggtatgcccactacaactcttctttttaagaaagcaaatgtttcccataagccctacccagcagttttctacttatatctcattgcccaaacagcaccatagtcactctggtttgaagatgcctagagagagggatgttgtgggtagtttagccaatgagcagtgtctgccacagtctgcttggaaaatatcttctcattttttrtgagattcaactcaagagttatatcttagaaatttagaaatgtgtatatatatgtatataaactatatatgtatataaattatattgatatttatataagcatacataaaacacaaatatataaacgtmtatatagtatgtaccctttcatcattaactgaatatttatcaaacacctgtacacagtgcrtgctaggtactgttctaggcactgggaatacagcaatgaacaacatcttatcctttgtggaatttacatcctagtgtttaccctttgatctaactttttcacctctagtaacttaccttacagactatacctcaaaaacaaggatgctcattgaagtgataactagaataacaaaaatctgattaaatatcactatcggattgattataatatacataaaattataaaatgtaattattcaaattacctcttaatagagatatactaacatggaaagctgtccccaacatatattttaatttaaataatggaagaccaaaatgtatagtaaactctcacttttaaaaagaaaatccatccccaaattcatacggaatctcgaggaatctgaaatagccaaaacaactttggaagaagaataaaggtattagactcacacttcctgatttcaaagcatatacaaagacacaatgatcaaagcagtgtggcactggcataaagacagacaaataaaccatcgtaatagaataaagagccgagaaataagcctgtgtgtatatggtcaaatgatcttcaacaagggtgccaagaccactcattgagaaaatgatagtctcctcaacaaacggtgttgggaacaatggaaatgaaagttaaacctttattttacactatctacaaaatttaacttataatatattaaagacataagcataagacctaaaactatgaaatttctagaagaaaacagacaggataatctcatgacatggggtttgtcaatgacttcttagatatgacaccaaaagcacaggtaacaaaagcaaaaaaagataaatgggactacatcaaacttgaaaacatttgtgcatcaaaggacacaatcaaaagagtgaagggcaacatacaaaatgggaaaaaaaaatttacaaagaatatatttagaagttattatccacaatatataaagaactcccacaactaaacaatgaaaaaaaaatcaaataactagattttaaagtgtgcaaaatatttgaatagatatttctctaaagaatatatacaaatggctaataaacattgaaaaggtgctcaacattactaatcaccagagaaatgcaaatcaaaatcacaatgacatactacttcacatctgtgaggatggctgctataaaaaaaaaacagaaagtaacaagtgttggcaaggatggggacaaattgaaacccttgtgcrcagttggtgggattgtaaaatggtttaactgctatggaaaacaccgtcaagtttcctcaaaaaattcaaatagaactaccatatgatccaggaattttayttatgggtgtatatccaaaagaattgaaaacatggtcttgaagagatatttatataccacagtcatagcactagtcccaataaccaagaagtaaaagcgagccaaatgtccatcaatagaagaatgaatacatacaatcaaatattattcagccttaaaaagaaatgaaattctgatacatgctgcaacatggatgaactttgaagaaattttgctaagtaaaataagctagtcacaaaatgacaaatactgtattatttcacctatatgaagtatccaagccaattcataaaaacagaaagaagaacgctggttaccagggacagagaagaggagaaaggggaagtgtttaataggttgtttagtagttatagagtttcagatttgcaagatataaaagctcggaaaatctgtctcacaacaatgtgtatatactttacactactaaactgtacatttaaaaatggttcaccaggcgcggtggctcacgcctgtaatcccagcattttgggaggccgacgcgggtggatcacaaggtcaggagatctagaccatcctggctaacacggtgaaatcccgtctctactaaaaatacaaaaaaagtagccgggcgtggtggcgggcgcctgtagtcccagctactcctgaacccgggaggcggagtttgcagtgagcagaacgcgccactgcactctagcctgggcgacagagtgaaactccgtctcgggaaaaaaaaatgggtaaaatgggaaaaaggaaaacccatacctgcatcttcatatatattattatatacaataatactgaaaatactttcagtttatgaatttggtgggtagctcacacattactttatattttcttcatacttatatattttataataagtatacattactttttatagtcagagaaagattagaaaaaatttaaaaaattacaaggtactttcttctctatctctctcctcaaatagtaatgaccatttatttgtacttatgtagtcaccaacagaatttatatgtattgaatgaaataataaatgtatcatcaactagtgataatgaatgccttcaataaaaatttatatttagcaccaaattaagaaattaatttaatatagttcttcatttaatgaataccgattgttattaagtgcctaggatatgcccgatgtgcctgtgtaggttttgagtaataaacatggttatttcttgaaactatcttttgatgaagaaagagaaaaagagaaagagagaaagaaagaggttatggctagctggtaacattcaaaagcaagccacttcatgaaaccccattacaagtcaagatagtatagtccaggtgtgtagtactctggtggtctggttttatcatagttagagcctaaatacatagcaaagagaacagatttcacatatttcaaaaacatgtaacagcgagtatgaaatacccgcagacccagtcaccccactccagcttctgccagagaaaactggtgtaagaaaaactggtttggaagttaattgcattcttccccccacccccttgggccataaaattttattagcaggtaaggggaagagccaggagtaagggtccctcccttcccatcccctacccaggatcctccctctgaaggagagcagaagcccaggagcctgccactcagcggaccttgcaggtgggcaggttgctgtaaggatctttctggcgctcgagcaggatgcggtcggcagtgatctcctgctcaggcctcctctggcagtcagcacacacattgcccagctggacttcggcaccgctgctcagagcctggatccgcaccagctgggcctcaacgcaggcctccgttcctgcagtacggtcttccaatgcggttttcatgctgagctgcgactgcagctcaatctcaagaccccggagggtacgccaccggtccgcgactcggacttgtgcatctggagctgctccgtgtggccagcgacctcccagctcagatcctcagtctggctggtgaccaggcttcagcatcttgggcatctgctcagttatgaccgcatactggcttcacgtgttgcccgggatcttggcaagaccaatgcctggagcagaatccacctccacactgacctggccacccgcagcactgatttcctcgttgtggttcttctccaggtgatccagctcctcctgcaggccttggatgtgcgtcttcaggtcagccctggccggggtcagctcatcgggcgccctgcgcaggccttgatgtctgcctccaagctccttcgcagagactgctccatctcagacttggttcggaagtgatctgcagccaggcggcgggtgtcaatctgcaagacaatccgggagttctcaatggtgacaccaagaatcttgtcccgcaggtcttcaatggtcttgaagtagtggctgtaattgccggggccccggggcccagtcgcagatcttcaccttcagctcacccggcctcctccagagcccgcaccttgtccaggtaggaaccaagtggtcgtggatgttctgcgtggtgatcttggtgcccgtcagcagcctgtcggacctgcagaggacgctggcatcgccgctgccatagccccagaggaggatgagggcacaaagtgggtggaggacacagacaggctacggcttcggagccccagtggatgctgggctctaggaaggcgcccccgactccaaagtgcacggagccgctgcccagcccccaaaggactaagtggccaatgactggcgaaagctgcaggaagttagggtgaggcagagaacggttcaaggagctgcaatcggcaggaggaatcggaaattttaattgcattattaccaattataagaatttttgtgctatgagtgggttttgtgctatgaggggacccaaaaaagggctgataaaacaccaaaaccactggtgaggagaacttaagagggaaccaggcttcaagctcctaaactcaccatggactgccacagaatttaaagcacagtccatattcctcagaaagctaaccaagcccaccactgggtgtcctaccaaaggccgttccctggcattattctagacagaamaacccagacggcaaaaatgtactgctgtggagagatgaatcaattcctaggaggactggacagacattctcaaaagtttgttggaaagatagcagagaagagaagaatgaggtgctttaataaagggataggaagaaggtgagaacaaggaactgagattaggagctgagtgtgtccatgacagaccgcctagaaagaatgtagtrtctagagcttttactcatagaccgcgggacaaggtatatttaccatatagctctgtattttccctcttgtgttataatgttttctgtaattaattactctaacccttttagcaaagtctaatacacttcagcattgtctcgtgatgatatacagactaaatggacargtgagtaaaagaaaaaattaaggcgtcctcactggtgggagcagaatcccaggcagagaactatgcacagaagtttcaggcagtgatcagctgaaagtcagattgcagtccattgtattccatggtggagacaagaacagggagggagcacccatacttaaaagaaacttctaggcttggagcagtatggtattttatacacatcacctctgttagtcaagctttggatgggggctagatagcagcccactgaaagacctggagtccctgtattcttaattgctatgtcggaaagttccatatttagaaatcagatgggcagcaggtaagttaggcattcttctgaaaaaaattaagcctctaccaggactctcgcttggtttataaaatgagccacagaagaaacagcaaactcaagttttcctctcaaaaagtcctgtgtcacttgaaaagttgcttcatacacattgtgtcctaaatatgaaatctaaagttgttactgttttgaaataaagtttcaagagaatatattttatataacattcaaatgagttatagtaaaaatgctaggtcttaagagattcaccggatgaaataacattctccacttcagaaaatgaaactagtacaatattaaatactgtgattaataataatctctaatatttctacatacttttgctcctaacagttgagttatatgctcaccctgtatgattgtggtatattctgttatgccagttgcattaytgtaattataaatttgaggaataaagtacacgaacttataaaatataaacatggccaggcacagtggctcacgcctgtaatcccagcactttgggaggccgaggtgggtggatcacaagctcaggagtttgagaccagcctgcccaatatggtgaaaccccgtctctactaaaaatacaaaaattagccaggcatggtggtgagcacctgttgtcccagctacttgggaggctgaggcaggagaatcatttgaacccgggaggtggaggttgcagtgagccaagattgtgccactgcactccagcctgggcgttagagcaagattccatctcaaaaaacaaacaaacaaacaaacaaaaaatatacatacacgcactattttaaaactcagtttttatctaaaacctagattaaaagtctttggaaagagtccatggagaggaatacgttaaaaatgccattgaagccattctgcaatgtataatatttcagaatgacatgttgcacacaatgtctacataatttttcgtcaattgaaaataatgtgatcaattggattaaaaatatatcattaactcatgaatttaaatatatttaatgagcttaagttgattgtattttctgtatttcttaaactcaaggtattacctagtgctttgaggtgtcgattttctggccagaaacttctgcggctggcgacaagctcttgtcctgcatccaggaagaatgacaggaagaatgaggtacacgaacaagtgaagggtgcacaataagaatgaggtacccagacaagtgaaggacaagaygaagatgagctttactaaattttagaacagctcagaggagacccacagtgggtagctcctctccgtaggcaggtcttcccaacatctactgctctcagcagagaggaggccctggagcgggtgctccttgctcctctctgcactgtagtcccgaagtctctgcaggtctctgaagctctcagcagagagggtagttcctctgtgcagctggttgtcccatygtctcctgctattagcagagagggcagcttctctctgcaactggtcttcctgtccctccatcctctctcttgctctgcctgagcccgaggcttttatggggtggaggaaatgcctgctgattgatccatgggcagccataggcaggccaaaggaggcaccacaagtcctagggactgactgccgggatcccaaccttcaggtcctccctggcctgaaggtggggccttacaggggacctgcccccttctgcccaggagtctgcctgcctcccgctgccattcatggcccctgggctcagccccaagattggagcaggctctgggagaggagaaaggccaggcaatgggagcagacacccctgagcctgcagggtcgagagaaggggagggtcttcccggctctcgagggtgcaggctgcagagatgcctggacstgcacctgtgagggtgccgcagctgcaccagggaatctcccgcgcagccaactgggaatgggcaggtctcccgcttgtcccgggctctctctggctcagtggagcagtaggcccaggtctgcagccactggtcggggtgctgcagccgcacggggagtgtagatcttgcctgctcccagccccttccaagagcacagggaggctcagatccacagccgcagtttgggcggggctcctacctgctccatagagcaggaggccgcggtctgcagcctcggtttgggcagctgcagcggcaccggggagctctggccccaactcagaagggacggagctcccaccggctccactgcagccaacattatggcagcagcggctaccatcaatggtatcccatctttggcaagtggaaacatcttaatgaatttcccgtttgccccgagaatcctcttgtctctgatcctaaggtaacatcacatacatgtctgttacactaggattagagacaagttctgtttagaaataactccaagaacagcttttatattttattttcacattgaaaatcagtcagatttgctccagcctcaaagaatgtgtttactaaaattaaatgaatgctggcagggagctgcactttttttttctaaataggaaatgggttaagggcggcagctgagtcctttcgacataaccctaatagtctttggcagcatcctttctgtttggtaggataagatattctaggctcatcttgcattttccgcgaaaaaaaaaaagccattgaattaggcatagaggaaattactataaagtttaagggataatgtaaaggatctaggaaaatactctaattgcttcacaaacaaggaagaaactgaaactagaaatgtagtcaattagtattgctgatgtgctttatgcaagaaagatagtatatttgttctctcttatctgcagcttcactttctgtggtttcagttacccttggtcatccagggtccaaaaatattaaatggaaaattccagaaataaacgattcataaattttcaattgtgtgccattctgagtggtgtgataaaatcttgacacccgggatatgaatcattcctttctccagcgtatccatgctgtatatgctgctgttattccccctaacccccaccccagtcacttagtagctatctcaatactgcagggcttatgttcaaataatccttattttacttaataatggtcccaaagctcaagagtagtgatgttggcatattgttataattgttcttctattawcagttttgttaatctcttactaagcctaatttataaattaaacttcatcctmagtatgtatgtataggaaaaawcatagtatatatagggttaggtactatctgtggtttcaggtgtccactggggatcttggaacatatgcccctcggataaggggaactactatatacaagattaaataaggtcacttaaaattcatttataaaattatgtcctaaaatatttgtaccagtaacaagatatattcaaattattttatctaataaaaattaacatgttttattttctaataaaagttaaaatatgttagcagtctataccacttctttaattacatggaaaaaattacattatgatgtctaattaataaatagttatttataattactgccaaagtcaaaaaccagtttgatacttacatcttaaataccatgcctttttatacccttttctttataaataacttgtaatttaaccttcaaattatactgcattactttaaattaaataatgagagtacgtatgtataacttgctttgaaaataaatgaattatgaaagctacactatttaaaacttgagaactttcaataataccttatacaatatattccataattactttttaataaatttttataatattactgtaaattgtgggtttagggaccgacagttcaactattagcaaaataatcttttagcataacaaaaattggaacatctaaatctcttagaacttgtcttagcccatttatatagtaagtactacgtaattgctagctgtcattacctgttactgttgtagctattgttgttagcctcattatcatcagcatcatctgagtaattaagtaaagttggcaaacaactttatctttcctacttttaaaatttaaccccagtgtttgctcccaaactaagtagaactctctaaaatgaaagttctgacactggaaagttccacagcgaacatgagcactacagtgaacaaaggggctcctatggttaagggtcatgaaccaaccttgtgcaaacccacacacaaacacgcatacrcttattttctgttcatcaaaggaaaagtaatcctgtaacatttcccccaccttgcttcctattccaaaataaactgcagatgaagattaaaatctaaacacaaatacttaatgtaggaaaaaatgcaggataatatttttacaatttcagtatgcatatgcagaaggatttcttaatcagaaaataaagatacagtataaacaaaaagaaagttaaacaaagataaattataagcaacagggttcctacaagtgacaatgatgctgaacatcaccagtaatcatgaacttgaaaaagaaaagacaaaatagatcatgctcccctccccatcagattggtaaaattttaaatgagtgctgggaaaatatatacacataagcattgctagtgagaaggtaagttggcattttagaaagttgatgagatagtatctataaatttgaaatgtatatacatagcaaattcacaatgggracagattcattatacaaaaatacttcggcatgccccaaagtataaatatgttaggacagccattgaattctattgtttgtagtaaattgttttagtccaaacactaattcctctgtagcaaacataggatctaataaaatggattatgtgtggaaatcagtcctctttagaaacctaaaggaccaagtgtatcctgattaaaaagataaaacgctttctttctttctttttgtttttgtttttttgtttgtttgtttcgagacagaggctcgctctgttgccaggctggagtgcagtggcgtgatctcggctcactgcaacctctgcctcccgggtttaagcgattctcgtgcatcagtctcccgtgcagctgggactacaggcgcacgccaccacacccagctaatttttgtagtttaagtagagacggggtttcaccatgttggccaggatggtctcaatctcttgacctcatgatccacctgcctcagtctcccaaagtgctttttgataattttgagaaatgatggargcatattagaatgaaaacaacctgaggatgtgcttttatctttgtatattcaaatattttttctcattaaaaagcagaaagtccgggtatgatggttcatgcctgtaaccctaacactttgcggggccgagataggaagatcccgtgaggycaggactttgaggctagcctgagcaacatggtaggaccctgtctccataaaaagcttaagaaaaaaattagcggggcgtggtggagtgcacctgtagtcttagctatttgggaggctgagatgggaggatcasttgagcctaggagttcaaggctgcactgagctatgatctaaccactgtactccagcctgggcaacagagcaagaccctgtctctgaaaaaaaaaaatacacacacacacacacacacacacacacacacaygttagtgggatagcacaaatgagaaaaactctgctctttgatcactgagtacatctctgtagatatatatttccttcactgcagattttgcccaagatacttcgtcaaagacaaagccagtacaccctctaatagggtgaatatggttatgccacctactgagcttgtttttgatactagttaatatgtaaccagatgaaattgtcattatcgtcactgtcaggactatgggaagcttaagtgttctcttttcaaggacaatgtgcgctaactgtacaattggtacaattaaataagttatattcagttcctgggaagcactatagcaatacaaggagaaaatttgattctatttatttttgttaaggcccacstacctcctaatcctaatttctctcatttcccaaatattccttgtttgttcttactgttatgtgttttcctgtattttgctcttctactttcttttccatggactatctttttcccttcctttttttcgctctacccctttacctcagctttctagcagtatttgctaaatacttcaaaactgtatagaactggttcaaattgtgtgctcccttttctgtcaagaacttgctactcaggtaacccaattggtgatttttcctggaaacactgatggatgctgttcctatagcgaaacccagaacagagatgaaatagatgtcatcctcagccattagcattcaaactataaaaattaatttacactggtatagtaaggatcagaatgtcaaagctgtgttacacctagcatcttgtatgaaactaccccattaaggtgagaccacagatattattgccccactattggcatgaaagctgaggctcagagcagttaactgagttacccaggaccacacagctaagttagaagtagggctcaggtgtcctggcaactaactggtccagttattttttctctcaagctcgttttccctctcctaaagaataggaggctctgtcgtggtgaaaggcgattttagtaatactttcctttttatctgtgattataatgaatgcggcatctctcccattaaggatcattcctccacccacattcttaatacatctgctgcatgcatccttcagagacctccctctgggatcatcccttctcactccaaaaagctcaacttctcccctgtcatttgtacctcccactcagcatttttagaagcaatatttcattcaaacttattcaagtttatttccacctaaagaaatattcctttcaccctggcatctccgtcaggtactgctctgttgtttttctccccttcagacaaactgccaaactggctctagttcctcacattccccatcaccctcagcaagcttctgccccacaccggcactgaaacagctgaatcccaatgtccttgtccttaaacccagcagaaaaaaaaaatcaatcaattatttgatttcacagcggcacttgacatgggtagccaggaatttatcaatgacaacctttacagatcatctttgtaatttatcatgaggcatcaaatgaatgctattaacattaatccctcctattttaagtcattaatccaagtaaatgctcacttatttctagcrtcttagaaaccatttaaattatgttacattatgaatcaatacattataaaattataccatcatttgtaataattttttaaaatgttgtgtgctattaacattgatgccttggtataaagtcatgatcattctggtctagtagcaatcttctattgactattctcttactaaagcggtcccttccgtgggactcagagacctcacactctcctgcctgtgtttcttcctctctaattggcccttcttgctccacttgggtgctcctgcccattgcctagacaagagcattccctgtaactctgtcttgggctctttttctcttttcatcaacatcttctacgtgggtattatcatccatttccatggcatcagcttgcccaataaactgataaatccatagtctctataagtacagcagatctcatcaagctagtggcattcagactgctttaactttaaccaaaaataagggattttgtacatgttcaataagcagttcccactgtgacactgtaatcacattttcacaattgtgacctaggacacttagagtaaaggatacagatgattgagacagaaatagtgacaaagaaaaataaggttaggatatagattttaatgctgtaacagacctcaaaatacaatggcttaactaagagaatgcatttctctgtcacataaaggtcccaactggcgtagacttttgatgactcaagggctcaggctgtgcctggtttgtggttctgccttccttaacacatggcttccatctgatgagctacagcagtacctatcactagtcagcatgtccacattccagcctgggcaaggaagaaaggggaagcgcagaactgtacccttccttttttaagtcatgaactgaaagttgcatgtatcacttccacttgccctccagtcaccagaacttagtcatatgccatacccagcttcaagggagtgggttaaaaacatagaagtcaactaggcagtctgcacccagcaaaggatcgggagttctattattaaagcagaattggagaagtggtaacaggaaacaaccaccagcctctgctgcatgtatatgaaacagatgtttcccaaatcactattctcacttattctgtctgatacactgtattttttattatattctctttcattttttaaaatcctggtcatgactcacagggcatgatgttacaacccacttagatgctaacaccataatctgaaaaatattacctatattatgtctaatattggccacttgaagtatggctagcctaaattgatctatgttgtaagtataaaattcacaccagcttgtgaaaacaaattatgaaaaaaaagtctttaagatatcattaacaattttatattggctaaatgttgaaatgatcatattttggatatattggattaaatamaatacactattaaaattaatttaatgtttctctttatgtggttactagaaaatttaaaatttaaaattacacagggcgatcacattctatttctagtagaccacactgctgtaagctcaagattcaaatgtcaaactcctgtgaatattaatacgtgaatatcccacaagcacttactccatcttcccaaccctcagcccttctgtcctccttctgctcccaccaatctgtgtttcttctgtttcactcacccagctaaaggcaacacaattcactccgtgacgagccaggaaaatggaaagacacattttcctttattcctcacattgatatattcactgagcactataattacctcttaaatatgatataaatctgcaagctcttttcaataccaccacaaattccatagttcaaaatgccatcagctttcacctatattattacaccagctcccatctggtcttcctgcatcctggatcacctctttctagctgccctttcaaatttcaataagagcaagctttccaggaaacaaacctgaagtcaatccactgagtactcctctgaataccttaatattgttgacaaattcctttctgatttgaagtatcagaaaggaatatttcctccataccaaatagttttcatttcatgcatgtgccgtgattcttctccctcctttgcatctgtcattcgttatgcttagaaagctcttttcatctctttgttcttcgagacaaccactactcatacttcagagcttaatttacattttgctttccctcaaaatttttttaaaaggttccaggtctgggttatgtgctctcttatgtgctcccagagcatcctgaacttctgcaataatatgtttggctactgtattttatacagtagttttatattgtattttaactgtattttatacagtaggtgttatattgtattttatacagtagttgtttttctgtctgtttttgccccaacaagaatgtaaaatctttaagtgcctgttttcatacttatttgaccaccctatctctagaatcttgcatgatgtctagccctagtaggatcaaaaaatacttacaaagcaactgaatagctacatgaatagatggatgaataaatgcatgggtggatggatggattaatgaaatcatttatatgacttaaagtttgcagaggagtatcatatttggaaggcagtaaggaagtctgtgtagtcgatggtaaaggcaattgggaagtttgttaggcacaataggtcaaaatttgtttttgaagtcctgttacttcacgtttctttgtttcactttcttaaaacaggaaactcttttctatgatcattcttccagggcctggctcttcatctgcaacccagtaatatccctaatgtcaaaaagctactggtttaattcgtgccattttcaaagaggactactgaattctgatgtggcttcaaacatttaggttaggcatatctaatggagaacttgcagccacactgacttgtagtgaaatatctattttgagcctgcccagtgttgcttaaattgtagttttccttgccagctattcatacaagagatgtgagaagcaccataaaaggcgttgtgaggagttgtgggggagtgagggagagaagaggttgaaaagcttattagctgctgtacggtaaaagtgagctcttacgggaatgggaatgtagttttagccctccagggattctatttagcccgccaggaattaaccttgactataaataggccatcaatgacctttccagagaatgttcagagacctcaactttgtttagagrtcttgtgtgggtggaacttcctgtttgcacacagagcagcataaagcccagttgctttgggaagtgtttgggaccagatggattgtagggagtagggtacaatacagtctgktctcctccagctccttctttctgcaacatggggaagaacaaactccttcatccaagtctggttcttctcctcttggtcctcctgcccacagacgcctcagtctctggaaaaccgtgagttccacacagagagcgtgaagcatgaacctagagtcyttcatttattgcagatttttctttatatcmttcctttttctttcctatgatactgtcatcttcttatctctaagattccttccagattttacaaatctagtttactcattacttgcttacttttaatcattcttccccaactctctgaagctctaatatgcaaagccttcctaaggggtgtcagaaatttttagctttttaaaagaataaattttagatattcacattcatattgatctacttgagaccatgctatttatcttttcttatttcctctttctcaagggtccattttctattttataaaaataaagacaattctctcccacaaccaaacatggaacaatgccctggagtataaaaatctatagagtgccaaataaaggaacaatttgaaatactggtgttgatattgaaaaagcaagggactctaatgtcagaagagaaatccttttgcagatgaggtggtgatgaattctttgtttcaacacaactgaaggaggaactgaaggaaataccagctgatgagtgatgagaagggattcttgataatagagtactaggtgatttttggcatgtaatgcagaagttgcaagaagtggtaacaatgatgcaattgttttacctgccatttatttacttttatgtgagccattcttcttagcacttatagctacacaaaacaaaaatagtaacagaattaatgttgtttaattcttgcaatccatggatgcataaattcactgggggaaaaaacarctcatcattctcattaaagatgtgcttcaaaagtattttaattttatatctaatatgtatgaatcatactttgtatttattttgttttgatcagttatatacaagtatttttgaacatagctcagtcagaaggaaatgtttaatatttataaatttatggttacattctatttaaaagaggagttaaagttaaatttacctacccacatatgttacatatatatgtatttatgtatatgtattcatatatgtatatatgtgaacataagtatacatacgtatatgtatagatgcttgacaataaagaagtaagaataattcacaacattttttgaaatataaaaatttaggataaatttctgtatggtaattggcatggaaattcaaattcaaaaaggaaaaaagaagagaaagatattaaatatcagaccattaaaagaattttttaatgtacttttaaatagtgatagtaggtatcttatactacagtgtttattattcatgagaaaattgtaaaagtaatctaagtattaatttaaaatatcatcaaaaataatatcttttgctattacttaaaatcatgataaaaatatgtttacttgaaaatatgtaaggagtgcacagagtccaaaaattattttaggagttctgtgagcaaaaatgtataaaaactacagggttgatcttaaattacatgtcagggtactgagaaagtttctgtactgcacatgagttaccaaggtctaaagtcaatcaccagaggaccatttttggatggagccattgtctaatcatgagctgaaaggcaaatatttaaaatgcaaacatccatggttaggtaacactcttaagaccttattagctgcttaccacaactgagactgtgaagtaatggctcactttctttgaggctcagattccatatctgtggagtggaagcgagtgcttaccatacaattttcacagggctgctgaatgtgtgtatgtatgtatgtgtgtatatatattttaatgaaaattctataatttgattagtttttgtaatgtccgcatgactgagagcttgcttactttttacagcaacttgaaggtaaaaatagattttacaacatgaacaaatgtaactacatatttttatttgaattcagatgttcacaaattgttccttaaagtgaagcatgcctacaagttttaatctgtttaagacctacctcaagtaaaatgttcactgccatggcatgtgagggaaaagggaaataattcttatgcatggccttcaacrgccaaatttcatgctcatcagtrcatcttctcttggtgtagaactgatgatgataattatgatgatggaaaaaagtgctgttgatagcaatgcstctcttccttcactttcctctaactgaaccgtctcattcccaggcagtatatggttctggtcccctccctgctccacactgagaccactgagaagggctgtgtccttctgagctacctgaatgagacagtgactgtaagtgcttccttggagtctgtcaggggaaacaggagcctcttcactgacctggaggcggagaatgacgtactccactgtgtcgccttcgctgtgagtgtggctgtttgacttaatatacttggttcttttagtcagggtcatagggatctagtattctgtcagatgaggctttgggaggttgstaagaactgcaggaaggaatccaaatgtagcaaactaagtatagaaattaaggagcaatgcatgactmtccagccatgggagacaaatatttacaggcaaactaaaagtcagcttaataatcacatagaaaccctattagccagaaaggaaaaaaaaaaaaagaaaatgtgacttcttaaaattaagatggaaaaaatattaataaagcaaactagaccaaggctcaacatgagccacccgtggtggactgacaggaacacatcactccacactacttctaagagtaaaaattgtagaaattaccctgagcaaaggtgtaatatctcttcagagttgtccacatgtgagatgcttacagcctagtgtcagtaaaatacggggtttttttccatagcctgtaaaacatgcttcgaccatgcccttttagcatgtaatatcagcctggtaaagctcagcgtataattgaatcaagactgtttctgtgagctgtatgaaggtgtgaatctcacttacaacctctcttactgatttattttcctccaccttgtgtcctgtctccccatttgtaaaatggcagaagtgattcctgtccatgccaactttccctgctgagaacaagggagtgaagttaagtaagaagggcaagatctccagggaagagtgcaacagcaaataggggaggagacctgcgggtgctgaatggggtttcaggatcggtcctgtatttcaggtcccaaagtcttcatccaatgaggaggtaatgttcctcactgtccaagtgaaaggaccaacccaagaatttaagaagcggaccacagtgatggttaagaacgaggacagtctggtctttgtccagacagacaaatcaatctacaaaccagggcagacaggtatgaagaagcctacagacaggacamcttcaaaaaggaaagatcttcttcccctggatgttccccaggcaaagttcctataatcttggttccttaatagcttgtcttaccagcctacaggcctactttgggtttgggggctcatgaaaaatatttctgtttcagtgaaatttcgtgttgtctccatggatgaaaactttcaccccctgaatgagttggtgagttttctattatctacataaaatgattgtctgtataaacaggctgggaacctgttttttgtgctgagggaagaccagggagaggaagaatctggtatcattaacagtaacttctggcattacaacagcacaagatcctaatctaaaacatcattccaggtaaagaaagtaggtaattctttctgtcttggtgctggtactcagtcagttgtcacacaattaaatttacttttcggatggttcttaattaggacaattagaaagatacattcaatagcagacacagaaaaatcctcaaagaacctaagctcaaaaaacattttaaagatttagattttttctatacacatctaccaaaatcttcactataaaggaaagtcagggtaattaatttgttcctcaagactaactcttggtatctgtgataagaaacagttctttctattgtaatgcagacatcaacccaaagtcttcatttttctctcccaaattaacttcttcacattttcttatctcaaaaagaggcaactcttctcttctagctccaaagacaaaagattatggcctagttcttgtttctctttctctcatacccacatccacttcactggaaaatcatgttggcttaaaatatattcagactatttcttatcatctgaactactgctgcaagctagtcctagtcaatgtcatctctaaataagatcattacaataaccttcaaagtggtctcccagcttctactttcactcctctgtctaaaatgaggcaccacacccatcactctgtcagcctaacttggctttgtttttctatttgcacttaccaccattctatacgtattgatttttaaaaatctgcctatttctattataacataagctccattaaaacatggtttattgttcttttgtgcgtggttatattctcaatacctagaatgatacacagcgcatgagaaggtacttaataaagattagtttttaaaaatgaataaacattcatagtagcttcttatcaatgtttattcatttttaaaagtaatatttattaaactaaatttattaatgaaatatgtccattcctcctcattcttagaactacrtaagaattctatgacccatcttaatgattacatctgaacatatttacttatagttacataagtgtttatttctcaacctgtaaaattgcatagcaaaggattgawcttcactaggatgctataagcacttaagacatgttaatccatttttagtaaatggcactttacatgtatatttgttgctgaaggcctagtaagttcttaacattatttattaattgcttaaaatagattaatgaaaagttctataaaatttaatctggaatatttctgtatttcactatagagggaattattctatatgaaactaatttagattttttaaactttttattgtttttaatttttgtggaaacatagcaggtatatatatttatgggttacatgagatattttgatacaggcatgcagtgcaygataatgattatggatgataatcattatcattatccatatcattatccaatcatggataatgattattatcatgcattgcatgcctgtatcaataaatggagtacccatcccctcaaacatttattctttgtgttacgaacaaatccaattatacttttagttatttttaaatgtacaattaaattattttttactatactcaccctgttatgctagcaaatactagctgctttgcttataaatgagatttaagaatatttgaaaataattataaacttcttttttcttttgtctttcagattccactagtatacattcaggtaagcaacatgaaacattccatattaaaaggaaagcaatacatatagggaaaatgttcttatttcagaggtttttacaatatctcagaaacttgtcattaaaggagaagccttcaaactcccatagagctagatggctataactcatctcctctactcaccctttactactaccccatttgmcctttttgtagataacttagggtttccatagatatcttttattagctccaatgctccaggtgcttttgtaagttataattaatttactcatataggatcccaaaggaaatcgcatcgcacaatggcagagtttccagttagagggtggcctcaagcaattttcttttcccctctcatcagagcccttccagggctcctacaaggtggtggtacagaagaaatcaggtggaaggacagagcaccctttcaccgtggaggaatttggtatggatcatgaaaagtcatcaagcattatttttcttcatatttaaactcttaggtcctggaatttaagttcatttggagtctttccatttcccatgggtgacattgggcttggagtagaattaattacacctaagtccaatgaggacatcagtgatctgtgaataggacttmacatagcttcgttattttctgtagcaatatttaataccaacccccaaaattaaaacattcttgttttaatggagttttccataattaattaagcacacagtgatctctcatagtccctcaactgaaatcttcatttgagaggaggatagataagaatagattggagagcagagctaccttttcagagccctaaaatattattagggaactgttacagggaacctgaaaataggaattcccccaaagttgaaaaccaatcaccaaccttctttatcaccaatcaacagttcttcccaagtttgaagtacaagtaacagtgccaaagataatcaccatcttggaagaagagatgaatgtatcagtgtgtggcctgtgagttcattttttaaaaatcttttgtgggggattatttaaaagagactcaccatttgggatattttaactactctctccgggagcagtggcaacacaaaaattttaagtgctttgacagcatcctcatctgtagaatgttattctcctgttgcttttctatttttattttctttcacgttcttatcagtattattctatcatgaggtaagaaactgtttctagagaggttatgctaataggattgattctgaaagtgacaaaactgcacacacacacacacacaaaatgggaagggtggatagtgttgaagggtattggttctgccttaaccaaaaataaccaaacgtatattagggagataattaacacatggctataggggaaattcaatcatcaacagatcatttacctgaccttgcatgcttactggaaaaatcacttagattcagaatttgtagagataggcatacaactgaaatctcatctaactcactagtccacctaaggcgggtctacatacctgtctgcactgacatttttacgaagagactgaacgtgatttctcaagacagtctgttccaaccttgaaaagtcttgtttcctggatcttatgttcccatccatggtggcacacagtagcagtagcaggaagagcaggtatagtcctgyccaaagatcacacatgtaatacacctactattcagctaggcccctgctccagttctgtctcacagtgatggccaagttcctggttcctcataactggtgtgatcttgcaaatagacatacagaggacattctcaaataggaaaggagacaaatgcacttggaaacccagcaattgtctatgacatatttacgacacaatcccacttttgtaaaaaagtaaacaggcccggcgtggtggctcacgcctgtaatcccagcactttgggaggctgaggtgggcagatcacgaggtcaggagatcaagaccatcctggctaacatggtgaaaccccgtctctactaaaaaatacaaaaaattagccaggcatggtggccagcgcctgtagtcccagctacttgggaagctgaggcaggagaatggcatgaacccaggaggtggaggttgcagtgagccaagatygcaccactgcactccagcctgggcgacagagcgagactccatctcaaaaataaaataaaataaaataaaataaaataaacaagtgaaactcgatatagagatggctgcacatggggagaggatgatggaagaagagacactatcgtactaatagtttgtattcctaggtagacttgagggcgtttgggttttttttgttctgttttgttttgtttgtttcgtcttgctggtattgtttctcttttaagaacgggtttaagttttataataagaaagacttttttaagataaaactaaaaaaaaacgaggaaaaaaaagaaatgataaaagaagaatgtaaatttcagcatgttgcaatggagatttctataagagccattagtgactcttgtcttcaatattgtgtgagcccagcagagagcagagggaagtacagacagggaatatactgtagctaaaggggagatataaatagctagaaaatggggaggttcrgtgtctgctctgattcctttgggaatgbtctcatgacagatacacatatgggaagcctgtccctggacatgtgactgtgagcatttgcagaaagtatagtgacgcttccgactgccacggtgaagattcacaggctttctgtgagaaattcagtggacaggtaggttgaacactattttttctagagaatagcgataaaggcattgttgaaaagcagtgagttgcagcatttttctgacgcaggaagagaacaatctagaagagaattccatgttggctattgtaatttttcaaaaaaaatcatgaacttagcacaatgggaattatttatttctcgtaattgcccattgtgagtgtttcagaacgatagacrctgagccatctaaagcctccatgggcattcacttctacaaaggaaggaaaaaaccatacacctcttaattgccttagctggccaggccatcagttctgctctctctgtgaacaagaacctatcacatggccccaccaagatgccagagagttgacaaacacagtccccatatagaaggccgcttcccagccacagctgaatattatggaggaggaaccagactttgatgaggagttctaatggtcaagagcagatgtactgtgtatttcaaaatagcaagtggacaggacttgaactatttccaacacatagaaatgatacatacttgagttggtaggcaccctaaatcccgcratgtgatcattacacattctctgcatgtaacaaaatatctcgtgtaccccataaatatgtataaatattatgcatcctttgtacaaaaaaaattactcctcaaattttaagacatttctatcgcaatatatctagggaatttcagataccaaggaatacatctgtcaattatacatgagatattgttgtgaaatttaatatttagttgctagagaatattttattgtgtcctcgtcatagaaaatgcctacatgatgttgtccccccacaaaaatcacaccggttatctgaccactgatctatttagtataatatgcattatatttttgtattttattttctcccttcttagctaaacagccatggctgcttctatcagcaagtaaaaaccaaggtcttccagctgaagaggaaggagtatgaaatgaaacttcacactgaggcccagatccaagaagaaggaacaggtttgtgtacwacatgggtataagagaaaacacaacaggcattgattttcttagccaaataatgaattgtaagttggggggaggtgatagaattttagagacatcattcttcccaaaaataacagatttttttctcttttttcagtggtggaattgactggaaggcagtccagtgaaatcacaagaaccataaccaaactctcatttgtgaaagtggactcacactttcracagggaattcccttctttgggcaggtggagtattytccagttcactcatcaacccatgtactgttacctaattagcacaatagttatggtttgtgctaaaaccatgcctggttaatgttatcatttaatataaccaaaagtataaaatatcaccaaggcttgattagtataaccaaaggtataaaactacataaaaatagatttattcttctgtaaatttgtgtatgaaatgtatgtaattatcctaaggccttattaaaattagtagagttttccccccttcttttgaaacagcattgtacaagtcactcaatctccttctcatggtttaccaggcagtctcaggtttttatgacattttctcacaagaatctcaaaattcatgctgaccagtttcattacgatgctaacactaactttgtatggaaacaggtgggtaggtggttttaatttttattttgaagtattaaagattctacaataatgtttatttcatggatagtatatttacactatttttctataacaagtatatttctaaaacagtgaacatggggtaaaacactgctatttaaggttctcagatttttgaattatgaattttcatgttatctaccaaaaaaatcttctcttacaatttttctgttgtcagcagatgtgcaaatggatctttatgactctagaagtctgagatcacagttacatgtgcctcaatgtgtatttactgtgtatcattttcttaatgtaaatgttacaggatttcagctatgaagggtgtaaaagaggcatagactcaacaaagtggagtacattctagaaggcttggttatgtcatgacaccaaaatgtattcaacttcctaaaatgaaagtgtagctcatttgtaaatttctcagaaagatagtgtactttgtaagtacattttattgctgttaaatatcctatttgtcataagactctctagctagaagaaaatcagaattatgtgcctattcttgtctttgtacatgcagccaacatttcactggcaaacttagattttgtaaatcaattatgagtactgatgggggtcagcctattgttcttcctgctaccaactgtagcttatactgaaaaagaattgccacctttacaatctgaactggactactcaactgccaatacaatattagcagtaaattagatttggcaacttatttaatactgtgtgcctcttttcaattttatatttttcacatgggaagtgtgtcataaaatctgcctaccttccaaaaggctgaagatctaggttgagaagcagagaccatgtctaaggcaactggagaaacacacaggacaatgtattggcaattgtttacttgtgcacttatgagacttcagacactaatctataggaagttaatggtccactccaaaataggtgtttggggcacaaataaatttagttaatagattaatagattaaaatatttcattatcatattactctagtgctctgtgactctctaagagttatatataataatacacagcacttccaaaatatctagaagacatttttcaggtcactcttgttattatccctatcactctctatcccttcacactgctctgtttttcttcttaggattgattactactaaattagtgtatgttatgtatatatttatttagcatctatctctttcactagacagtaagctctgtgatggaagaaacttcgtttttttttcactgctgtgtcctcagtgcctggaaccatgttcaacatagaggaggcactaaaaaatgtgataaatgaatatgtttggtgcctattagttattaccaatataactaatccacagcttttaatcttcaggtgcgcctagtagatgggaaaggcgtccctataccaaataaagtcatattcatcagaggaaatgaagcaaactattactccaatgctaccacggatgagcatggccttgtacagttctctatcaacaccaccaatgttatgggtacctctcttactgttagggtaagtttggaaagaaattaccaatgacatgaagtagccttggaaacaaggttgcaacctaagggtgagaaaatttccaaactgtgtctagttctatggagagaaaaaaactagcaattagaaaccrattgaaggttaacttttttaaagtttatgaaaagaaggcagtatattgtgattaaaagtgcgggttagactttagcagtgttgctgggaacgtaaaatggcggagccactatgaaaaacagtatagtagttcctgaaaaaattaaaaaatagaattaccaaatgatccagtaatcctacttctggacatatattcaaaagaatcgaaaacggggtctcaaagagctatttgcacacccgtgttcatagccgcactattcacaatagctgagagatcgaggctacccaaatgtccatcaagggatgaacaggtaaacaaaatgtggtatataaatacaacagaatattatgcagyctgagaagggaagaaaatcctgtcacatgctacagcatgaatgatccttgaggacgttatggtaagtgaaataagctagtcacaaaaagaccaatactrtatgattcacgtacatggggtttctaaagtagtcaaagtcatagaaacagaaaacaggatggtggttgccaagggctagggaaagagagaaatggggaattcctcttattggtattcaggtttagttttacaagatgaaaagttctggagatctgttgcacaacagatatacttaatactaccaaactgtacactaaagaataatgaagatggtaattttatgttgtgtgtgtgtgtgtgtttataataacttttttgaaaagtgtgaattccagaatctgaatcagataaagtggttaaaaatactggctcaaccctattttaaggaattaactaaaacctctgtgcttcatttccttatctgtaaaatgattgcaatactaacacctgactcttggggtggttgtgaagattaagtgaaatmatacatgttgaatcacttagtaagccccctttaactgttagatacttttactataaaagccaattctaacataattagcatttagttttaaatatatatactccaaaaattattaccttactttattttgtcttgctattctaattttctccagatgacctgttcataccaatataagttattcggtatagcatgcagtcctctattcatcaagagagatgtagacatgtctatagatacatggatatacaatacatatttaatatatattacataatcatggtaatggaaaacgcctgcctctttagagttttaccttgttatagagaaataaataatacattttatttatttagctttaatagatggcataaaagcacctccctctaatttgaatgtttactcatttcaaaaagtgtcttgaatgctttccacgtgccagcactgtgctagtcttgacaatgaaattattatttctacctgttccctgtttggggtgatcatatatrtgttgtcaccaaaatatacattaagatatgaacaaaatgttttgctcaaggattcactagtgctattgggagctggggatgaaggtagaggaagcctgaaaggagctaaggaataacttctacaggaagaaaagttggaaatataacccaaatagggcctctgaggtattagaatccagattgcagggagcattaaaaatagtcagcctaggccaggcacggtagctcacgcctgtaatcccagcactttgggaggctgaggtgggtggattgcgtgaggccaggagwtcgagacgagcctaggcaacgtggtgaaaccctgtctctacaaaatatacaaaaaattagctgggtggggtggcatgcacctgtagtcctagcaactcaggaggctgactgggaggatcacttgagccccagaggcagagattgcactgagccaagattgtgccactgtactccagcatgggcgccagagcaaaaccctgtctcaaaaaaataataataatagcaatcagcctaagatagcccagaagagstagacttcagctaattcatcagctcagctcttaaaccaatgctttctaccaatgtcttctcagacccctaaggttacaatattttatttattcataatacccattcaaaatccaccctaaaagaggcagctgctttctgaaagcacagttcttccatttctagagattatttactctcctcaatgaagtttcatagctccagtgtctctaattgcacaggtaaagcagtcaaagaaatttcaagcaagctaatcagagcaaaggatgcctccttttatgctcttaagaaatataaatctcaatcccaggaggctctgcagtgtaaagtcacaaagcatgcctacatttgaagcagagaaasaaaatcaggggtccttctcccacttttcattgtggawcaaaagatttctagctactagttaaggtaggacagtaaacttacgtagttttgtgagaacattaatctttatgacgtataatctaaaaataatataatttttctaattcattaggtcaattacaaggatcrtagtccctgttayggctaccagtgggtrtcagaagaacacgaagaggcacatcacactgcttatcttgtgttctccccaagcaagagctttgtccaccttragcccatgtctcatgaactaccctgtggccatactcagacagtccaggcacattatattctgaatggaggcaccctgctggggctgaagaagctctccttctattatctggtgagaagggaggttactgcgttgacttcactgtagacaaaagctctctgtggagcaagtaatcatgaagctctttagatgtcattacttcaacttcttatccatgttccttttgaaagtttgatttctcttgaggtgaattattgccrgcagggactcaataaaacaagtatattgaagtgagactgaagcgtgttctctctggcacatttaatttctttttatttccttttttgcagataatggcaaagggaggcattgtccgaactgggactcatggactgcttgtgaagcaggaagacagtgagtatttccatcatctctgcattgctgccccattctgacccattcagccttacaccacggaagtatcagaatactttccctttttttccataggtttttgggggaacaggtggtgtttggtcacatgaatgaataaattctttggtagtgatttccgagattttggtgcacccatcacccgagcagtatacattgtacccaatttgcagtcttttatccctcacccccttccacccttccccctgaatccacaaagtccattgtatcattcttatgcctttgcatcctcataacttagctcccacttcctaatagcttagctgccacttcctaatagcttagctcctacttctgagtgagaagatatgatgtttggttttccattcctgagctgggaatatcaggaatactttcaagtaaygagagaccatttccatctaatattaattaaaagaaagttgagggagggaaaacaataatggtttttttctcaccctttatcaaatatgtgttgtcttttttttcagcctattttctttgcgttatttaaaatattggtgtgggccagctatgatggcttacgcctgtaatcccagtactttgggagaacgggatgggaggatctcttgaggtcaggagtttgagaccagcctggtcaacatagtgagaccccatctctataaaagtaaataaataaataaataaataaataagaacaaagggggaaaaataaaatacataaaatattgttgtgtataatctatgcttattccagatttttaaaccataaatattcttgaacctcttctcaaaatgagaattgtgttagagaatggggtggagaaaatgtacgatttcaaggtatgttgtatataccaggtcttgtgctgagtcatttatgtcatttatattattataaatatcttttttccctttcaagatagttatgatttatgaagcattaaattgggtacttctaccgactgaagcggactcttgccatgagcaaatatgtcataatataaacctttgaaggttgctcctagtctagtagactctaaaagataacttgctagaaaagtatcagtaatctactctctcattagttcttgtagcaacacagaagcaccatagcagactgaaggaaacttaatgcaacctctaaagaatctacataggcatcaaaaaataacttctgaaggagcatggtgttcctcttatggagaaagaaccaaatattggctcatagaaggttaaagagcatgtagcatgaatacaatgtgttgaactcttactcttacatctcataacttcaggttctatttccctcttctagtatgaggcctagatcaaatggtagtgaattggatgtcttcatacccttaactagcatcagaacattaggtgggtgagctgaagcttaaagctggtgaaaaatcaacagagtatatgatttatgagaggagagagggctttgatagggtttttttctaaagctagagtccttagaggtaatcatccatttgttacatctactgtttattatgtctgttacatctactaatggaaatagtcattaacctatgatggcttcctctcattctctttgtgccccagtgaagggccatttttccatctcaatccctgtgaagtcagacattgctcctgtcgctcggttgctcatctatgctgttttacctaccggggacgtgattggggattctgcaaaatatgatgttgaaaattgtctggccaacaaggtgtgtgttttagatcataaaatcttcaacatgtaaaactagaagttactattgttatcatttgttttacacatgtgaacattagggccaaaagggttaaacaaattccccagagwcattcagcaaggtagtggcagagtcacactaagaagcagaatcacttgattccttatacaaaactctcaaacttctcctagcagtgcctcttaccaattacacagttcagagtatgttattcccttcttctatgatgaaacgttgggaaatatgtaagcaagtttttaagactactaaggagccaaaagaaaaatgcaagagcacctagacccatgcatgtcccaccacaattaatragcaccttgccgtgtatcaaagataaaaatggcatttcatgactagtaatttataagaataattagaaataattctactggctcaagtgattcttgagaatgaaagagaagtgtagggaacaaaaagcttcaggattgacacaatgccaaccctccacgaagtcaagcagagtggttatacattgtacatgaggaacactctgcaaatgcgagygaatgcatgggtaaacctggaaatttgcttttctgaccttttgttccaatttcacaggtggatttgagcttcagcccatcacaaagtctcccagcctcacacgcccacctgcgagtcacagcggctcctcagtccgtctgcgccctccgtgctgtggaccaaagcgtgctgctcatgaagcctgatgctgagctctcggcgtcctcggtgagttcctggcagcctcaggaatcaagaagggccgtgccaggggctcagagcaaggaaaaatgactggataagtaggataagatcaattaaaattatatttatctaggaattaattgctttgagctctcttgtgggctttcattggtaaggaattwtatatatatatatatataactactcacttctgcagttaaaaaaataaacaaaatacaatatattgaatcaaataaaagaatttttaaaaggacaaaatgtgatgaaaattaacaaccaaaaaaggactcgttattcagacacgttaagcttcttgctcaagagcacatagcaatacaaattcaaatcttctgattgtgtcaggacatccgtatatgcaaggctggagagaatacagagcagattgtgaaaagtgctatatgagaagtgcagttatgcaaaataaaagaaaggattaactgagcaaccggggaagccgttcgaaaattatatatttaaaatgtaaaaagaccatacagtacccaaagtccttaaaatcccagagctccatgcaaccagtaataggagttgtcaaactagtttcaacatttcaaaaagcctaacaraagtgatacatatacctgcactgaggctatacaggctaaatgaaatatcagatttccgtttttataagaattatggctgggcctggtggctcacgcctgtaatcccaacactgggaggccaaggcaggcagatmacttgagrtcaggagtttgagaccagtctggccaatataatgaaaccccgtatctactaaaaatacaaaaattagtcagacgtggtggcgggcgcctgtcatcccagctactcaggaggctgaggcaggagaatcacttgaacccaggaggcagaggttgagtgagccgagatcgtgccactgcactccagcctgggcaatagagcaagacttggtgtcaaaaaaaaaaaaaaaaaaagaattacatcagttgaaataattgctgtcccaagctacacataatttctgagggaacatatgtattatctctgaggaacaaaacttagggaaattgaactactatataattgacattgataactgaactctttgaaaatatggagctaatagaagaaataccaaaaggatatgctgaattggaacaacaaaaactagttaatagcatgtactaatagtagtttgctcacatcttcaaatttttaatatgagaccaattgtaataacctcttactgaagctttttctactaccataatttaacaaagagaaatttatatttttattttcctgaaatagaaacttataaaaaaatrtttcttacttgtttgtccttctaatgggattttaactgaaaatattagaatacttctaaaggaagcatcaagtacatttcaacagtaggatctcaagaggatatgtgggaaaataatatacrtgttttatacttttataatataattttataattctcaaagaatttttcaaattataacaaccctgatgggtagataaggcagacagtcctatttattaataataaagcagaagctttcagggatttagtagtagacctgagttaaaacaccaactcttctcaagctttgattagtgtcttaccaatgaaacactttgctgctactagtgtaggtcattcattcaacacatttatttaatgcccactgtgttctaggtattatactaagtgctagtagagatcaagcagtgagctactggaaagataaaaatgtatgtctcatggaacttacattgtctgtcccatagatgagacagacaataattatgcaatatgccacaataaaagcagggagaggaaatgagaaatgttaagatactttgagaaagtgtctaatttcatcacaccactcactttgctcatctgttcttgtcaatcagttttaaactcctacgaatataatgcaatgtaactatcacaatttttatgtctgtcttacttctcaccttcaaatggacttgaaagcatcatgcctagaattttacggttaaagttgtatgtattatatgaagatctggagcattttgtttccactaataatacctaagaaaatgccatcgtgtcctgtggagagaggatattcctattcgtgtgcctgtttagaacatgcacccattaactttgctatatactgagtcagttgctcaccacaagataagcacaaaactatcatttccttctatcatctcaaagctttgtgcaatgtcacaaatacagcagacctcgatttttcaattaataaagttttatttcattccagtgttgagtctagtggtggcctctgaactgtgtaacgaagtagtacttagtacttagatgagtacttagatggagtgtttggtttttcctaaaattgttaaacatcttcaaaatgaaaacactgtgtcaagaaaatgatccataccctctataaatcatcaaagcaatgagagcgctcaaagaaagacggatgttcattattcctgttcttttctccttgaacttaaaaaatgtcacaaaggccgggcgcggtggctcacgcctgtaatcccagcactttgggaggccgaggcgggtggatcatgaggtcaggagatcgagaccatcctggctaacaaggtgaaaccccgtctctactaaaaatacaaaaaattagccgggcgcggtggcgggcgcctgtagtcccagctactcgggaggctgaggcaggagaatggcgtgaacccgggaagcggagcttgcagtgagccgagattgcgccactgcagtccgcggtccrgcctgggcgacagagcgagactccgtctcaaaaaaaaaaaaaaaaaaaaaaaaaaaagtcacaaataagtttgcctttttgtctttcgtatttgtacaggtttacaacctgctaccagaaaaggacctcactggcttccctgggcctttgaatgaccaggacratgaagactgcatcaatcgtcataatgtctatattaatggaatcacatatactccagtatcaagtacaaatgaaaaggatatgtacagcttcctagaggtaaactccttatgttgcagatggtctgatcttaagcttcttaaaatattacacatggaaaagagtctgtatttgaatgccttcatgtcctagttgagggtaatgggatataaagaggtaagtggcttctctactaatagcagcagatctgcgaaaagctgctgaactaagctggaactttttggagtattattcaagttttcttttttcacaggaattaattgctctgtgatgtttattaaaatcacatatacaaaataattactgttgaaagagtttaatgaaaagaataaaattacatccttaagtatataaatatcccttctacagatgtgaatgttaaaagtttaatttaagttaactggattgcttgtcaaattcaataaaaagaagtagctacctatgtatattttataatatatatttactgattagatgataattttctttgcaggacatgggcttaaaggcattcaccaactcaaagattcgtaaacccaaaatgtgtccacagcttcaacagtatgaaatgcatggacctgaaggtctacrtgtaggtttttatggtaaacaaaaaattaataaatatatattgcctaatatattcaccaaattttaaattttttaaaagatacaatgtgacaaaaattaacaaacaaaaaggacatgtgagtcatacatattaaggttattgctcaaggtcatatagtaatataaactcaaattctagtaaatggaggtacatgtgttaggctgaaaggaaagagaaagtttccaagcgtaggattagtgtaaacagaaatagaaatgttcacacaacaacactacattctccatcagtcaggtaaaaaagctgttcaacttccccaaaacatcagccaatatttatgttggaaccacacacattcatcaatgacatgagctacttctttgatgaactgaatagtaatcaagcatttatttatagtcccatattgtcaaatcatgattgaggataagttgagtacagagaaaagagggtcaaaaatcaaggaaagcatttaaggagaatcagttggctctatggaattcactatgaagcctaccgcatattttattatttataaattatattgtataatcctttatcagtaagatatatagtaaatttatgcatgtataggtatatatatatatatatatatatatatatatatgcacaatttttttttccagagagctggttgtgaaatattgaccagcacacccttaatagaaggtgaatagagtgaaggaaactaactgtaatcttctgacacgatagagaataaaaagtctttattattattaaacttttccctcctgtaaactgtttctcaaagccactgtcataacatgtgtgtcagtttttccttgctcctgcagaggagcacaccaatggaaacttggattcctgcccctcttcacggccttgtgtcataacactctccacttagcacagcggcagcagccacataggactccacagagtccttgtgccccacagacaatccaagcctctgtctgccaaagtctctatagcctctgcttatgaccctcctcccccagctcactcctagcttattcttgtttttttttgttgtttgtttgtttgtttgtttgtttgagacgaagtctcactctgtcgctcaggtcgcccaggctggagtgcagtggcgccgtctcggcctcggcctctcaaagtgctgggattacaggcatgagccaccgcgcccggcctctcctggcttgttaagtcawccaacatatttcctcctcaaagaagctttccttgatgacccaagcgccctctcctccttcctctctatttcatcagacgatttgttttttgttttttttttttggtggcaactattacattctctcataagctttatctgtatgtttattgtaatgtcttcttcctcactcaccatagagtcagatgtaatgggaagaggccatgcacgcctggtgcatgttgaagagcctcacacggagaccgtacgaaagtacttccctgagacatggatctgggatttggtggtggtaaagtaagtaacttcctgcatatgcaatatgcaacaatagaggtccctgactattttcaactctttgctagtttttctgtttttattgttttatatgtttatgatgtacaacatgatgttttgatatatatatatacacatacacatagtgaaatgattactacagtcaagcaaattaacacatccattagctcacattgttacctatttttgtgtgcatagcaagcacacctaaaatctatcctcttagccaagtttcagtatccaatacagtattatcaactrcagtcctcatgctgtactttagatttctaaatttattcatcctacgtaacttcaactttgtaccctttgacctgcttcttcccatccctgcaaccccaaccacctttctactctctgttcctatgtattcaacttcttttagcatccacatacaagtaagatcacgcagtacttgtcctgtgtctggcttatttcacttagcataatctcccccaggttcatccatgttgtcacaagtggcaggatcttcttccacttaaggctgaataatattccattacgcatagccacaatttatttatccattcacccagacacttaggttgtttttatatcttggcaactgtgaataatgctgtaatgaacaccaaaacacatatatctctacaaggtgcttatttcatttcctttgggagtatacccagaagagggatttctgggacatatggtagtttccattttaaaatttttgaggtatctccatactgttttccataatggctgtggcaatgtacatttgcaccaaggggagtgaacaaattccttccagagagacactggaaacagagttttatccstgaaacaagccagtggggcaggtggagagaaagagccggaatggccatatactccctttcaggctcctggagtcttgtttacttctccctttcactcccagatgcaggctgtttagaagcccaacccttaggagacagccagaaatgggagattttgcctgttctctctgtattgagccaaggggtggtgggggcrggtagccactggcattgctcaaaggcctatttaaaaccacctctgtgttcactgtggtctagggagactcctgattgcagagctccatctactcctggagctaggtgatttaggagccagacccttaggtacgagctgtaaacattggggtgcttgatgcatagacaaattattcccaggggtatgttcagacctggttttatccgtggggcgagccaggggaaggaggcatgggaagtgcccttactgcttttcagccttcctgtaagtctgtcgtttccctgctccttctgcttcccagtgcaggctagttagaagcccaacactcagtcagcaactgataaagtgggtagacgaagccsttccagggagaaactgggagctgttagctaatttttcagtactgaagtacttctttcaaacgcattgctaatttcaggagatgtttaacataaatacatcagctaagaagtcttactaatctaattgcatcagagctaaaaaattttgtgcaaatttaattctaagatttccagaaaatgggcataaggacctaatacaaccaaggactgcacagattgcctgtaagagatccctcactggttagcaatcctgagttaaatacagattcagtcaggcccactatacacaatagtagtagaatttaaaattataaagcagccctcagtgaaatagcattttagagaagagaacttaagaacaatctcaaactgcatrttaaatttataactatattgtctgtaaaagattatgctacaattctgatatactacaattaaaaacagttggaagaaaaggacttatattcccatctcaatccttgattatactctccattattggtatttctattgagtgtttttaagtcatggcagtagaatmattcctagggattctctccctagaaaggatgtatttaactgcttacttwctgttcttcacttacactcctctccagctcagcaggtgtggctgaggtaggagtaacagtccctgacaccatcaccgagtggaaggcaggggccttctgcctgtctgaagatgctggacttggtatctcttccactgcctctctccgagccttccagcccttctttgtggagctcacaatgccttactctgtgattcgtggagaggccttcacactcaaggccacggtccwaaactaccttcccaaatgcatccgggtaaggatctctttcctaaattaaatacaaggtagccatcaagtaaattaaaagttgcattcctaggaatactgcaaactcttgtatgcaaaatatgcttactagatattcatgattgtaaaagttacaggttttgagatctccaaataccaaattgcaccataaagcaagtttctagcccttataacccttcaaagttagtatttgtgtggtatgaagaattctgacaggggtgacaaaagtcagtactctattctcatgacagattctacaaggtttcaacctctacgatctcatatatttaacttttcgtagctcattcattatattaaacctaattttaaaagtcgtttgtgagcatcttacctttgctgaaaccataactgtttataagtcttgtatcctctgccgggagatccgggggaatggtcaaagttccagaccaaagaggtagagcagcatgccatcattacctttcccttcctctggtcccatcatgtgaaagagcaggttgcttccaaaataactcagatttacctgtgtaaatctgatacattaagatccacttaaatatatttcaggtacttgatcttcatttatatcatctttaatgtgaggcaacctgaaatctaaccaattcctcaagatgctttacttcaaacccattctccctctsttctccttccctctctactccctttcttatgtgtggtttcaggtcagtgtgcagctggaagcctctccygccttcctagctgtcccagtggagaaggaacaagygcctcactgcatctgtgcaaacgggcggcaaactgtgtcctgggcagtaaccccaaagtcattaggtgagcaaaaaactgctagagataattstctactcaaagattgtatatggcagtgggaaccttataktgagtgctacttccttcaggaaaagaccactagatgctgcgatttttttcctttgccttttattctaagatgcctacaaggatatcctcaacatctccaccttgaattctcagtatcattcacctctcatttgcatgtttccgttcctgcttctgtgttttaataaaacaaaagtttacagagcattgaacatttctaaatcttgagtttggaggcatggaggaaggggaagatgctattcatttctactggcctttttttwcaggaaatgtgaatttcactgtgagcgcagaggcactagagtctcaagagctgtgtgggactgaggtgccttcagttcctgaacacggaaggaaagacacagtcatcaagcctctgttggttgaagtaagtaaacctaaataatatatagtccacaataatatataatatatgtgggtaatataataatatatggatattttataatattattctcatgtatctctctgtcctatctctctcttgatttactttctgttttgttgggggtttttgtttttgtttttgaggcagagtcttgctctgtcatccaggctggagtgcagtggcaggatctctgctcactgcaacctccgcctcctgggttcaagcaattctcgtgcctcagcctcctgagtagctgggattacaggtgtgcaccaccacgcccagctagtttttgtatttttagtagagacaggatttcaccacgttggccaggctggtctcgaactcctggcctcaagtgatctgcccacctcagcttcccaaagtgctgggattataggtgtgagccaccatgcacagcctccctttgatttactttcttaatttttccttcatttgttcatgcatcgaactacctcctacgtatattgcttatatgtacagaattttcttagataatacagttcaaatccttctcttcactatccaaatatctgtggtccctccattaaaacacatgttctgaaggtcagtccattctcactagcttttctttcttttacctaaagcctgaaggactagagaaggaaacaacattcaactccctactttgtccatcaggtaagagtcaaccatcataatttaaaaaacattaaagtctaacatttaaagttcaaagaacatttatatattattcctacactttctctgtgatctaagacctgaagcaccatcaatgcatttgacaaatgtggaaaatagttcttaggaaggccaagtaatttgatcagaatatccctaggcctgcattctgagtcttgatcttttgcagcacctgtgcaaacaccaaatgactttctgaccagtgtatggtatgggcataggtagaaagtgggtagaatcaaaattaatattaccaaaagggatgtttccttaaataattaataatgcaaactatggacggctgaatttagggcattctaacactgagttttacatagccaacagtatttgataacgggattgctatttcccaaaggaaaagttgtcatggcctttaccattattgtcatattaatatctgtttgatgcctatcccgtacctaatgccctatcaaacatttgagaaggaactgaagaaacttacaggaaaaatttaatacactaagaaatttatcagcacaatgcattctcaccccaaaccaacattgaatcaacatcatacataggttcattgcctttctctgactacctacaaatttagtatgtttttcgtactaaatactttatctattcatctgttgccaagatgtaacacataaaatgtaccctaaaaacataacttccttgtcatttagccttatttctacatttaagtgaactgattacctaycattcaatccttttatcatgacttctccgtttctgagttactcattttgatgtatctcttaagtgtaagggctaatcatcaaatagttttactaaatttcattttaattaccaacataatcaaatgtgcctacctaattttacaaaaatatattcttctttaaaaaaaaaaacagaacatcacattaaaggttaatgtcacccccctgaacatttttcagtactttgccatccatttatctttagaaataatgtgtgtagatgtatatgtttgtggwtgtgtgatttacatataataaactgtataagtttcattctataaatcactgtttgtttttcamtcagcatcctgtcttggagatttacctatgttaaattgtagatctaggtctttccttggaattgcttttaagcctataatataaatacatcacaattctgcttagtgttttagtcttcctatattggttttttcaactattcactagctttaaaaaattagttagttaattataataagagcctcttaatgaacatatgcaagtacagctagggtagatccaaaatgttaaattcctgagtcagagagcatatgcatagatatgcatagttttgtttggttggttgttgttgttgttctttaattacattgtaaactgaccatttataattgtatatatatacagcatacaaagtgatgttatgatttatgaataaaatgtgaaataattaaatcaagctaacctgaaatacttatgttttgtggtgggaacatttgaaattctctaascaagtttgaaacataaaatacactattattaactatattcaccatgctgtgcaatagatcccaaaaagaaaaaaatgtattccttctgtctgagactttgtgtcccttgaacaccaccttccttttactccagcttcatcctccataaccaccattctactctctgctcctgtgaatttgaatgttttagcttccacatacaaatgagaacatgcaatatttgttttcctatacctggcttatttcacataacataatctcctccagatttaatcatgctgccataaatagcagaatgttcttgttttttaaaatggaayggaattctatgtgtatataccaaattttctttatctgttcatctgttgatgacacttatgattccataactagacagacatcagtaatttgttagggattacattcaatatgtagattgctttgggtagtgtggacattttaacagtattaattcttccaatccatgaacattgtatttttttcatttatttgtgttctctttgatttctttcatcagtgttttataattttcactgtacatttcacctccttgattagatttatttctacatattgtttatagctattgtaaatgggattgtttttatttctttctcaatcattcattgttagtgaacagaaaatactactgatttttatgtgttaattttgtatcttgcaactttattgcattcatttataagttcttgcagccctttggtgaagtcttttgagcttccaatatataagataatgtcatcaccaacagtgaaaattttacttcttccttgtcaatttggatatttttcatttctttttcatgtttgattgctcttgctgctacttccagtgctactttgaaaataaatggtggcagtgggtatccttgtcttgttccagatcttaaaggaaagtctttcaattttccactgttaaatatgtaagctataggtttatcatacatgccctttattgtgttgagraacattgcttgtatatctaatttggtgagagttttatcataaaagagcattgaattctgtcaaatactttttctccatctaacaagatgatggtatggtttttacccttcattctgtaaatgtaatgtatcacatttattgatatgcatatgttgaacaatttttgcatctcagggataaatcccacttgactaggtagatgatccttttamtgtattgttggatttagtctgctagtttatttcgtgtggttggttggttggtttagttttttaagtgatgagcttttgctgtgttccccaggctggacttgaactcctgagttcaagcartcctaccacctcagccacccacaggtgtatgccaccatgcttagctgctatgctagtattttattgaggatttttgcatctatattcatcaagaatattggtctgtaattcttttttgtaatgtctttttatgacattggtatcagggtaatgcttgcctcataaaatgagcttgaaagtattccttcctcttccagcttttggcagagtttgagaaggattggtattcattctttttaaatgataagtagaacctagcagtgaagccaacagttattaggcttttctttaatggaaaactttttattactgattcaatctcyttactcattatttgtcagttcagattttctatttcttcatgattcagtcttggtagtatgtatatgtctaggaatgcattcatttcttctagatcatccaatttattggtgtatacttatgcataatagtctcttatgatcctttgtatttctgtggtatcagccataatttctctttcatttctgattttatatatttaaggcctccctcttttttcttagctaacctagctaaaagtttttgtctgtctttttaaaaaaacaattyrgtttcattgatcttttgtattctttttctagtctctatttgatttatttctgctctaatctttattattttcctttcttctgccaattttgagcttastttgttcttcttttcctacttctctgaggaatatcattagtatctttattggaaatttttcttcttttttggtgtttattgttataagctttcctcttagaattgcttttactttatgctatgttttgttatgctccatttccatgttcatttgtcttaagatatttttgaatttccttttaaatttctttattgacccattggctgttcaggagcatgtcatttaattttcatatatttgtgaattttttctaattcctcctgttactcatttctagttttcatagtattgtggtcagaaaagatacttgatacgatgaaacgatttcagtcttcttaaatttgctaagacttgttttgtgggctaaaatatgatctatcttggagaatgtttcttgtgtgcttgagatgaaatgttctgtatgtatccattaggtctatttgatctaaagtgttggtcaagttcaacgttttcttattaattttctttctggataatctatccatttttaaaagtgagatgttgaaattccctgatattactgcattgcaacatatctctcccttcaacctttaatatttgttttatatatttaggtgctccaatgttggatatgtatagatttacaattgttatatccttttgatgaattgacccttttatcattatataatgttctcctttgtctctttgtacagtttttgactttaagtctgttttgttgaatataagtatagctacccctgctctcttttagtccccatttacctagaacatctttttccttctcttcactttcagtctatgtgtgtccttaaaaattaggtgagtctcttgtaattagcatatgtttcggtcctgtttttttaaatccattcagtcactttatgtcttttaaatggggaatttagtccatttgcattcaaggtaattattaatttaaaaatgacttggtactaccattttgttgttttctggttgttttgcttctttgttcctcttttgctgtcttcctttgtggtctgatgttctgtagtggtatgatttgaatcttttaaaatttttgttctgtgcttctattaaagatttttgccttgctgttactatgrggtttacagtcaatttcaagctgataacaacttaactttgcattctttcactcccccacacacattttatgtcgttgatgtcagaatttacatattttgtaatgtgtatttattgacaatttatttttagctatgcttgttattaatattttgtcttttaacccttgtactagagataaaattgctttaaataccatcattacagtcatagagtattttgaatatggctctatattacttataccattaaattttgtgcttttgtgtttttgtattattaattaggggccttttgtttcagcttaaagaactcccttcagtaattcctgaaggcaggcctaatgttgacgactcccttagcttttagtttgtctgggaatgttttatttctccctcatttctgaaagacagctttgctggatgaagaattcttgattccatgttgtttttatttttgttttccttcagtactttgaatatattattccactctccctcagcctgccgggttmctgctaaaaatccatggatagttgtattggaattcctttgtatgtgatatgtttctttatcaccttctgcttttcagaatttttttttgtctttgatttttgatagtttaattattgtgtcttagtgagcagttctttcatttgaatttcactggagacctctgtgcctcctgtacttggatgctagcatctatcccctaattagggaagttttcagcccttactgcttttttttttttctgattctatactcttttttttcattattgctttaaatgtgctttatagtctctttcttcttcttctggactttctttaatgcaaaggtttgatttcatgatgatgtcccataatttccataggctttcttcattcttttgtctttctgctcttctgcctggataattccaaatactctatctttgagctcactgattcttctgcttgatcaagtctgctgttgagcttactttgaatttttaattttagtcattgtattctttatttccaggatttctatttggtttctttttgattgtttctatttattttttattttacaatattagctaagttgcagataattgtttctatttcttttttttttatactttaagttctagggtacatgtgcacaatgtgcaggtttattacatatgtatacatgtgccatgttggtgtgctgcacccattaactcgtcatttacattagctatatctcctaatgctatccctcccccatcccctcaccccacaacaggccccggtgtgtgatgttccccttcctgtgtccaagtgttctcattgttcaattcccacctatgagtgagaacatgcggtgtttgtttttctgtccttgcaatagtttgctgagaatgatggtttccagcttcatccatgtcccaggaaacaacaggtgctggagaggatgtggagaaataggaacacttttacactgttggtgggactataaactagttcaaccactgtggaagtcaatgtggcgattcctcagggatctagaactagaaatacatttgacccagccatcccattactgggtatatacccaaaggattataaatcatgctgctataaagacacatgcacacatatgtttattgtggcactattcacaatcgtttctatgtcaaacttctcagtttgttggtgtattgttttgcaaatttcatttaattttgtatttatatattcttgtagtccactgaatttcttcaagaggattattctgaattctttgtcagtgatttcatagatctttatttctatgaggtcaattttttgagcttggccagtttcttttggaggtgtcatcattccttgattcttcataatcctgtgtccttgcattgtttgtgcatttgaggagaaagccacttcttctggtttttataggtattctttggcagggataaaggtttgctatttagtctagcctataattctggaaagatcagttggtgacaaccttgagcaggcagagttttcatgggttccctagttggctgggccactgcctttgcycttatgtttggtagggccactggttgggccttgctctctggcaagatcactgttttgtctctgctatctggtggagctgctggctgggtactacaatggcctctggtcaggccagtcacaagatgtgttgcctggctggatgattctgctatttgggacctgaagttaggcagggtcacaatccgggctgtgaggttaggtagagttgttgcttgggatgggcagaaataaatactatacttcttagatgtgcataatagaggattgctaccccacccttgtgaatggagccatggagtgaggttttggctgagttgagctaccctttagactcccaggtcaagcatatttaacccctacacttctatgaaatacacagaggtggtgtctgctacctgggtggggtcactggcataacctctgaagctgggcttacagactggccatctggaaactcaagctaggttgaacttcccaacatgcttctgaaagtgaccagctcagttttgcagatgggctatgcagttggctggtatctctgaatgggtgccatagctggcagaaacacagaagcactaccaaaatccacatgctggtcactgtgagctctgtccttctttgtttctacctgacctcattacttcctgtgttcccggtgaaatgagaccagagtgggcttcctgagaagtgtctttgaatacttgagaatcttgatgtctacccctggttctcttccccgctgtagaaactgtgaccccagggaactcctctctatctggcattgtgctaacctaaaggagtgggaacaatgacatggtcaaagtgagaccattcttcctactcttctaatttgtcttcactcagttctatgaacaatgtaggtgtcctagacttgtttccaagtattggggttttcaaaatagattttctgatctgtggatagcagctagttggactttctgtggagggaggaagatcctgagactttctagtccatcatcttgctttattctgaattttaattgaactacaaaacgaaaatcctcctctttattacctaaatgcatttatacttccaccaggatacatttccatagtgttatatttgccatcatctgttaccatcaaagtttttaattttaatttttgccaaaaatttagaaaaaaaaattttgctgttgttttaatttatattttcttaattacaaggatgaccttatttttgcatgtttattaattgcctttataatctttggctatttgtcttttgagtagtttttttctgactcagttgtatgacactaattctttatctgttgaatatgttgcagatattttctttcacttggtcatttttttaactttgtttatggcatctgtttttttacaaaagttttaacattaattttatgagaaagggaagataactgctacatttttcatttgtatataattcaccaatactaaaattgtagtaaatgtatgttcatcartagcagttattttattttcagtgagtcaagcattttattttgcttagccatttgtcctttaactatgcttatggcttttttttaagaaacattttaatatgaattttatgaggaagggattcagtatgaaaataaatacyatacttctctcattttcatttcatataatttaccaagattaaaatggaagtaaatgtatgttcatgagtagtaattattttattttcaatgcatcaaatactgttcgtcttcacttccttaccctcaattttctaggttttccataaaaatactatctttgtatatgaaatttgaagaaagaacatagcattattatagaattcaggaccttttgtgggtaattttacttatgtatacttatagggctttgttgttggtgttttctccatacaactgttgagtaaggaagttggtggtgggaactaaatagatcatcttgtgataaccgtcttgtgtcagccatcagwwgacagcaactgaatcacaacatcaccaggctcttacaatttgttgtcttatttggcatgcgattctacataaattactgaaaagatcattgaagaagaaattctgaaaatcacaggaaaccagtagcccatttttaagatatttatatattactgttgtattaaaggcggacaacttttcaggaggagtttaggtataaggcatagtcctagcttctgggtcatagagctgtttagaaasatataatgcagaaataattttcatatgtctgatttgcttatttctctaggtggtgaggtttctgaagaattatccctgaaactgccaccaaatgtggtagaagaatctgcccgagcttctgtctcagttttgggtgagtctccagcccctagtggatccgggcattaacagcttctattatactatttttatttcccataaatatttactaaaaataatactataattttaacttctttcttctcttcttctttgggcttgtttattgctttcaatcatacttctatccctggaagaatcatccttcctaaaaattctcaatttctaagctcaactaattatttctgcttaatgactttgatagatgataatctccaagctttatgacttcccatctctcccattctctaggagacatattaggctctgccatgcaaaacacacaaaatcttctccagatgccctatggctrtggagagcagaatatggtcctctttgctcctaacatctatgtactggattatctaaatgaaacacagcagcttactccagagrtcaagtccaaggccattggctatctcaacactggtgagtgattacttgagtaagggaaaacttgaatgttatttcaactggatttcccagtaggtttcagttacttatgaatattatgatacattagcttagctcactatgatagctgctatgatagttaatttcaaggaaactatccactctccaacctccaataaaatatttaaggctcagaaactcctaatctatgacaacaaaatttaagaaatgtcacaagagaagccaaggtacttttagtaatttctccaccctcagcatgcacattaatccattgtgctgtttcgttaatcttcctttccaggttaccagagacagttgaactacaaacactatgatggctcctacagcacctttggggagcgatatggcaggaaccagggcaacacctggtaaggaaagaacaattttttgagcttctttttgtgtgccagctcttttacatgtattacctcaattatattcacagcaacactatcagatatgtattatcagaccgatggtttgttatactagataaatccaccaagattagcaaggtaatcagaagaaaacctgatatccaaatacatgttatgttaggcttgtttccaraatggatcctattaataatgtaccaaggttttctttctgaaatggctattctttctaaagtagctaccataaccatgagttttaaaatgatattgccagtgaacatatataacttccagataaaccatgttaacttcagcttatattgtcacattctaagtcattcagcttgacttggaatgaattcattaataagaggaaacaattgagaaggaaacagtaatataaaacatttttttaaatccctaaagtaaagcaatattaaaatttactgcatgtaagagctgcatgtgagaagattctgtcatctgcagaaggaaatctctaaagataagagagatttaaagccttactcaagtaactaacaaaaataagtacattcaaattacttgaatgtaaatttgttcaaccattgtggaagacagtatggcgattcttcaaggatctagaaccagaaataccatttgacctagtaatcccattactgggtatatacccaaaggaatataaatcattctactataatgacacatgcacatgtatgtttatygcggcactatttacaataacaaagtcatggaactaacccaaatgctcatcaatgacagactggataaagaaaatgtggtacatatacatcatggaatactatgcagcaataaaaagaaatgaaatcatgtcctttgcagggacatggatgaagctggaagccatcagcctcagcaaactaacacaggaacagaaaaccaaacaccacatttctcactcataagtgggagttaagcaatgagaacacacggacacagggacaggaacaacacacaccagggcctgttgggaggtgtggggtgacgggagggaactaagcggatgggtcaataggtgcaagaaaccaccatggcacaygtatacttatgtaacaaacctgcacrttctgcacatgtatctcggaactaaaataaaattaaatatactwagactccctgtggcaaagagagagttagcaaggaaatactacatctagcagattaatcaggcagactaaagattaatcaaggagataagmtctctaagtacacaagaattttgttagctaactcacatcatatgaagcctgttgctgtgaagtggttataaaaccattttgacaacataaacatcatgattgcttcctccctggtcaggctcacagcctttgttctgaagacttttgcccaagctcgagcctacatcttcatcgatgaagcacacattacccaagccctcatatggctctcccagaggcagaaggacaatggctgtttcaggagctctgggtcactgctcaacaatgccataaaggtgaatcattctggagctagttttgatttgtccattatgatatctgcaaggatgaggataggaagtgataatgtgaaaaattctaagggaaagcctcagaggaaaataaaacctggatggcaccaaaaaagaggggatagaacaaaagttgattgtgatactttgycctatagggatggatatgggtaaggatgaattccatgacacagcagaatagaaagaactaatcaatagcattctcagaagttgaattattcaratctctctctygtattcacagggaggagtagaagatgaagtgaccctctccgcctatatcaccatcgcccttctggagattcctctcacagtcactgtaggtaccaccccattcctctgctgaaggagagttctggatgcaatgaaactgctgacctgctgtctgaaatactatcctattaaaagcaaagcatcagctttctttctatgcaatgccagtgcttcccagatctacagagaatttggtcagcccattaagaaaggtttaaattttcccagtaattcccctaggctatttaccaccaccactcaaaaaagaatcttaaagatgtatcttttgaatgtgagaataacagataaaaataatattatatctattgataagaatgaggaatcgttggaaaaatgcrtttgaaaaacttctgtgctgtgatccgtgtatttgcctgggaatgctaatatgcctgtttacatagcttagttcccttcttgttctgccttcacagcaccctgttgtccgcaatgccctgttttgcctggagtcagcctggaagacagcacaagaaggggaccatggcagccatgtatataccaaagcactgctggcctatgcttttgccctggcaggtaaccaggacargaggaaggaagtactcaagtcacttaatgaggaagctgtgaagaaaggtgagagcacacctgagatccttctcctggcccatcctctgtatcaagaactgcatggcaaaaatccctcactcctacctcctgtgatccctgtctcctctcttcttttctatatatcatatatattttgtccatattgcatcttataaaatctaggatttcttaatcaaatcagaaatcaraagacaagaggcygtgcagatgcttctcaattacgatggggttatatcctgacaaactcattgtaaagtctaaaaaatcttaagtgggaccattgtaagtcagggaccatctctatagtatgctggtaagaagagcattctctggagactagctccaaaatgtgctacctatgtgagcttgggaaagtcattaacttccttgtgtttcagttccttcatcagtaaaatggggataataatagtatttacctcacagagctgttgtaataaatgaattggtacacgtaaaacacttagtagagtacatgtcacatagcaaatcctataaaagtactagttattacaaytaacatatcagttctcaatatatgcccaacccttacctggtacattatataaccttaaacataagaaaataatcatggaagtaactccttgaatgaattctggtattttaagcccatttcataagaccaataatgttgaccaatctactcatattcacacagtacttctacatataccatggtctatatgarcrgttgaagaaatagaaaataaaatgcaaatcacaagatgtccattaaaacagtctacctttttcctttgacagccattaattcttcttaaaatgtattgagaaatattttataatagatatacaaaagggcataagctataactagaaaacactgtacarctctctcatagattaagaaatagaaaattaccgacrtgggaaaaataaatcccttgtgtatcactaccacctccagaggcaatcattatcctgaatttgtygttacaattccatggatttccttatatttttgctgcatatgtatccctaactaatatttagaatcttcacrtgtgtttcatcttgagagaaacaagatttttatttctctcttrttcaagaaacaagagaaacatttttgaatatttcagcagcttagttttttgtttgtctgctttttattttctaagttcaacactatgttgatgaagacccctatacmagtatgtgcagagtcagctcattaattttcactgctgcataatatattacagtctataaattagtcataatttacacatcgagtttctcctcatggattttttttatgttttgctaytaaaaamaatgctgcaatgaatactcatgtgcctgttttcttgtgcatctgtgtttctccaaattatgctttgagaagcataatgactgattagtgggctaagcacatcttccccattgctgaatattgccaaagagcagttggcttcccacagcagtgtatwttggttcccattgtttcacatccatgtcagcctttggtatttcaaggattactgtattttttttttcaatttaatgagtacaaactctactatttcatgtgatctgtgatcctcacaagaaactgataaagacacactttataggaaatgtaacaaactccagctatagtctaatataacatcataaataggaaatagccagactcaatgagacaactgctgtgccatttctttctcccaccaacccgactatagcaacgatttgaaaacatagataggcataggcttctgactccagcatcaatatctgccttagctgggctaaaacacaccaaattcagatttacatgaagggaaaagcatctacatacagtacaggggattataatgggcatgcaattctcatttcagcactggcttgggtactttcaccttgaattaaatataaatatgtaggcacttataaatatctttttctcatctttaagacaactctgtccattgggagcgccctcagaaacccaaggcaccagtggggcatttttacgaaccccaggctccctctgctgaggtggagatgacatcctatgtgctcctcgcttatctcacggcccagccagccccaacctcggaggacctgacctctgcaaccaacatcgtgaagtggatcaygaagcagcagaatgcccagggcggtttctcctccacccaggttggtgatttgccaaaaccttttatttcaccttcaggtagcaaaagatttgaatgaaaaagaaacaracacatccaagaagaaaaaaatacagatgwcagtaacttgaaatgaggaaaagttttcagtatccaaggataatggaaataaaagcaaatcaaagtcaaagagrgccaaaaggaaatgctcagaatyccggcaccccatcgctgtgttattatccatctcctatttcccataacaacactgccttcctcaagcagcagtggagcaccagcagaatgaaggagatgtctcctgccattctcctgaaagctctagggtctctttcaaactgttcaaaggaactctactcaaaatccaacaacctctcctcgcaaatctctccattcttaggtcccctttaataggcttttctcaaaactacacattttgtgcttcccctattcaccttttttttttttttttttttaagacagagtcttgctctgtcacctaggctggaatgcagtggtgcaatctcggctcactgcaacctccatctcccaggttcaagcgattctagtgcctcagcctcccaagtatctaggattacagtcatgtgcaatcatgcctggctaatttttgtatttttagtagagacgaggttttgccatgttgcccaggctgatctcgaagtcctgagctcaggcaatccatccgccttggcctcacaaagtgctaggattataggtgtgagccactgcgtccagccccctattcacctcttaatacacaaacatttattcatcaggagcataaagaactgtctttattcatccaacctcctaaatctagctatataaccatgtatctgaacaattcattgatatgtacacagcagaaagttttatcttcagagaattyggatgtttgcttatataccctaaaayggaaaaaatgtgacaaaatggcattccatcctatttccattgtattaatcttttatcatatgaatgaaaaaaactaagtaattttgttaaaggttatcattcatttattagaaacatattatttgaaggaggccaagcaggtttaatgttgttgaggatacataccagcagacattcactgggaacaggaaatcatccaataaaaagggaaagccaaataaaaatgtcattaaatccagaagataattataatactcatcttttatttcttttggagaaactgaagcatgactctgctcatkgctgcaaagaaccttgggttctctccaggacactgacctcagcaactgagcaaagtttaatatgggagagagccagactgaactttgcttgagtggtggcagatatgagcatagttgtcaagaaagacatgttagcaaatagctgatgccaataactgattgccattcacatgttttccacattccatgtcccacatatacttacagagagaaaaggatcaattttctgataaataaaataaacatgtagggcatacagtccaaggtagatatgtgaatgttatggttcttcaactatctaaagattataatcaatcttgaaattacagctcctatatttaagtagtgagggaagtaggaaatcaaagtccctcacatgggtctttgaaaaatatctcagccctcaaagccttataatgcccaatgggttctctcactcatctgtctctaacaggacacagtggtggctctccatgctctgtccaaatatggagcagccacatttaccaggactgggaaggctgcacaggtgactatccagtcttcagggacattttccagcaaattccaagtggacaacaacaaccgcctgttactgcagcaggtctcattgccagagctgcctggggaatacagcatgaargtgacaggagaaggatgtgtctacctccaggtgagactcttgggcaggtgaggacaggacagatgaggacagcagctgttctctctgagaagtcctaactcagaaaacaatgggacagatcagagaaagggttagggacrtggacaggaattctgggaaagggcaaaaaactgattttgtctttgatgttctatagacatccttgaaatacaatattctcccagaaaaggaagagttcccctttgctttaggagtgcagactctgcctcaaacttgtgatgaacccaaagcccacaccagcttccaaatctccctaagtgtcaggtaagaccttctgactctatcacctaatcctaagaataaccaccagtcttctttcgggaactcctctttaagtaaagcagtgcaacagtagatatttgcactattcacaaaaaatgcaatgtattctcttaagttgatataatttctcaatgatggggtttacattgtccatccaggatctactattgtgcaacctcattgtttaaagggtaataatttccctcaataacaactaagtaaatattacccattgcctctgacctgaattccttgttatgtaatgaaatcctatattattcttgctttattgaagatagagatgaagaattattgaaaagtttgaatagaaggaagtagtgactccttagttagaattcctactggcaataataaatctcaggttatatatgatataattaatttggggggaagatacacttatatgcatcaatatttaaatagctgcagatctgataaaaaactctctctccacaaacatattattacttggttggagatactattcaggaaaaaagttaggacaaaatacatgtaacaaataactggcacacatcaaaaagaatgagatcatgacctttgcaggaacatggatggagatggaggtcattatccttggcaaactagcacaggaatggaaaaccaaacactgcatgttctcatttgtaagtgggagctaaatgatgagaacatatggacacaaaaaggagaacaacagacaccagagcctacttgagggttaaggatgggaggagggagaagatcagaaaaaaacaacaattcagtgcaaaatttagtacccaagtgataaagtaatctgtacaccaaacccccatgacacgagtttacctatataacaaacctgcatgtgtacgcctgaacctaaaagttaagtatatatatatatwtttttttcatttaatttggtgtatatatatgccaaaaaataaattaagcagtccaaatttcggatgcaaactctrrgggacaagacgctaggtgtttctaagtgttttgttgaaagccagtgtttaagtaaacattataaattattgttgtttttgtaaataatgtagactgaaatttattattcataatatacatcattttgtcagctgaaagaaaataaaagtaaacaaataaataaaataactggcatagattagaggtcacaaacagcctgtgcatcacttgtagagctttcttaaaatgcagatcctcagccgggcgtggtggctcaygcctgtaatctcagcactttgggaggccaaggcgggcagattaccttaggtcgggagttcragaccagcctgaccaacatggagaaaccccgtctgtactaaaaatacaaaattagtcggamgtggtggtgcatgcctgtaatcccagctactcgggaggctgaggcaggagaatcacttgaacccaggaggcggaggttgcggtgagccgaaatcatgccattgcactccagcctgggcaagaagagcgaaaaactccatcaaaaaaaaaaaatgcagatcctcagcccccatacactagacattctgattcatcaggtctagagtagggcctggtctctgtggctttaacaggcttcctaaaaattctacgcacaccacttttacaaaccactgggataagatatttgggaagacttacgtgtaccttttagagctgtggaatgcttaacatggacatagaagaagaaaatatttaaaaacacagaaaaccctaatcctttcctcccctggatcctcagttacacagggagccgctctgcctccaacatggcgatcgttgatgtgaagatggtctctggcttcattcccctgaagccaacagtgaaaatggtaggtttatcataaccccagactgccctattttatttaatgatgtatgtatccccagcataagacaatactaatatcaaaatactattaaagtcaatctctatcaaagccttatcctttttccagctcagaaatayaatcacatgtgtttgtatgaatgctgaccatgtgcagagcactgygctaggacccatgactacaagaaaaagattgtcagcaggttcctgcttttcaatttcttcttagcttagaattttgctaagaagataaaagatatgaacacgaaccagtgaaaaatatgaaaatgactgattggcataaactataagtattacagaagttaaaagaaaaatagagcaagcaaaacaggaaaaaaactccttatgaagaaatagaaactgaattgaactttgaaatatgagtaactaccaagtttaggatacttagctgtcttttcttcagataaataactttacacattagtcgtgtgttatactaatagtaaaccctttatgcctttcatttttaattgtattacattatatatttccttacaaaaagcatttgaagaattctaccctcagggttattttggcaatacaaagattttttctctggatcccccaggggtttcatctatttattaacatttgtggtatttcaattttcttcagcttgaaagatctaaccatgtgagccggacagaagtcagcagcaaccatgtcttgatttaccttgataaggtaagagaacttccagtctatttgcaaaaaaacgtagataataatcctctaaggraacatctgggaaggtaaatgcattttagaaacatcacttccatgctagaaatttgagaattctaatgttaactctaaaagaatgttcttctctcctttatttatatttcaccagggattacaggtagaaatggcttattatgatcttgggatatgaatattcctaaaatcccataagcaagaratcttsacaaaatgtgtttattatgttgacaagttttttggatacccagtaatayaaggaagtagcccttgtgattagtcaattattagttaattatcaacatactcaacaacaatatgaaagggaaaaaaaactgtcagtctccacaaggacttgaaccataaaataataagaccagttcaccagtaaaccaatctgattttatagatatgtgtggtaggagagtttgttcatgcataagttgatgggaattatagtttacaaattttatgaaacttaagcctgggaagatcaaccttttagahcctctttgagtctacgcaagtattcctgcaagacagagaagtcaaactataccaaatctctggatattaaaaaatgaacacagttagtcrtccaataaaaagtatatatcatttacccccatgaacagagctatgtattggcattgacagaggtatatgcrttatgttagttatttaagaaataatctggagaatttatcatcccctctgagagatttctgcacaatttaattaaggaccctatagtgtgctgtaggataataaagcttttcccccaaaaaacaggtgaatacttaaactaattcaaagagagaagaaagcttcctgaaaggtcatttaattgacttttgctttccaggtgtcaaatcagacactgagcttgttcytcacggttctgcaagatgtcccagtaagagatctgaaaccagccatagtgaaagtctatgattactacgagacgggtgagtgagagtgattttcacgtagaaatatttaattcctgatcacagaaattcaggtttaggagatgtgttggggttatttattacattaagtaattacattatcacttcattttgtctccatcaagtctgatgcycctctttttgtctcttatacatacattatagaaacaacctacattataaatttatcaactactaatacaaaacacctgtgggatatttagttcccttttcatcagataaatggactgtatgacaatatgagatttaagtaagtagaacatctgaagagtccttcaggagtttgggataaaagaatatataaaacactatatttgaaaggagaatataaggtagcaagcaacacatcagatgaatgatgcttatgtttctggtacaatactgttcttcccacaacaaactccttccttggcctgtatcccacagatgtttgctttctttctcacttcatgtaatgatttctggttttttgttggttttttttttttcagatgagtttgcaattgctgagtacaatgctccttgcagcaaaggtaagccactcacactcctccaaaaggcagtcagagctccttcagcttgtcccccaaaccttctccttcataaaacgctgggtaaatatttgtcaaaaacatcaaattactcacactgcacattattatagaaaaacacatttattggagagggccgctgactctgtcaaacctcagagagtccataggattgcttatgggtaatgatttggaatagatttggtttcccwctgtactgattaggtttccttgggcactatgctacccagaactaaggsaaagaatactctctgctcatggagacccaaatctgtcttaattttttttctttccaatgtcacagatcttggaaatgcttgaagaccacaaggctgaaaagtgctttgctggagtcctgttytcwgagctccmcagaagacacgtgtttttgtatctttaaagacttgatgaataaacactttttctggtcaatgtctttccctgtttcctgttcattcaataaatatcattgtacatttccatatgattcccaatagaataccaagattaaacttaaaggaatcaagtgctgaaggacttcagaatacaaaaaaatgatacagtgatgtcggtctgagtaggcttcatgtaaggactgtggggaaagaagaaagtattgggttatgtactaggaaagtgtaaagtgtgtttggttatgggaataccctatgaaaaacccaaagggtgaatttttatgagaaaataaaagactgacttcaccagaaaagactttttacattaaaatgaagtagaatgaaatacaacattgaacakgtcatattgagaggcaagataattgggacttgacctgaattgggagtgatgtgtcctatgttacamcaaaatctgccactgatgagagtgatcagtcagttaacctggggtttcagattcaataatagatgagctgaaaataatgaagggaggattcatgcagaagcacgttttctcagaagaaggaatgtgtatgactcaaagtccaaataggagtattatattggatcatctttcttctggaactttgagccaggattaaaggatagctgtaaagtcaaggagatattctgatgcagaaatcagttctcacaacatctgattgatgtctgatgtctcacaacatctctttagtctatttttaaaatatataattttctttgcagtaagtattgcgacatatatttccattctatagaaggggaagcaaaacttcaggagtttttgaagtaggaaaggttaaagcaggaggattgagccaagagagtctgaggacaatcgtaggagtcctactcttcatttggcacaaaaatgacaatgcttagttaggcagaaggtgagtatggattgtataaactaagaactggaaaagactttgcagttcaaggaatccttagctctgtctccaggctagacaaaataagaaataaaagctatcacttctgtgtggtgcttatagaatagaattaacatatcagcattatgggatctttagggtgtcgctttcctggccagtctagtggcacctttgcctgagttttgctctgggcccactgggctgcttctgcccactcgcacttgctaccaacctggatcccggatccaagggagattgagacgggtggagcagaggggtgtgctaggggtgtgtgagcaagcgtggccactgtgcagtcacacacacaagctgctgcccaggttgggcagctccaggtgccagcacaggctctccatgaggtggctggaccaggcacacaacaaacagcttccccctggaccaggcgcatcacaagcagcttccaacagtggcactggcgaatgcagtgacgccaaccagggccccaaagagggagtcacagcccgggctcaaggagctcccaggtctgggcttctccgagggccagagctcttctctccctgtggggagcaaggggcatgttgcagccctgtttgtgttacagctcttttaaccttgctgtgcagctcctcagctcctgcatcaagcagacaagtggagaatgagacagatgaagaggagcattactgagcaatggaacagaaggataaggaagatgaagaggaaggagacctgcagttagtagctcatttccacagtaaggatgtcctttccacagcaagkgtgtcccaacgagtgttcagcttctagcagaamggagaccctggagtggctggctcctctctgcaaacaggtcttcccattgagtgttcagctttcagcagagaggaggttctggaatgggtagtttctctccacaggtaggtcatccattgtcttcccatcctctcttccaatctagctgagtctgggggattttatgagcctcagagggaggaaatgcatgctgattggtccatgggcagccatgagtgggcccagggagcagcaccacaagttacctctctggtctgcaggcttcaagccctcaccagcttcagggtgggacttcactggggacccatccccttccacccaggaacctgtctgcctcctgctcccaggctgttcatgccaaggagcgcctgmaagtcagtgtccagctgtcttcagacccctctcagcctccctcccacgcttgttggtgcccaagttccaaagggggccgagacggcagggggctggcgtatcagcactgtcctgagcgtgtgcacgctcggccaggctgtgacagtacccaggctcggcccgaccttgctctgagttcagagtgggtgctaacagtggagagaagccaggcagccggagtaggcaccctggagcctgcagtgggcaggggactttgctgggcctctgagagcacagaaaatgtccacagccgcggcaaggtggctgcagctgcaccctgggagctcctgctccaccagttcggaaggggcggggctcctgcttgtccctggctcacctgctcctgagtgtgcaggtccggtggcgcctccttgcaggctgggctgatgggcgggggcgggggggsgggggaggaagggaatgttccaggtcctccctgggcccgggactgtgtccggggcagggatgacgtcgctgcaagttcttcccgtggccccggggctcaggggcagcccaggactctccctcgcccggctcacggccctgcctggggggcgcctccgggagcagatcacgagccctggggctcagccctcaggcgcgtctagctcggcggtcaccccagtgccgggaggaccctgaagacgcgccccaggcggccctactcagagcctcctcccaaggcccaggaatgcggcgctgtcggaggtgtgcgcggtggccacaccgctgtccgggtccccaaagcgggccccgctcccacttctcgccttggccccgaaccctgggtccagccccagcgctttgtgtgcgaacaccgctccgccccggacccagctccgccttggggcccctctctgcctgcccctccgtgcccgactacactgcttcccctccggcgggcgactcagcccggtccatcgtggcggcttccagggcggcaggctccgggagtactcccggggccggctccaaggactgttcccctcctccccactcccactccgcggcggcggcgggcgagagcggcgacatagggccagggtccggagcggtggaggctcctggccggggagcacgtcgccccacccggcaacgcgaggatggtggcggcgcagtcggctgctttggggtctcaaggcacaggggacgcgaggcacagatgtcccacagcagccactgcggctcccgcagctgctccgccgccgctgcccgcccctccctgctgcagctggcgtgatggcagcggcagctctggacgccccactgctgccaccatcagccttgtgaaataggtactaccttaacaaatgaaattgaagcagagacatgtaatttgcccaaagttactaagttagtgacaaagctagaattcaagaccaagaagtctagcttccatgctcttaacttccaaccatggtgacacctcaaacaacttcagacaaaaaggccaggagaaagtatatttcagagcttaataaacattataattagctgtcaaattaagtatcaagccagggcacagaacataaaagaaatcagagtatggctatgggaacaagacaacaggattataattttacctcttggttctagtttttttctttgttcatatggaaatcgttactgaaaaggtactttaaggatatgcttgttgcaaatcattagctgtatcactgaccaagagtgtttattcctgaaatactaactgattgcctactatctgccaggcacaatatcccatgctataatacaaaattaaacaaaataggattcctcccttagaaaaactcaccgcagagtaaaagaaaaagatacacatctgggtcattataatgatcaggtgctcaagctattcattgccccagtggactggagatacaatggccttctcaagttttggggtattacactcaaattcatatgtaatactggagaaaaggcctaattacaactaaaactggatttcccaccagcctggtggcatgggaatcttggaattaaaattacgtagaatttttaaaagtgatgtatcttctacatctgattttgtgaactgaagtttattctttccaggaaagcatatagatacacgacaggaaatgaaatggatacttgttggggtcagttttatgtatagtttgtattttattttgaaatatgatacactgctattctcttgcattttcttatatgtgactcaccactaaccctatattcccccatttcaggccagttggtcataagcatccatttgcctcagagaatactgggttgttatgacaagaatataaagttggaaagaaatagaatatttgagtctaccctgtaagaataaaaagaataaaaggggtttaaatttatttagaccctattgtttaatcaagaattctggccaggagcagtggttcatgcctataatcccaatgctttaggaggccaaggcaggaggatcatttgaggccaagagtttgagaccagcctgggcaaattattgctcgggaaaaaaaggtcttatttagtattttagtctttacaatgtttttttctattatgcaatattctctcaaatactttatgtccatccacgttgtctgagacatgccactttaacattctagttaygctgtagctgtcattttaccctaagccgttagtagtactgatccacataaaattgggctgtttaggtgtttaactgtttaaatgtataatatatctgatatatttatatattgtataaaaaatcacctaacacaatagatatttactatgtctgctataaatatatatcatataacatataacaatatattataaatgataatatactataatataaaatataataaatatattataaatgtacaatatatccgatataaatatataaatatgtcaactatattatacatataaatgtatatgtataatatatacatatatgtataatacaatgtatttattatgtatatatataaatgtatatgtataatatataaatgtataatatatctgatataaacatatcagatatattatccatctattgtgtcaggtgattctttatacaatatataaatatatcagatatattatccatctattgtgtcaggtgattttttatacaatatataaatatatcagatacattatccatctattgtgtcaggtgattttttatacaatatataaatatatcagatatattatccatctattgtgtcaggtgattttttatacaatatataaatatatcagatatattacatatctattgtgtcaggtgatttcttatacgatatataaatatatcagatatattatccatctattgtgtcaggtgattttttatacactatataaatatatcagatatactatacagttcagcccatcaaagcaccatattttggggggttggtttccgtgtcccaacactagctacgaaaatattagctattagctacctataactcttcagtagtaaattcaagaaacgtaaagtaattctcttcattaagttcttgccttgtctactaaaaaaatggtcatcaccgatgtggacaatgaagacctgtggggttaaaagctctaactagtatgcctccaagattctttgattgcctgccatcatgatcgaagaataaataacttctttttcatcttatttatttattttttgtagagatagggtctcgctatgctgcccaggctggtctcaaactcctgggctcaagagatccttctacttaagcctctcaaagtgctggaattacaggggtgagtcaccacgactgaccattaataatttctttcaatgacactttaacataggctcattcatctttacctctaaagaaaagtctttctggtctttttaaaattatattttttggccaggcacaatggccaggtgcggtggctgacacctgtaatcctagcactttgggaggccaaggtaggaagattgcttgaggccaggagtgcaagaccaacctggcaaacatctggaaaacatagcaaggccccatctctattaaaaaaaaattaattctatttttctaagagaaaaaagattcccaattcaacaacacttttcaaaaactttatctggcagctactcaggagattgagatgggaggatcatatgaagcccaggaattcaaaaccagtgtgggcaacatagtgagatcctatctcataaaaaaataaaaaataaaaaaagctttacttggaatacaacccatgactctggttataaatacaaaattcttcaaattcatttaaaggaatttaatcctagcttctcggatgaaaaaaggaaataatattcacaatttgatccatcatcagtagacaagttaaatgtgtttcacaaaagcaagacatattaattaagcaaaatcatattcgagtaaccacaggaaatataaatatactgtctcttacctagagaaatcttatagtctaattgtgaagatagtcttcacgtgacgaaaaagatcatcattaatccaaaacatataagttataaagaagcgacatataccagcaattctaaaatctggttagcatcctttgtagaatttattttaaaatgcagatatccaggtctcatcaataaagatttaattaattatttttggggatgtgctcagacatctgcgttttttgttttttgttttcgtttttttgttttttgagatggagtctcactctgttgcccaggctggagtgcaatggcgcaatctcagctcactgcaacctctgctcccaggttcaagcaattcttctgcctcagcctccctaggagctggaactataggcgcccaccaccacgttgggctaacaggcatctatgtttttaatgaactctgtaggtggttctatcatgcagttagttttcagaaccattcacactgacagtaaaggctatttattcccagcagttgaaagaccactaaggacacaggaatggttagcaaagctacttaaagatgccagggctggggccgggtgcgatggctcacgcctgtaatcccagcactttgggaggccaaggtgggcagatcatgaggtcaggagatcgagaccatcctggctaacacaatgaagccccgtctctacaaacaaacaaacaaacaaacaaaatacaaaaaattagccggatgtggtggcrggcacctgtagtcccaactactcgggaggctgaggcagcagaatggcttgaacccaggaggcggagcttgcagtgagccgagatcacgccactgcactccagcctgggcgacagagcgaaactccatctcaaaaaaaaaaaaaaaaaaaaaaaaaaagatgccagggctggctgggcacagtggctcacacctgtaaccccaacactttggtttgggaggccaaggcggatggattgcttgagttcaggggttcaagaccagcccaggaaacatggcaaaacctcatctctaccaaaaacacaaaaattagccgggcatagtggcatgcacctgtggtcccagctactcaggaggctgaggtgggaggatagctggagcctgggaagctgcagtgatcagtgatcatgtcaccacactccagcctcggtgacagagcaagaacctgtctcaacatacatacatgcatatataaaattaaacataaaaacaaaaataaataaagatgtcagggcttatgttgaaccttaactgagagcaagattcaaaagacactgaggcttatttttctttcttatatctatagttacacagggagctgtctartcttggatgtatccaagttgatatctggttttatccattgaaacccacagtgaaaatggtaaataggtgctaggtgtttggatttttttaatccaatgtaagaataaaacaatggtatcctaataatgtcaaagcaacattggtcataatctaaggaaattgaattcatatagtaccaaatatatatttagcattgtgctaggtgctgatacattctagataaaaatattacacatgggtaaccaaaactgtcaaatgacatttcagggcaagatataattaagtaccaaaatcattggcatagtctttaagtactgtgaaatgtagagaaagctgagatgaatggcagtgtagagacagatggctttgcaaatcatctcagatgactagctatccaatgtgaggacacttctccctcaccttcaaacaaatgctaaagacgcctgttacttaatcatatgaatattcaatcttgtatctaatgtggtggtattcataatactctgtatatgttttcatcttactggacaagtgtcttcgaactcatttaaatgaatttaaccccagctttgtttatgtatagacttcttcaatctcatagtctatttgtctctttgtaccccacaggctttctttattcagtaacactggtgatttctcttattttccttagcttgaaagatctagccacgtgagcaggacagaagtgcacaacaaccatatcttgatttctgtggaccaggtggggcccctgccagccttgctagacagacccaggtgaacagtccttctaggggatctcatcaccaggcaagcacgtggtacgagaagagcagtcattaggaaggccatttggaaaagcacatcctctctgttcacgtgagatattttacatcctcattcctcatcgcaagcttcctgggatttggagtgtcacagacaagagggttgggggaggccagtaggtatggatttgtttatattaaaatgagcatatgaatatttatatgtttatattaaaacatatatgtttgtttatattacaatgagcatatgaatatttatatgtttatattaaaacatatatgtttgtttatattaaaatgagcatatgaatatttctgtatacttcagataaacattcttttccataaataagcttcatcatccagaagccatgttgaaagttggtaatcaaggataggaagtgtttccaagggttgtcagtgattaaatcaaccttaccttagcatacatgtatgagagaagttagataaattatacatagagagatagctagatagataatagataaataaggtagatgacagattagatacagatgataaacagatatgctatcagtctagatctattactcacagtcagtygtatcacagtgtaattccatcaacttcatttgcagcaaaagaacagcccctgatgtacgcctgtttcctgaatatttggaaatattaatattaatatagatagagtcagcttgccagtataaagaatctatctctcactataggcagagccatgtgttggatattatggaggaatatgtattattttaatcgtttaaaagactaataaacttctaatctacttttgggagcctctgctcaagttcctgaggttcctactctaaaatccacatcaccctccaactgctccctatgtgagccattagggagcacaatgaattagagaatgaatcctattagcccactaaaaaattatctttcaaaggatgaagactgatgctaaggaaaaagagatgaggcctccctggttccgcattattactccttcctttcttgggttacggattgaacactgaccttttctttcactcttctgcaagacaaccccataagaaagctgaaacctgcttttgtgaaagcctatgattactataagacaggtgagcaaaacagaatmctagataaactcagttctttccagtgtggtgtctttgatggaaaaataaaataaaagccaatgtgtttggggtttttttcttttttactttatatagatttagggggtacaagtatggttttgttacatggctacattgcacagtggtgaagtctgggctttgagtgtagccatcacccaattagagtacattgtacccattaagtgatttcccatccctcttgccctgtcaccctcccacccttctgagtctccagtatctgttatcccactctctatgtccatgtgtacaaattatttagctcccacttataagtgagaatgtgaagtatttgacctcctgtttctgagttatttcacttgagatagtagcaacawgggtggaagtggaggccaaacctcaattcttaaagsaataaaagtgtggtaaacccttgtacatcttgttttcagtttaatctgtctccataacttattttttcttccttggcctacaaaactactgccaaaactacctgtaatatacatgtatattgatatgtaagcctatcagtcgtgcaaaataatccaaagtaccaagagttttacgtagaagtgcttataaataaaggcatacataaatcttaaaaagataatatagcaatgcaaagaaataaagaagagcctaagaactatacaaataattatagtaggaactaagagaggggtgagaactatagcgttgagtggtctttaaacagcaaatgaagaggctgggcacagtggcttatgcctataatcccagcagtttgggaggccatggcagaatgatctcttaaagctagaagtttgagaccagcctgggcaactaagtgagagcccatctctacaaaaaattgaaaaataaaatcagccagcatgctggtacacacctgtagtagtcccagctactcaggaggctgaggcaggacgatcattggaacccaggagtttgaggctgcagtgagtgaaagagtgagaccccatccctaaaatacacacacacacacacacacacaccccccaagtaaaatttcagctggaatataaatcgtgggtattatactgatttatggagagaaktatgctaagtctttcagatgaggaaaacatataagaaatatcatgcaagaaaaaagaagcaaatatggaacaagaactgaaagaacacatacccgcgtgatcccccctagtactttgcttgaacactgtagcatgagcaggctttgattttccaccagagtaacggattatactaatggtatcaagagtggaaattccttgaccatgtctatatatttccccagtgagctgacatttttgtgatcacgcaggccctgattcagtatggtttgcagtccttaaataggtcaaagcctctccacatagccctgtcccgttgaagctcccattctcaagcttttctcccattgtgtgtttcagatgaagcaaatttgctgaatacagtgtcccctgcagccgataggcagtttgctctacatatcccaagccttcattttgctctcaaaagcagtyctcctaaatacaaaatcatctacatcttttattagttgatatcagatttatcatactgcaaggtaacgcagaactatacagctttggagaggaacactaacttcctggaaggtttcctgattttcttatcagaagagtgtaaatgaaattaccctgtgattagggtagatatctgatggattccattctcagccataaccagtttggtctcctttagcaaagccctgctgctgtccatatccaattagaattaaattcactccttggcaagcccgaagtcatcctgttcgctttcctcttctctccacaggcacagagcaagaaaatgtttgaggcttgtgtctataaacaagacttggctggaatccccagacccacgactttttaaaaggatattttgtccctgcaatacagatactgaatgaggttggcaaataaatatgtatttctagagactctataattgattccttcttcatttaatgcaaatttactccatgcgcacttactgcttttyattgtaccctgtatttgcaataaacaaataatggcatccaaattgaggtaagagcacctagcataaatttaggaacaattcacaacagcctcactactgcagaacctcagaatatgcaaagcaatgtaatggcaatctgggaaagtttcactccaagaaaaaacttctaaactgaagattagtgacaagagtgtagagtatatctgagtggaaacattttttgcaaaagcagaagaaatggtttattttagcaccaggtaaaatgactggcctgtctagatagaagctccgtattgcagaaaggtgaaaatttatcaatcaatcaattaattaataagttwtgtttaggtgggagtcataatattacgacaatttcatggaattagaaatgcttaacttctggtccaaaatctgccactgaccatttgtatgactttgggttgaaaaacatctggatatcagttttatgtgtgtgacagaatcacgtgttattggagaagtataaataagtacaggtggcgtatcccttatccaaaatacttgggaccagaagtgttttgaattttgaattttttagatttgaaatatttgaagtatgcttaccagttgagtatccctaatccaaaaactggaaacccagaatgttccagtgagtatttcctcctagcatcacttcagcacttgaaaagtttcagattttggaacactttggatgtcagatttttggattagagatgctcaacctgtatagtagatcctctcttaacaccattgataggttcttagaaactgcaactttaaatgacatgacatagaacaaaaccaattttaccctaggctaatcaatataaccaaggaataagatctagtgttcagtagcaaaatagagcaactatagtaaacagtaatttactctccatttaaaaataactagaatagtagaattgtgttaggaaagctcctaacacaaataaataataaacgtttaatgtgatgaatatcccaattataagtgatcattacacgttgtatgcttgtataaaaatacatgtaccctataaatacatgcaactattatgtatccataaaaattaaagattaaagaagtccatgaactattatttttcataaagagtcataggaaaatttgcctttttaaaattttgcacataaccttggtaataaaaattatatttaaattttaaaaataaaatgagctgtttctacagcatatatctgatcacagaaacatcaccaaacttctaaatgaagacccaaaacatttctaatattgaacattgaaataaacatgataaataaataaaaacaaggcgactccccaatttatggtgaatcactgagtgacagcattcatagtgttacatgaccaacagattcgtatgaccagtgcacaataacagaccagttacactgagacagcagggtttgtagcagagaaagggtttaacgttcacagagcaccaagtgaggagatgtgaggggaccctcaaattcacctccctgaagagttctgggctggggcttttaaggggatcatggagggtgaggagctggagaattgggaccattgattggctggggtaaggagaatgaattcatcaggacatggaaactgcattctttggtgagtcagctcctatggggtccttcagaccagttgatgtcagtagtttcattagtatgcagcacctgaaaggatatctcaaatggaaaactttgcattttataatgttcaagttgttatctgtagagcagttaaggggaactacgatctagggtctgtgtgattctagggcaacaggcagcaaacaactaggaggaagcaggtccgagcacaggctgacctagtgcttaatgctgagtgtgctgcaagctgggtttattttcatttctccccctcccttcttccctgattaattttataaagtttatagggatggtttccgtagtggtgatgggttaaatcaaggaagaaatgtttacaaaccaaagttttggtaggaagtagcacctcctaccagcatgcagttcaacaacaaatgagaacaaatgtggtggggtcgcgagcattttcatcatgcatcatttattgccatgtatctgtatgattatcatctacttcacagggtagacatctgatggatcccattcttagccattaatttcacaaattattgtgaaattatgtattcattctttgtttctttttccaagctgtgtattctagttcagggtcacaggtggtcacagcctttcctggtagctcagggccaaggtgggaacaaccctgcacaggacaccccgtcgcaggcacactcacacccacactcacactcagactaggaccatttagatgtgccaacgaacctaatgtgcatatctctgggatttgcaaggaacccgaagtgcccagaggaaacccacacagacatggggagaatacgcaaactccacacagacaggtggccctggccattgtctcatcaacattataacaaaacgaggttgaacaggaacaatcttattggaggacctgctgtacaggaacaagttttctaaggagattwaaaaaatgtagaagcacaaaagagatagaagggttaattttttaaaaggcaatactgagtatctaccatctgcctggcactgctttaagcatttttctggtattaggtaattttatcctcacaatcacattatgatgtagatactattattaatcccatttttaaatgaaaaacagaagtttggagaagttcagaaactttcccaagctccaagtgaaaaatgaggcaagattttaacctaagcattccagctccagagtccatacccttaactacttctcagtgctactcagctgtgaggaaggagacggctgtctcttcttttgagatatcagatgatggtgggaggctgaatgcagaaggacrgatgtgttcaaaagaagagaaagtatgtaaaagcaaagcagaaaaaagaaaaatggggcaaagaaaacaggaaaggcatctgtgagacccttgggtgagttcatgtctgagacctgttggcatcagcatggcgtgattgtccgyttcttgtgtgaggcatgtggcactggtagactgtgaccagtgctgctcacgatttgaatttgcccttcccaaagtcagactatgctgagggaggagaaaaggtaacacctacaaaacttctkgcttagagtctctttatttaaagattatgtggccctaccttctttcttcccagagtagagaaagaaaagagcctctcagtgtcctcgaaagagccaatagacttataattggataatacaatggagtccaagattatgaataatccactatcctgtatttaataaaagggtcagagaatctccatcctcagaattggatccagccatgcctgcagacgctcttatataaggcacatgagattcctgttgtaaatctcaatcacaagagagctgcatcagctggggcccagatttgcagggctccccaacaaatggacacaatagagaatgccaccttcgtgcatagtgctgtatttggtgggaaacgaaggaacagagaacatcctgttgattggtctctgactcttaatactctgatatttttgtckaattgcaatgaaaagatctaagtaaggcttaggacagaaaacagagcagttctcaattggggcctatgctaaaagagttagacatggtttaatgttgaaaagtcaggacagtgttgatggcagtgataaaaagtgaggctagagaaatcagttgagactcatttatcaagcgtgttaacagaagttttcatgtkattttataagtaatggtcttaggggatttttgggggtgttgattttcccgtatgcagacaagtgaagggtgaacaagacaaagatgagctatactaagcgttagaacagctcagaggagacctgcagtggctagctctctgtagacaggttgtcctgacgtctgccatcaacagacaggaagcgtggagaggattgctcctctccgcagctggcctcctggaaagggttgctcgcctctgcaggtctctgaatctctcagcagagagggtagttcctctctgcagctggtcttcccattgtgtcatctctgtagacaggtcatcctgacatctgctgtcagcagagaggaagccctggagggggctgctcctctctgcagctggcctcttggaaagagttactcctctctgcagctggtaatcccgtctctggaagtctctgaagctctgagcagagagggtggttcctttctgcagctggtcttcccattgagtcctctctccgttctctccatcctatcttgttctggctgagcccagggcttttatggacctcggaggggaggaagtgtgtgccgattggtccatgggcaccatgggtgggcaggaagaggcactacaagtccccactccagttggtgggactggcagcctggcccccagccttcaggcccttcctgatctgaaggtggggccttactgggggcccgcccccttcctcccaggactctgcctcctgccaccattcatggctcccaagtcctcattccaagatccaagccagtgccaggagcagagagaggccaggcagtggaagcagacacccctgagcttgcgaacaggagtgtgggagggaccttcctgggcccatgagggtgcacactgcagagatgcccaggtcctgcgccaggggagctcccacctcggcaacttgaaaggggggaggttcccacgtgtccctggctcctgcctgctccgtggagcgcgaggcccaggtctgcagctgaggattgggcagctgcagctgcacccaaaagagcagatcctgcctactcccggccccctccgggagcacagggaggctcatatccacaagcgcatttgggcggctgtagccccacccaggaggacggggctcctgcctgcttcatagagcaggaagcctgggtctgcagctgaggtttggaggactgaggtttgcagggctgcagcagcacctkggggagcccccaccccaactcagaagaggcgaagctcccactggctgcatggggcatgatagcaagcagccactgccattaataggaagctaatgaaatcttttagagacaacacagcggcaagatcagattttgtttaggatgataacaagtggcagagctagtgtgagagagacaggtggcaaggagattattacagtcatccttatttctcatggaaaattttcctgaaaaatgggctataaggatattccacttcttaaaactgtatttcttaccgcttagggagagccaaaatgctttgcaccaatgygacacgttttagaccaactgaaagtctacaaagagctctattttaataattaagtctactgtagatttcaggttcagcttcctacgaagattttttttctgaagtttattaaaatcaataattgacactaggtggcaagtcaggatcaacaattactgtgttcccagcgtagttatgcatcttgatttgaagtgaggaatgggggagtactrtgataaggttagacacagactaatagcattctgaaagacatatactgatacataagacacgtatagcatatatcagattcatgccccagataccgagcagtattattttcaaatacgttttttatatgcttcccctacacttacttgttcctgtttggatggcttagcagaagctccaagatgcccctttcatatacagtaataaaagatagccacagggtggcagcaaaggttaaaaaagttgagtgctgctacttcattaaaaatctcgtaaaaaataaaaataaaaataaacttaggcaatgggaacagagaagagaggagtaaaataaccatagaaacctgaaatgagaagataaaataaggtactagcacaaatcatccttatctatgggcagaattgcattcacaaccmtggaaatagctgatttttgctttaagttttattttcttagaaacaatgtattctacaagaaataccacatccctttattttttgtaaataaaatatgactctaaaccccagctccattggactgacaggaaatttatctcagacattttgggtccttcctacctggtgaccaaatacaggatcaagatatggcacccactccgccaccggcatctgtctgtagtccacatgaccattctagatccaccactctgtggccacattgygggcccagaggataggaatctttgaccaagaacaagcagctgggcctggaacccaaccttccaagtgctccatgcagaccttccttctgaagccctgatacttactcagagagtaccagaaactagagtaggtccctgctctgaagggactcactgacctttctctgtccrgactaaaagaatcattttagcctggggaaagtccctctcagcataaacttctgtctcttaattggctttcttccttctcaaattctgtttttctcttgtttgttcttttaaaatcaaaagccaggtaaccctgcyccaaaggttcaactccttcaagattttttacctagccaatcatgtaatctgtgaacaaaaacagtttcatttcttccttaccagtctgtatacctttcattttattttcttctcttatttcattagctaggaattccaggacaatgatgactaggagtagtaasagtagacatccccgtcttgttcaggatttgaggggaaagtatctagtctctcaccattaattataacgttagctgtagattttttgtagatgttctatatacagttgagtttggagagtttttatccagaatgagtgttgaatttgtcaaatgctttttctgtatttactcatatgaccaaaagtttttttctttagcctgttatatgtgatggattacattaaatgatttttgaatgctgaactagccatgcatatctagaataaatcccactcttcattgcacataactattcttacacattgttgggtttggttttctaatattttgttgaggatttttggatttttgttcagtagagatattaatctgtacttttcttatcttgtatttctctagttttggtattagggtaatgttgttctcatagaatgggttaggaagcgtttcttagttacttgttttcatttttatttagttcaacatattttttaaatttctcgtaagacttcttgggcctatatgtcatttagaagtatgttatttaatctccacatattctggaattttctagctatctttctgttattgacttctaatttatttccattgttttctgagcacatactttgtttgatttctattcttttaagtttattaagttgtgttttggaactaggatatgacccayctttaagaatgttccatgtgagcttgagaaaaatgtgtattctactgttgttggatgaaatatcctgtgaatatcaattagcaccaactgattgattgtgctattcaattcaactatatgcttactggttttccttctgctggatctgtcagttactgataaatgggtattgaagtctccaactataatagtggacttgtatattttcccttgcagttctatcggtttttgcctccacatattttgaccgctgttgttaagtatacaaaaactcaggattgttatgacttcttggagaattggcccctttttccttgctctaagatgtgatttgtctgaaattaatatagctacttcagccttattattattattagtgttaacttggcatatttttctccatcctttattttcaatctatcctttatatttacagtgagttttttgtagactacatataattgagtcttgttttcttatccactctaatagtctgtcttttaaattgatgtatttagactattcacattctaattaatcattcatatatttagatttaatctctaccttattttaattgttttttattcatttcccttgttctttgccttctcagattttaactgagaaatttatattatttcattttgtctcatctcttagcatatcaattatacttatttcaaaaaaacattttcagtgcttgcctagagtttgcaatatacatttacaactaatctaagtctgttttcaaataacactacactgagtcacaggtggtgcacataccttataagagagaacagccaatacctcactcccgtcccttataacattcctgtcacacctttcacatgtctataagttttattgctactaataatattttgttgctacaaatcttttgaacaaactgttatctgttaggtcaattaagaataaaaaataaagccaggtgtggtgtctcatgcctgtaatcccaatgctttgggaggcctaggcaggaaaagcacttgaggctagggatttgagacagtctgggcaacatagcaagagtttatctctataaagaattttaaatttagctgagtatggtggcacgtgcctgtagtttcagctactcaggaagctgaggtgggaagatcacttgagtccaggaaattgaggctgcaatgacctgtgattgtaccactgcactccaacctgggtgacaaggtaagactccgtctcataaaaaaataaaaataattwaaaaatgaagaacaagaatgaggaaaatgaaagactttaaatgctctccctttctttacatagatccaagtttctgacctatatcatcttccttttctatgaagagcttcttttaacatttcttggaaggcaacaatttctctcaatttttgtttttctgagtttttaatttctttcatttttaaagaataatttacctaaatatacaattctaggttggtgacttttttctttcaatgctttaaatatttcactccactctcttcttgcttgcatggtttttgaagagacatctgctataattctcatcctttgctctctgtaagcaaggctttccctcactctagcttctttctagattttctatttgtctttgactttctgcagtttgatcataacatgcttaggtgcagatgtcttggtatgtatcctgtgtggtgttctctgaacttcctggatctgtagtttggtgtctgttggtaattttggaaaattctcagtcattattacttcaagtattccttttgttcccttatcttcttctccttctgctattcccattatgtgtatattatacttttcataattgtcccatagttcttggatattctgttcctttattctcagcctttcttctctttggctttcagtttgggaaattttcagtttcaagctcactgattctttcctcagccatgtccagaccatgttacataggtaaatgtgtgccatggtggtttgctgcacctatcaacccatcacctaggtattaagcccagcatgcattagctatttttcctgatgctctcccacctgccccccacaggccccagtgtctgtcgttcccctccgtgtccacgtgttctcattcttcagctcccacttataagtgagaatatgcggtgtttgattttgtgttcctgtgttagtttgctgaggataatggctttcagctccatccatgtccctgcaaagatctcatccctttttatggctgcatagtattccatggtgtatatgtaccacrttttctttatctggtctatcactgatggacatttgggttgattccatgtctttgctattgtgaatagtgctgtaatgaacatatgtgtgcatgtatctttataatagaatactgtacttttattcctagcatttctttctttctctttcttagagtttcagtctctctgctgatatttcccatctcttcttgcatgttgtccactttttctattagatcccttagcataataatcattattttaaatttccagcctgttaattccaaaatcactgtcatatcttcatcttgttgtacttgcttggcctcttcaaaatgtgttttttgccttttaaagtgctgtgtaattttttgtagaaatctagattattatatattgggtaaaagaaactgaagtaagttatcatgaggttttatgtttatctatctaggagttcggctgtgtttactctctctgtgtctttattagaggctaaaatttcctctgtcgtcatttttgtctttgggcttctctaaagacttcttaaataggatctaagcctcacaggtccgatgacagctgtggtatcttctctcgcaaaactgtggttctctctctcagttttctgagtgatggtttgcccgttacctcaattctttgatggatctaagaaaagttgttgattttcagtatttcagttttttttccttgttgtgagggtggcagtggtgacttccaagctctttataagtcatgccagaaaccagaagtccttcaatacttttcagcctctttctgtgttgctatttgcatgttttgtgtcatgcttctaacttctgtatagtattccactaaaataatttgcagccaccaaaattttattcactcctttagtgacagatatttatgatacttctactgtatacagcaatgctctgaatatcctaatacatgtcaatttatcagcctatgtgataattactctgggttataaagccaggataagaattgttgaataaaatgatatatactaacttaaatttactattcaaccagaatgctacacaaatctatactccctctagtagtatacaaggaggtctcatttcccctgtgttcttgccaatatttaccactatctaggtttctaattgtttggggttttttttttgttttttgaaatggaatctcactctgttgcccaggctggagtgcaatagggtgatctcggctcactgcaacctctgcctcctgggttcaagcagttctcctgcctcagcctcccaggtagctgggactataggtgcacgccaccacgcctggctcatttttgtatttttagtagagacagggtttctcaccatgttggtcaggctggtggcaaactcctgacctcaagtgatccacctgtctcggcctcccaaagtgttggaattacaggtgtgagccaccacgccaagcctgtttgtactttttttgagtaaaaattcttattttttgattgtttaaacttttccttctttgattactagaggagtaaagcgtctcttcatactagccattgggatttctttttctacaaattacctattcatataatttgcatgcgtttctttttttctatttcatcaattctaagttgtactttgtttacattttaagatccttgaaattgggacacatattacaataaattaatatctgcttcatttatctgttactgtataaaaaaccaccccaaaatctaatttgcttaaaacaacaatttcatatatttcacagtttcatgggttgacatggcttacctggatgatttttctcatggtcttgccaagagtctctcatgaaattgcagccagatggcagctgggattggagtcacgtggagactccactgggattctgagagactgcttsttctctctctccctgcatgtagtctcaggacttcattttatggtctctccaacagagtagcttggcttgttacatggcatttcagagctcccaagaacaagagcttcaaaaactataggaagaagctgcaagatttctttgaattggccgcagaagtcatgtattacttccattacatttgattagtcaagtacatcataaggtcagctaggattcaagaagagtgaaacagatttcacctcttgagggaggagtagcaagatcacattacaaaagagcatgtggttggagatattattgtggccacctttggaaacacacattgttatgagctgccatttggccacaaatttcatctctctcccacatacaaaatgcacttagcctcttcctcaaaagcctcatcttcttaagcataagtctaagatttcatcacctaaatcagatgtgaatggagtcctttgggtgaacttccttaggtactactccttgagcacaggagacaagatatctcaacccgaagacatttgaacttaagaaacaagatatcagccggatgtggtggcttatgcctgtaatcccaacactttgggagcccaaggcaagtggatcacctgaggtcaggagttcaagactagcctggccaacatggtgaaaccccatctctactaaaaaaatacaaaaattaaccggcgtggtggtgggcacctgtaatcccagttacttgggaggctgaggcagggagaattgcttgaatctgggaggcagaagttgcagtgagccaagagtgcaccactgcactccagcctgggcaacagagcaagactccatctcaaaaaaaaaaaaaaaaagatatctgccatgcacacaaacccaaaaaagatggtgagacaaagaaaggataagggcataaatattcctattcaaaaaaattgagagaacaggaagcacatagcaatcactcatcatagcaattctggctgggaacacatcgccattcctccatgagggcccagtcctgcaatcatcaaagtgcttctccattcctcttccctctgctttctgggttctaagatcttccttttaagttatctttccttttctataagacattgcccatatttgctggtcaatatcaaactgcttcctgactataaaagtttgaagactcagaggcctctttttatttttttattttcaactgtctctccctttcagtacaaggcagcagaattcttttaaaagctgtatggacttcttttctatcaatctataaccattccagtaaacaaaagccacactgataaatcatargacaggtccctctctacctttgactgagaagaaaagtgctgggtaacaatgctcttaagtttctaagaagcctttaacagaaaaggtctaagaaacacgtccttgggatttttagtagactttttgcctagctgagagggttcaggagrcattattttaaatctttctgaggtctacacaaaggtctacagctgtaatcttgaaatcttgaccctgaggccatacttttagtggcagtgccctgaatttgatcttttgctctgttgtaatttattactttaataatcttttactggaagagaatggagatgagaaacagttttgttttcaatcctaaaaaatctggcaaagaaatgtgttgcctctagattctagttgaaaactgagcagttacttctttagttcatctccatctttaccttatcacatgcagctaaaagaaacgagctggtatattcaacatcctaggtagatacttccttagccaccttatcacaagctgaagcattgctaaactttttgccactacattacacaagcgaccttttttctagctcccaataaaaaatgtgttccttgtccttcyagcctttacaaagaatttcttagagtcccttccagattcttctcatcacctggtccccaaaccaatgccacatattttagatttttgtaaaatcatcagcctttcatagtaccagtctctgttttggtgataaattgctgcacgcaaaccactccaaaacttagcagtttaaagtaattatcattttcttatttctcatggttctatggttgactggggtaaggtgagtggtctcgcatggggtacctcaagcagttagatgatagctagagctggaattacctgaagatttgattaggatgctgggataacttgacctctcactctccaaatagacttaggtcctctctacctggtctctccagcaagtagatacacttgttacaaggcaggtcaggggtcccaagtgcaaatgtgccaagagacagtagaagttgccaggcttctataacctagctctccaagacacacaacaccagctccacagcactctgctggtcaagtgagtcacagggctggactggattcaagaatagtaaaaatagactcaaattcttggagaagcagtatcaaggacacatggcaaaaaatcctgtggctcatcaaaatacgcatgtcaaacaggtgcagtttatagtgcatcaattacatatcaaccaagttttttgttttgtttttttgtttgtttgtttttgagatggagtttcacgctttcgccaggctggactgcagaggcgcgatctcagcttactgcaacctctgcctcccaggttcgagtgattctcctgcctcagcctcccaagtagctgggattacaggcatgagccatctcacctggctaattgtgtatttttagtagagacagggtttcaccatgttggccaggctggtcttgaactcctggcctcaggtgatccacccgcctcagcctcccaaagtgctaagattacaggtatgatccaccacgcctggcaataaagttgtttttaaagggcatgtctgttggaagatacgcagtgatgtgcatctttggaaacagtctgtcacagcattttrcacagctgctgtcaggtgggcagtggtcgtgattcacttgcctttccctcttcatgcataaacttagttgtcttcccattgacattcccattgaacaactacaatctctcaatgtttcaatcaatgaaccgtttaataagcagttgaaaaaggaatctgaattctagttgttgtttgaaatctttcagtgataagttcttgtaagatcaaaacattttgagcatgaagatctgcagaatagttttcaatagtttggaaaacaaccccagagacaatagtgaggcaccctttcagaaaatgtcctgtgatgtcacagaccacacaaccacatataaaaacagaaagtctgaaagtgattcagaagaattacattctaaataaaagtaagttttagtaaaatttaatatcygagatgaagatgggagggaggcactggacagaaaagctagctgacattccaaatatatcattgctatttcatgacaggacaataaatatttgggttgaacaatatgaaagtgtccttcttatagatccaaaccatcaaatggtgaaaaacctcctgatttcaacctaatgggtcctacagaatactaaggaaagatttcctgacttggatagcccaacacagaaggcgcttaaacagaaaaatggatagcatggtatttatctgtcaagatgaggcgagagaagttaaattatatactattgttcgaggacagacaaggcctaggaacttagcactgtgtgattctgtaatgagtctgtgccatatactgaaattatatattcatgattatggaccatttcaaaatggtagcaaatttaccactatcctamttctctcctacttttcagaaagtttactttcctataattgagtgccttctttttattaagaatctgaagtttttctcagtcttatcttctcttgactttttctttactaattagccttctattattgatagttccattttccttcttactgaaaggtatcatttcttttttctctcttactcactgtcattctagtagtgtccatacctggcaataacctgaatgcattgcgcaggcatttttgctaatcaaataatctatcttggaaatgtacagtaacaaagggaataattgaatggccactaaagaaytatttgtgtctgagtattatcaaaagaatgcacaaatttttctagaatcaaggtagtgagaaaatggtttttcctctagtgattgaatagaagagactttacccttgattggctactaaacaaacaaagaatcctggaagagaatctgtaatctcagcaccctctgaaaagtcactggactgactgctttagcaactgtcattaatggtgcaattactggcattgaccgaaagagggcagttaaatcctataatgagataatgagaataatgtgtagtaagacatcagttgttaaagtggtgtcatgaggaagaagaaacagaggaaaaggccatgaacagaaaaaaaagttttttaaaaaagcataaaattatacatatgtcaagaacaaataagatcgttttgtcaatcctaagtttctgtgtacacaaattattagaraaaaatactttttaatcattctatttgtaaagtcatcagagaaggaaaatacaatctcactttctagtatttcacatacgcaatctaagctggttttctcattcttctattctcagtaaaagcatagagtagccatcaaaaacaacaaatgagagaggacaaagagaatagacgcggaggcgaagagataagctttgaaggtgataactaatgttatatttagcaatcgtctactttatacatatgaccaacttattgaatgaacagaattcatatattgcaatcaggaaagagctttattctccaaccagagcctccatacccttggacaacttatcagacaaatcatttagctcttctaataaatttaagctactctaacagtctcatttgactgagaaagtttaatccaatctaaatcaaaatgttattcttataaccaattcattttttgtttcaatttttttttttttttttgagacagagtctcactttgttgcccaggctggagtgcagcccacgatctctgctcactgcagcctccacctcctgggtggagaatcaagcgattytcctgtctcagcctcccgagtagstgggattacaggtgcctgccaccacgcccggctaatttttgttttcctctacatacagctctcacaaaccagcagtgggggagtgatgcagccctccagcctcaaagatggggaattcaaagaagagggaaaagtcttgctctggtactattgttctctggccatgattttgtgtggaagttacctgggatggttttttcatgtgtcaactttgctaggcaatagtcccctgttactcaatccaacactaatctagatatttattgaaggtattttgtagatttcgttaaagtccgtaaccagttgattttaagtaagggaaagtatcctagataatctaggtgaaattgattcaatatcagttgaaaggtcttaagagtggaattaaggcttccctgataaacatgaatttctacctatagacagcagcttcagcagcttcggcttctgctagagagtcccagcctgcccttcctggcagcctgccttatggattttggaattgcctagccatgagccaattccttgcagggtcttgctcagttgcccaggctggagtgctgtggcacaatcacagcttattgccatcttgaactcctgagctcaagcgagtctccagcctcagcctcctgaataggtaggactataggcaagcaccaccacacccagccaattttttattttttgtaaggattgggggttcccactgtgctgcccaggctggtctcaaactcctggcctcaagcaatcctcctgtcttggcctcccaaagcactgggattacaagcatgagccactgcagtacatcttttaacacaggtatcactgaattacagggatatgttctgataaacgtaaccctaagcaactttgtttttgtgcaaaggtcatagattgtatttacacaaacctagatggaagagcctaccacacacctggcctatatggtgtagccaattgctcctaggctacaaacctggactgcatgttactgtaggcaattataacaaaatggcacatatttgtgtatctaaatgtatctaaacatagaaaaggtaccatcaaaaaacagtataaaacattaaaaatggtacacctcgatagggctcttaccacgaatggggtttgcaggactggaagttgctctgggtgagtcagtgagtggtgagygaatgtgaaagcctaggacattattgtacattactgtagactttatacacactgtatactcaagctatagtaaattcattttaaaaaatttttttcataaagtttatttcatgattggtgggtagtgcatktaacagttaaatatacttaaataatgtgtaggtgactgcacggttgcagcatattggtaactaratacataaccaattcaactagaaaccagctaacgagtagctgtttaaatatttaaaatatagctcttgtttagagcctttgttttgatcaccttctttgtgggaagagcctgctgatcacaatgaaagtatattaaagccaaatcttctgatatccattgccatttctttcagctggattaagtctccaactccaggacaaacccaagtctttggcctcctccattaatgcactttttatctagcagagcagaaagtgcaagcttcacagcaggctcagagtctgagtgtaaatgaagtctctttccttccactccaattaaactagagttgttgacttttgcaaacatagaagcagtgaaatgcaactgatatttagtggcaagacaaaatgagtgcagttggcacttgatgtccgagcaaggtttactgaagtatcaagattgtcacataccctctgataaactgagcctccaaattctgccccattattgttattagtgtgaagctcgaagtcccccatccggtagcccactacagttattccttgtcagctttgacttggcactgtcagtggtcatctggtacccagcaagccagccctcgtaaccaaagacagctgaagcatagattgcaggtccagcaaaatcaaaattaacatcacaagcaaggtttatgcagtccctcttgcaagaggacttgattttaccacttttgtttcctgtgattgctaagaaggtagtatcaaatattagtttcaaaccttgacaaaggtggtccaattgtgatttctgttcccagagtattaacagtgtctcatttttctgggaaagtcacaccatactcacaccgtttatatttggtctccaagacttcaaaagcttttccagtgtctgcattaaatgaaccagatgttgaaaatcccacagcactgcgtgactttgttctyacatccagttttaccaaccccaaaccaaatcctttgttaaaaatatctctggcagctttgccaaggttaacatatgatgaagaaatccacactggccacatgcaggtctgcccataggtcgccatggtaaggccacagtaagaggtgatatggtgatctcctaaggagggccacggccaccactccactctcagctgaggctggtcagccgcctcacagtcaggccacagctgccgtgaagtgaaatctctttcttcaataataaattaaccttagcttcttctaatttttttacttaataaactttttcctttttgtgttaacttttattttaggttcagtgggtacatgtgcaggtttgttacatgggtaaattgcatgtcactgggttgggtgtacaaatgatttcgttacccaggtatgagcacagtacccaatagacagtttttccatcctcactctctcccaatctccactctcaagtagccctcagtgtcttttgttccactctgcctccctgcatactaaatgtttacctcctacttataagtgagaacatgtggtatttggttgtctgttcctacattggttcacttaggataatggcctccagctccatccatgttgctgcaaagaatatgattttattttttatggctgtgtagtatttcatggtgtagatgtaccacattttctttatccagtccactgttgatgggcatctaggttgattccatgtctctgccattgtgaatagtgctgcaaggaacatgcacgtgcatgtgcctttttggtagaacaatttatattcctttgggtatatactcagtgatgagattgctgagttgaatggtagttctgtcttttttttttttttttactttaagttctggagtacacgtgcagaacgtgcagttttgttacataggtatacatgtgccatggttgtttgctgcacccatcaacccgtcacctgcattaggtatttctcctaatgctatccctccccctagctccctaccccctgacaggccctggtgtgtgatgttcccctccctgtgtccatgtgttctcattgttcgactcccacttatgagtgagaacatgtggtgtttggttttctgttattgtgatggtttgctgagaatgatggtttccagcttcatccatgtccctgcaaaggacatgaactcatccttttttatggctgtatagtattccatggtgtatatgtgccacattttctttatccagtctatcatcgatggacatttgggttggttccaaggtagttctgtcttaagttcttcgagaaatctccaaactacacttttttgtatgaacgcacagcttaccacacaaatgtattgtacagctatacaaaaatattttctttctttatatccttattatataagtttttttctatttaattttttttttactttttaaatagctttgttaaaaactaagacacaaamacatacattagccaaggcctacacagggtcaggatcatcaatatcactgttctacttccttatcttgtcccactgggagttcttcaggggcagtaacacgcatgaagctgtcctctcctgtgataacaatgccttgttctggaaaacctcctgaagggcctgcccaagaccgttttacaattaacaaattttttaatggataagtataaagaatgtactctaaaataacagtaaaaagtataatggccaggcacggtgcctcacgcctgtaatcccaacactttgggaggccgaggcgggcggatcatctgtggtcaggagtttgagaccagcctggccaacatgatgaaacccgtctctactaaaaatacaaaaaattagccgggcatggtggcgcatgcctgtaaatcccagctactcgggaggctgtggcggaagaatcgctggaacyggggaggcggaggttgcagcgagccgagatcacaccattgcactccagcctgggtgacaagagtgaaactccatctcaaaagaaaaaaaaaaagtatggtatattaagtacataaatcaataacagaggcacatattatcatcaggtattatgtatcatacataaccgtatgtgctatggtttttacatgactggcagtgaagtaggttcatttacaccagcatcaccacgaacacgtgagtaatgagtaatgtgttgtgctgtgatgttatgacagctatgatgtccctagagataggatgtcactaggaatttttcagcttcgctataatcttatggatataattacggcatatgtgtgatctattgttaaccgaaacatcattatgctgtgcatgactgtatgtatctcttctactggttctgcttctgtggttgaaacctgactgatacaatacacaaataccaattgtctctcatggggttcttcaatggatttttaggagatcctacacagagatacatccctgaggaatttctgcactgcatcattccctgatacaggtgagatgctctctgggaggcctcctgtgactttaccttagctctcaacttctagtgaagcatccaacatggcttctttcttgtaggatctcccaccgatagggagtcctcttggataaagccctttgtagaggacgcaaacccacatctgctacttctgggatgaggggagctcatatacccactcaccaaatagtgaagctgagccttgaagccaccccaccttaccctgtcatcaggagcaacttctgctaacttctcaccactgggcctctctaaacaatagtcacacaaaagtgtctttgtcctcttcagtaagggacataggtcaggttcttccaaacacttttttattctccatgctgtctcaaatttacaagctcccatagctgagcaagcatagagccaagragtaagactctgtctgccttcagcaagcagtgcccaatttccccaaagtgccctcttgtttcccctctcacttggaatcagggtgggaggggaaatacyccagtaatccccttttttttttttwaagagtctcattctgtcaccctagctggagtgcagtggtatgattgtagcccattgtagcctctatcacccaggctcaagtgatcctctcacctcagcctccctagtagctgggactacagatataaaccaccttgcccagctaattcttttatttttttatttttrttagagatgatgactttctacgttccccaggccagtcttgaactcctaagctcaagcgatcttccctccttggcctcccaaagtgctgtggttacaaatgtaagccactacacccagaccccagcaatcttttgattcacaaattctttcaaggaatttgtctctgcaatcatgtaatcaccggcagtttcttcctgccctctgcacaggcaaaatcaattcactgagactacggcatagcagtaaagaaagagtttgattgacaggaggctaactcatgtagtagaaccagaaatatcactcaaatcagtctccctgaaggctcaaagttttgggggttttaaaggatagttggtggtcagagggctagagaatggggaatattgattgattggggtaaaatcataggagtgtggaaaatagtcttcatgcactgaattggcctctgggtagggctacaggactgattgactcatgagttgcaggtctggcccgagtcagctggtcatgagaaacgttaacagtctgaaaaaaatctcaaaaggccaatcttgggttctataacagttgatgtcatctacaggagtaattggggaagttacaaatcttgtgacctccagaacaatggctggttatcgtttcactttgcctacattttagcagaattcaggcccctctcataattcctaatcctaacctgtggcctttcattagttttacagaggtggtttagttttaggagagggctattatcatctttgctctaaggttaaagtataaattaagtgcctcctgaagttagtttggcctacactgaggaatcaccgaagacatcttgtagcttagaagcaaaatggagtcaactatgtcagttttctcttactgtcataatttcgcaaaggtggtttcaatcagtctctatcttttcctgatatgggctgttggtaattgtccttagaccagtttggaaagtcctgtagggtaagctaagaactctctttggaatataggatttcttaacacctattgttctcagctttagattttagccaaaattctgagtcaaccaaaaacactctttctaatattttattatactcatcactgagtagctttttgcaccctcaaaaaaatcaattaatcataggtgagcttctgtgatgattaattttatgtgtcagcttaacagggccatgaaatatccatatatctggttaagtattacttctgcgtgtgtctgttcaggtgtttccactagagattagtatttaaattagtggactgagtagattctcccccagaaggaaccatccctgccaacactttgactttgggcctccagaactgtcagaccatacatttccgctggctttagccaccaagtttatggtactttgtcagggcagcactaggaaattaatacgggtcagacaaactcaaccaattgtcagccagaaaagatttaaatttacctttagcctggaagcccttgctttgagttgtcccacctttctgagcgaaaccaatgcatttcttaagtgtgtttgattgatgtgtcatgactccctgaaatatataaaactaagctgtgccccgaccaccttgggcacatgttcccaggacctcctgagggctgcgtcgtgggccatggtcactcatatttagctcagaataaatcttcaaatattttatagagtttgactctttttgttgacaatattttggtgcccaaatacatgaggcctcagagaagaytcaggaccctgaaagagttgcccgaaaccagagctaaggtaccagcagcrgcccgttgaagtcccactgagttcaagcttctcccccggtggaacgggtaagtcctcctgagccccagacctccctttgkttgacagtccttgatttattctgagctggttttctcctaggaaattgttgtttaaggatcctaattctaattcagagatgcattctaaagggaattytctattgctttttctcctaaaatttatcttgattctgaggaactgaactgttgttttcaaagctaaatgagagactgagtttttcagctctgaagacaaagggcttttgcccctcccagcctaaaggtgcccctgggtgaccaggggcctcacaggagtgcctgaggggttgagccctcaccacgtgcagcagccctgcagggaaatccccaacaaaaattaattctaaaatgttaaaattaatttctgcccacagtctcatgccattgcaagctaggcctccacaatttgaccattctctcactaccccctgccgggagatgctatctggtgtgctcactgcaatccctgttacattgaaaacaggttaccctatcttatcaacctttacatagaacatccccactcctctttgccttaactacaagccaactgtttcttaaaattatgtcctctcaaaatgaggctactaagttgcaaggagagtrgaagtagtggaagagaggaaagtcagcatttgtgttattgtggttttccttgctgactccataccattgttttttatcatgtaaaaatagttcctttaggctgggcacagtggctcacgcctgtaatcccagcactttgggaggccgaggcgggcagatcacaaggttaggagttcgagaccagtctggccagcatagtgaaaccccgtctctactaaaaatacaaaaaattagccaggtgtggtggtgggctgctgtaatctcagctacttgggaggctgaggcaggagaatcatgtgaatccgggaggtagagattgcagtgagccaagaccttgccattgcactcaagcccgggcaacagtgcgagactccatgtcaaaaagaaaaaaaaaatggttcctttaatggatagtgataatggctgcacaacatggtgaatataattaatgtcactgaattatacacttgaaaatggttaaagtgataaactttatattatgtacactttatcacaataaaaacaatacccaaaaaatagcttctttgaggcacgtgccacctgcccaccccatccactacccgttctcatcactttcatcttcaaaccttttccttccctctcaatgatccaagactttgcccagaactcagtctgtctyctctcttccaagttagttatcacaaytgcaaaaattaattaaagatcaaaatgtgaaaccaaataataattaaagccagcttaagagagggccgggcacagtggctcacacctgtaatctcagcactttgggaggccaaggcaggtggatcaccttaggtcaggagttcaagatcagcctggccaatatggcgaaaccctgtctctgctaaaaatacaaaaattagggtgtggtggcctgtgcctgtaatcccagctactcgggaggccgaggcatgagaatcgctcgtacccaggaggcagaggttgcagtgagccgagatcatgccattgcgctccagcctgggcaacagagtgagactgtctcaaataaataaattaattaattaaaaatacagacttattagaaaaaaattktgggaaaatacaagtaaaatcccaagcaggcaattctaggtggaataccaaaatccacaataagggggaaaaaatgacagttttgactttattaaacttaaaatgaggaggggggattggggagatacttgtcaaaatatacaaaatttcagttggagaggaggagtaagttcaagaggtctagtgtgcaacaaggtgactgtagttaataacagtgtattcaggccaggggccgtggatcccagcactttgggaggccaaggcagatggatcatttgaggttaggagttcgagaccagcctggccaacatggtgaaaccctgtctctactaaaaatacaaaaattagccaggcctggtggcacatgcctgtaatcccagctacttgggaggctgaagcaggagaatcacttgaatccaggaggcagaggttgcagtgagctgagcttgcaccattgcactccagtctgggcaacaagagtgaaactccaactaaaaataaataaataaataaaaaattttaaaaaacacacacaatgtattgtattcttgaaaattgctaagaaaatagattttgcctttctgcccttggacaccaccgaggaagcatcattaaartctctcttctttctgccgtcatgtctaagtctgagtctcctaaagagcctgaccagcggaggaagctcttcattggatggttgagctttgaaacaaccaatgagagcctgaagagccattgtgagcaatggggaacgctcacggactgtgccgtaatgagagacccaaacaccaaggttgcaggggctttgggtttgtcacatatgccactatggaggaggtggatgcrgccacgaatgcaaggccacacaagtggatggaagatttgtggaaccaaagagagctttctcaagagaagattctcaaagacsaggtgcccacttaactgtgaaaaatatgtttgttgatggcattaaagaagacactgaggccgggtgcggtggctcaggcctgtaatcccagcactttggggggccaaggcgggtggatcacgaggtcaagagatcgaaaccatcctggacaaaatggtgaaatcccgtctctactaaaaatacaaaaattagcagggcgtggtggtgcgtgcctgtagtcccagctacttgggaggctgaggcagcagaatcacttgaacctgggaggcggaggttgcagtgagcagagatcgtgccactgcactccagtctgggtgacagagtgagactaagtctcaaaaaaaaaaaaggcctggcgtggtggctcacacctgtaatcccagcactttgggaggcctaggcaggtggatcacctgaggtcagaagtttgagaccagcctggccaacatggtgaaacctgtctctataaaaacacaaaaattagccaggcctggtggcacacgcctgtaatcccagctacttgggaggctgaagcagaagaatcgcttgaatctgggaagcagaggttgcagtgagccgagatcacaccattgcattccagcctaggtgacaagagccagactctgtctcagaaaaaaaaaaaaaaaaagaagaagacgacgacactgaagaacagataattttgaacagtktggaaaaattgaagtgattgaaatcatgactgaccaaggcagtggcaagaaaagggactttgcctttgtaacctttgacaaccatgactccgtggataagactgtcattcagaaataccatactgtgaatgaccacaactgtgaagttaggaaagcactgtcaaagcaagagagagctagcgcttcatctagccaaagaggtcgaartggttctggaaactttggtagtggtcatggaggtggttttggtgggagtgacaactttggtagtggagaaaacttcatggtcatggtggctttggtggcagctgtggttgtggtggatatggtggcaatggggatggctataayggatttggtaatgatggaagcaattttggaggtggtggaagctacaatgaattttggcaattacaacaatcagttttcaaattttggacccatgaagggargaatctttggagtcagaagctctggcccctgtggtggtggaggccaatgctttgccaaaccacgaaaccaaggtgcctatggtggttctagtagcagcagcagctatggcagtggcagaagattttaattaggaaacaaagcttagcaggagaagagagccagagaagtggcagggaagctacaggcaacagatttgtgaactcagccaagcacagtggtggcaaggcctagctgctacaaagaagacatgttttacgcaaatactcatgtgcatgggcaaaaaacttgaggactgtgtttgtgactaattgtataacaggttattttggtttctgttctgtggaaagtataaagcattccaacaaagggttttaatgtagactttttttttttttgcacccatgctgttgattgctaaatggaatagtctgatcgtgaggctgaataaacgtctctyttaaaaaagaaaaagaaaatagattttaagtgttctcacctcacacacacaaatatgtgaagtaatgcatatgttaattagcttatttacccattccacaatgtatatatatatttcaaaacaacatgttgtacattgtaatatatacaatttttatttgtcaattaaaaaaaaaaagccagccacagtgatgcacacctgtggtcccagctactcaggaggttgaggcaggagcatcacttgagcacaagaggtcgaggctacagtgagccatgattacaccacggtactccagcctgggcaaaaaagtgagcacctgtctctaaaatacacagacacacacacgatttttttaaaacttaaaatgtatgaatagaaggaaaaaaacactccataatgttttaagaaaacaaataatataaaatatttgcaacacatatgactgacaaataagcaggtggcatgtgcctcaaagagtgcctacatattgawaagaaaaaagacaaaaaaagaaaaaaagaaaaaaaccctgatagagtgaatagccaaaggatataaacatgtaactcagaggaaatacaaataactaacttacttgagaagatgctcaaagccactaatagtgtggaaagcacaaatgatgacaaagctataacatccttcttcccccacaaaaatagtaataataataattagccagaatttaaaacattgagaacacatggagctgagaaggacctaggactagtaccctcatcygttgccagtggcagtaaaactgcttcagtctttttggaaagtaatccagtggtatctattaacatttttgttttggcatacgtttttggctcatgctttcaaaacatgagaaaacagaatacatgtacaaaaatgttcactgtggtgttttatttcatctcctacactattattcccaaatmttttcctatacatgtccctcacttcagggaccctattatttgggtttcttgcctacttctggctacttctcttttctgacaccttttctcttcccctgaaaccattctgtaacatcctctccctccatccttcttgctatttgatttctctgttattatgacaaatcccatgtrggctgctgccaaaaaccgtgcaatagtacagattgaaatcactgaaaatgttcggccccctgcctcacccaagctcgcagggctgcccagcaatgtcgtgtctctaggcagatgcctctctttccyctttgtgattattcaaaaattctgctgtccatagacccccaaacctattatttcctctctccttcttagtatatgaccttgtctttgatttcactgagaaaatgaagttcaccaggtaayaacagtttacttccctatcacttgtaataaacccatcagaatcctcacccatctttccttcttccatggggaaggggcactctttctacccaaggttacttcttccagttgtccagtcagcttcatattcatccactgactcaagaatcttggtctataaagcatcctctctcacatgcatattttttgggktttttttgagatgaagtctcactctgtcatccaggctggagtgcaatcgcacgatctcggctcactgcaaactccacctcctgggttcaagtgattctcgtgcctcactctcctgagtagctgggactacaggcatgtgctaacgtgctcagctaatttttgtatttttagtagagacggggtttcaccatgttggccagactgatctcaaactcctggcctcaagtgatctgcctgcctcggcctcccaaagtgctgagattacaggcatgaaccactgtacccagccacacccacatgcatttttaatctctccctttcaacataattttgttacctcargttacaaaatgtgttactgtcttctatctgtattttaagatctattgacccgacatatgactctacttagatattatctctttccttcctgtcttaaccagacttcaaaccatctaaactcattgtttccayttccttaccttgtatkatcagcctgctgaaatttcacctgtcaccaccacaccagtgaagaatgataaacatgaccttcatattgccatttccattgaatactctcctctcattatgttactttacaactctttggcattttgttctagtaagtgctccctcccccttgaaaaccacttcttctttagcttttaccacatcatttttatgctctttcctctgtgccaccagttttcttccctcttctttacttcctttcccttctcagtgctaatatagaaataaagactttactatcaccaaaactttgccctgtgagagcattactagcaagggaaagatgtgtattgtagatgttccagtgtgaagaatatgaaagacctccttctaggtaaaaacccctcattatccttcaaaaatggaacyaggggtgaagtcatcataatcatgaagagcctggggttcaccttatctctgccttgtgagggtataaagaaataggcacccaaatttatacatcgctggagagtttacattggtggggccatttaaagctatcttataaaatttaaaatgcatattgccattaactcagtgatttcccccattatattcacacatacgcaaaatgtatgaaaagaacatttatctaaaatctgtagtaaaaccctcaggaccaagaacagataaaacaatttttaaaaagaaaaacaaagttggagaactatactaygctatattcttacttatagacttactataaaattacagtggggtagaagtgacaggatagatatattttaaaaaggaacagaagagaatgcagaaataaacccatgtgttggccaggcacggtggctcacacctgtaatcccagcaccttggaaggctgaggtgggcggatcacctgaggtcaggagtttgagactagcccggccaacatagtgacccctgtctctattaaaaatacaaaaattagccaggcrtggtggtgcacacctgtgatcccagctactcaggaggataaggcaggagaatcacttgaacctgggaggaggaggttgcagtaagctgagatcacccactgcactccagcctgggcaatagagagagactctggctcaaaaaaaaaaaaaaaaaaaaaaaaaaaatccatgtgttcacgatcaattgattttcaacatagctccaaaagaattcaatggaaaaaggatacttatttaaataaatggttctaaaataattgggcatttataagaaaaaaaaaacctcaacctatatctcacaccatgtayaaaagttatataaaaacaggctggatactgtggctcatgcctgtaatcccagcagcccaggaggccaagactagaggatcacttaaggccaggagatcaagacaagtctgagcaacagggtgaaaccccatctctacaaaattttttttaattggccaggcatggtggcattcacctgtggttccagctagctgtgaggctgaggcaagaggattttgagcccaggagtttaagactacagtgaactatgatggtgccactgcactccagcctgggtgatagagcaagaccatctcttaaaaaaaaaaaggaaaaaaaagttaaatagaaatacattaccgacctaaatgtaaaacctaaaattataaaatttctagaagaattcattaaggcaacctttgtggccttggactaggcaaagatttccttaacaacatacaaaaagaataagctataatgcaaaagattgaataggaaaaaaaacaccaaaatctgtttctcccatactatactctcmcaacaaaatgcttttgtgaccaaatgtgtagggatttttccccacatgccaagcaagcaatcgattctgcagtgaattctccagaggtcagcagctaagtgtcctctaactcaattcaattccgatactatctacctggagataccatcagatcccaaaaggtcagggctcagcctgacaagactgtctcccacttccaatgccagtcacaagcacaggatgtggcctgagtttctgactgactggctytaaatctaggtatccytgacaccctcctcaggtccaatttgctggatggctcacagaactcaggaaaacacttaacatttactcatttgttttaaagaatattacaaaagatacagatgaacggccaaatggaagagatgcatggggtaaggcatgtgagaaggggcacagattttccaggccccacacaggtgcaccacctgcaagaaaccaccacctgttcagctgtccagaagctcttggaacaagttcttttgggtttttatggaagcttcattacataggcataattgattacatcattggccatcattgatggccattgatcaactcaaccttcaacatccctggagttgaggagtggcacacgtaggcatatattacagaggcataattgattacatcattggccatcattaatggccattgatcaactcaaccttcaacatccctggagttgaggggtggggctaaaaatcccagccctctgatcatgccttggtcttattggtgaccacccccgatcctaaaactatctaggagcctccagccaccagtcattcatgagcatacataagacactcttaccactccggagatcccaaggattttagaagctatatgtcaggaaatgggaggaagaccaaatatatacagtcatgcacacataacaatgaaccatatatacataacaatgtttctgtcaacaaagaaccatgtatacactgtgttcccataagactgtaayggagttgaaaaatttctattgcctcgtgattccatgaagtcgtagctcaagacactgcacaaacactcaggtatttgtggtgaggcaggtgcaaacaaactcactgtgctgccagtcacgtaaaagtatagcacatacaattatgtacagtacatgatacttcataatgataataaacaactgttattgtttatgtatttagtatacttttggttttttagagatggggtctggctatgttgcccagactggaatgtggtggctattcacaggcacaatcatatcactcaacagccagcctcaacctcctgggcccaagggatccttccatctcagcctcccaagtagccaggattacaggcacatgccatggcacccagctatttcttatatttttaatcattatcttagagtctattccttctacttattaagaaaaaaaaatagttatctgtaaaacagcctcaggcaggtcctttaggaggtgttgcagaagaaggcattgttataatagcaggtgtcagctccatgccttacttccgaagaaggccttccagtgggacaagatgtggaggtggaagacagtgatactgatgatcctgaccctgtgtagcccgaggctaatgtgcatgcttatgtcttgttttttaaaaaaaagtttaaaaattaaaaatagttttaaaatagaaaaaagcttatagaataaggatataaagaaaaatattttgtacaactgcacaatgtgtttgtattttaagctaagtgtatcacaaaaagagtaaaaaaaaaaaattagcygggtatggtggcgtgcgcctgtaggcccagctactcgggaggctgaggcgtgagaatcgcttgaacccaggaggcrgaggtcacagtgagctgagatcatgccactgcactccagtctaggtgacaaagcaaaactgtgtctcaaaaaaaaaaaaaaagagtaaaaaagtttttaaaaatgtaaatgtaaaagtttataaagtaaacaagttacagtaagctaaggttatttcattatttcatttactgtagcttaaacgtacaatatttataaagtctatagtaatgtggagtaatgccctaggcctttacattaacttaccgattggtcattcagggcaacttccagtctgcaagttccattcatggtaagtgtcatataccggtgtaccrttttttatcttttatactgtaatctgcaagctccattcatggtaagtgtcatatgcaggtgtaccattttttatcttttayactgtattttactgtattttttctatgcttggatgtgtttaaatacataaatacttgccattgtgttacaattgtccacagtatttagtacagtaacttgctgtgcaggtttgcagcctaagagcaataggctgtcccatatagcccaggtatgtagtaggctcttccatctaggtttgtgtaagtacattctatgatgttgccacgatgatgaatttgcctaacgatgcatttctcagaaggcatccttgttttcaactaatacataactatacatctaccatatgatccagccatgccacttcctaggcatttagccaagaaaaaagaaagactatgtccattcaaagattcgtatccaaatgttcataacagctttatttttaatagccaaaagctggaaacaacttaaacgtccatcaaagagtaaatggataaattaattgyggtaaatccacacagtagaatattagcaataaaaaagagtaaaatattgatgcaaacaacaacatggatgaatctcagaataattatgctgagtgaaagaagccagaaaaaaaagtacatactatatgattctataaaactctatgtactgtaaaactctagaagatgctgtctgatatatagtgacagaaagtagattgggaattccgggggtaatgagtgttgaggggacagggaggaaagggagaggaattatgaaaagtcatgtggaaacttttgtgagaaattgatatattcactctgctgattgtggtggtgatttcatggatatatacacctatcaaaacttatcaaattttactctttaaatatatcccacttattgtatgtcaattgtaccttaatcaagttattttttaaaggaagaagtgccaggcattgtggttcgtgcctataatcccagagactcaggaggccaaggcaggaggatcacttgagcccaggagttcaagacctgggcaacacagcaagaccccatccctaaaattttatatatgtatgtatgtgtgtgtgtgtgtatatatatatatatgtatacaaagaatgattaagaatctgtcacagtaacctaggtgaaaaacaacagtagcttggaaagagttgaaaagtgggaatggaggaaaagagtgagatttagaatacactttgttaacagagacaagaaagttttctgatgcagtgagtaaaaaaggaagagccgggcatggtggctttcacctataatcccagcactttgggacacgaaggcaagaggactgtgtaagcccaggagttccagaccagcctgggcaacacagtgagacccccatctctatttgtattttctttttaaaggaagaaatcagaaatttcttcagtttgatatttaaacaactgagtagatggtagagccatttcctgaggtggggaagatgggagtacggatatataagagaacatattcatcctatcatcctggccaccgtgcccagccaggatctcattctttttatgactgagtagtactccctcatgtatatgtaccacatttttctttatccattcttctattcattgacacttagattgctgacaaatcttggctattgtgaatagtgctgcaataaacatgggagtgcagakatctctttaatatactgatttcatttcttttgtgtatatacttagcagtggtattgctggatcatatgatagttctattttcagttttttgaggaaactacatattgttgtccacagtggttgtattaatttacactccaaccaacagtgtatgagggttcccttttctccacatccttaccatcatttgtcattgcctatcttttggataaaatccattttaactgggatgagacaatattgtagttttgacttggatttctctgatgatcagtgatgttgagtaccttttcatatacctgtttgccatttcaatgtcttcttttgaaaaatgtctattcagatcttttgcccatttttaaattgtattattagatttttttcctattgagttgtttgagctccttatatattctggttattaatcccttgtcagatggatagtttgcaaatgtttcctcccattccataggttatctcttcactttgtttcctttgctgggtagaagtttttaactggatgctatcctatttattcatttttgctttggttgcctgtgcttgtggggtattactcaagaaatctttgctcagaccaatgtcctagagagtttcctcaatgttttcttttagtagtttcataatttgaagtcttttatttaagttgttaatccaattttatttaatttttgtatatcaagagagaggagggtctagtttctttccttctttccttccttccttccttccttctttctttctttcttttttttttttttaaatagagatgaggtctcgctatgttgcccaggctggtctcaaactcctgagctcaaatgatctcccacctcagcctcagaaaggtctagtttcattcttctgcatatgaatatccagttttctcagcactatttattgaagaaactgtcctttccccagtgtttattcttcacacctttgttgaaaatgagttcactgtaaatgtatggatttacttatgagttctctattctgttccattggtctatgtatctgtttttaatgccagtgccatgctgttctagttactatagctctgtaatataatttgaaatcaggtaatatgattcctctagttttgtttttgtttttgtttttgttttttttgctcaggatggctttggctattctgggtttgtggttccatataaattttaggattactttttctatttctgtgaagaatgtcattggtattttgataggaattgtattaaatctgatctgatgctttaggtactatgggcattttaatagtgttgatttttccaatccataaacatggaatatccttctactgtttttgtgttcgcttcaatttcttgcatcaatgtcttacagttttcactgtatggttttcacttcttttgttaattcttagtaattttattttatttgtagctattgtaaataggattactttcttgatttctttttcagattgttcactgttggcatatagaaatgctactgattttttgtaggctgattttgtatcctgcaacttcactgaatttgttaatcagttttaatagttttttgtgaactctttaggtttttgcaaatacaatatcacatcatctacaaacaagaatgatttgacttcttcctttccaatgtgaatgcccttcattcctttctcttgtctgattgctctagctaggacatccagtactatattgaataacggtggtgaaaatgggcatccttgtcatgttccagatcttagaggagacaatttcaggttttccccattacgtataatactacctgtgggtctgtctcatatacggcttttattgtgttgaggtatgtctttgtatacccaattttttactgtttttatcatgaaaggatgttgaattttatcaaatgcattttcagcatcaattgaaataatcacatggtttttgttcttcattctgttgatatgatgtatcacattgattgatatgtgcatgttgaaccatccttgcatccctgggataaatcccattttgtcataatgaatgatctttttaatgtgttgttgaacccagtttgccaatattttgtaggaaatttttgcatcaatgtctatcagggatatttacatttgggtttgtttgtttgggattttttttcttttcttttttttttttttttttttttttttgagatggagtttcactcttgttgccctggctggagtgcaatggcatgatctcggctcactgcaacctccacctcccaggttcaagtgattctcctgtctcagcttcccgagtagctaggattacagatgcccaccaccacgcctggctaatttttgtatttttagtagagacaaggtttcgccatgttggtcaggctggtcttgaactcctgaccttgcgatctgcccgccttggcctccctgtttgaaattttttaaaatgtgtctttggttttgtatcagggtaatactggcctcatagaatgagtgtggaagcattccctcctcttctattttttaaaatagtttgagggctgggcacagtgtttcacgcctgtaataccagcactttgggaggctgaggcaggtggatcacttgcagtctagagttcaagaccagtctggccaacatagtgaaaccccatctctactaaaaatgaaaaaattagccaggtgtggtgacgcacacctgtaatctgagctacacaggaggctgaggcatgaggaatcacttgaacccaggaggcagaggttgtagtgggccgagatcgtgccactgcactccagcctgggcaacaaagcaagacactgtctcaaaataaaataaaatataataatttgagtaggattggtattagttattctctaaatgtttgggaaatttcagcagtgaagccactgggtcctgggctttattttcctgggagacattttgttacagcttcaacctcattacctgttattggtctgctcaagttttgaatttcttcacggttcaatcttggtaggttttatctgtctaggaatttatccatttcttctaggtttttcaatttattggcatatagttgcttgcagtagcctctaatcatcctttgaatttctgctgtatttgttgtaatgtctcctttttttatctctgattttactcatttggatcgtctctcttttttttcttacgtagtatggctaaaggtttgctgattttatcttttcaaaaaaaccaacttgtggtttcattgaccttttgtatcttttttcatgtcaatttcatttacttctcctctgatctttattatttcttttcttctactaattttgggtttgatttgctcttgcttttctagttctttaagacgcattgttaagttgtatatttgaggcatttttacttttttatgtaggtggttttaggtataaactttgctgttagtactgctttcaytgtatcccatagattttggtattatgtttccattatcatttattttcagaagttttttaacttccttcttaatttcttcattggctcacctgtcattcagtaacatactgtttaatttccatgtgtttatatagttttcaaagttcctcttgttactgacttctagtttttttccattatagtcagagaagataaytgacatgatttcaatttttttgaacttttaaagacttgttttgtgaccaaacatatgatctatccttgagaatgatccatatgctgaggagaagaacgcatattctgcagccattagataaaatgttctgtaaatatctattaggtccacttggtctataggacagattaagtctgatgtttctttgttgatgttctgtctggatgatatgtctaatgctgagagtggggtgttgaaatcttcagctattattgcattggggtctatctctttctttagctctgatatttgctttatatatctgggtgctccagtgtcaggtgcatatttatttacaattaattattatatcctcttgctgaattgacatctttatcataaggtcaaagagaccttgtctctttttataatttttgtcttgaaatctattttgtctgatgtaaatagagccagtcctgctctttttggtctccattggcatggaacatctttttccctccctttattttcagtctacttgtgtttttataagtgaaatgtgtttcttgtaggtgacagattgttgggtcttgtgtttttatccattcagccactctgtcttttgattggagartttagttcacttacattcaatattgttattgataaaacatactcctgccattttgttatatgtcttcttgctgttttgcggtcttctcttccttctttccttccttcctgttttcctcttagtgaaggtgatttyctctggcggtatgttttaatttcttgctttttattttttgtgtatctgttgtatgtttttttatttgaggttaccataaggcttgcaaataatatcttataacccattattttaaactgatgacaacttaacactgattgaataaacaaagaagcaaagagaaaacaaataaaaactctacactttaacttcatgccaccactttttaactttttgttgtttctatttatgttattgtactgtccatgtcttaaaaagttgtggtagttwtttttttttggttaatcttttagtctttctactcaagatatgagtagtttatgcaccacaattacagtgttataatattctgtttgtctgtgtacttactattaccagtgagttttgtaccttcagatgatttcttattgcatcttatgttcttttctttcagattgaagaaccccctttagcatttcttatacaacagatctagtgttgactaaatccttctgcttttgtttgtttgggaaagtcattatttctccctcatgtttgaaggatattttcactggatacattactctagggtaaaagtttttttccttcagcactttaaatatatcatgccactctctcctgacctgtaaggtttccactgagaagtctgctgtcagacatattggagctcctttgtatgttatttgtttcttttttcttgctgcttttaggatcctttctttatccttgacctttggaagttcaattattaaatgtagtcttatttgagttaagtctacttggtgttctataaccttcttgtgcttgaataktgatattcttctctaggtttggagagttccctgttgttatccctttgaataaactttctaccccagtctctgtctctacctcctctttaaggtcaaaacaattagatttggccttttgaggctattttctccatcttgtaggcatgcttcattcttttctattcttttttctgttgtctcctctgcctgtatattttcaaacaacctgtctttgagcttccttcttctaactgatcagttctgctgttgagagactctgatgcattcttcagtaagtcaactgaatttttcagctttagaatttctgcttgatttttcaaacttatttttgttaaatttttgttctctttgttaagtttttctgataggattctgaattccttctctatgttattgatgtggtttggctatgccccacccaaatctcatcttraattatagctcccacaattcccacatgttgtgggagggacctggtgggaggtacctggtgggaggtaattgaatcatgggggtgggtctttcccatgctattctcattatagtgaataagtctcatgagatctgatggtcttatgaaggggagtttccctgcacaagttctcttctcttgtctgctgccacgtgagatgtgcctttcaccttctaccataattgtgaggcctctccggccacatggaactgtgagtccactaaacctctttttttttagtaaattgcccagtctcaggtatgtctttatcagaaggatgaaaacggactaacacagttaccttgaatttcattgagcttcctctaaacagctatttcacattctctgtctgaatggtcatatctctgcattctggcattggtcattggtgccttatttagttcatttggtgaggtcatgttttcctcgatggtcttgatgcttgtggatgtttatttgtgtctggtcattaaagagttaggtttttattatagtctttgcagtctgggtttgtttgtacccatccttcttgggaaaactctccaagcattcaaagggaattgagtgttatgatctaagtctttggccactgcagctatatctgcattaggaagcaccacaaacccagtaacactgtgactcttgcagacttatagaagtaccaccttggtggtcttgggtatgatacaggagaatttactagattaccaggcagagcctcttgttatcttctgttacttttccccaaagaaatggagtctctctctccatactgagctatctggagcttggggaatagtgacacaagtaccctagtggccaccacaacttggagtgcactaggtcagacctgaagccagcatagcactgggtctcgcccaaggcttgtggtaaccactacctggctatcactaatgttccctcaaggcccaaggactcttcagtaagcttatggtgaatgctgccaggcctgggtctctaccttcagggcaatgggctccctcccctctgactcagggcaggtccagaaatgctgtccaggagcctggaatcaaggaccccaggtgcttacttggtgctctaccccactgtagccaagctaatacctaagctgcaagacagagtccccattagtcttgggttaaatctctccttatctatgtccaaactccctctaatttcctcaagcagaagaagtctctccccatggctaccatagctaacaatgtgctgggtcacactggaagccgcatggcactggatctcacccaatacctatggcaaacactgcctgggtactgctgctgattattcagggccaaagggctctttagtcagcaggtgatgaatcctgcctggactgggtccttcctttcaaggcagcacattcctttctggtccagagtgggtcttaaaatatcatccagaaactaggtcccagaatagggaccttaggactctgcgtggtggtgccctatccttctgtagctgagctgtatccaaattgcaggacaaagtcctctttactcttccatctcctctcctcaggtggaaggaaggagtctctcccagagctgcaagctccactgcctggggtcggaggaggggttacacaagcactcccttggccacccagctggtgtttcactaggtcacattccctccaagtccactggctctgagcctagcatagcaccaggacttgcccaggaactgtggtccttgtagcctagattgcctttcaagtttatttaggatcccagagtgttttagccgcagtggtgggactagcagaaactcaggttccgaccactgggatgggccattcccctgtggctagggctggtctaaatgctccctctgtgggcackggctgawttctgtcccatgtcgctatctgctttgacagagctgcaccgagttccactgcaaagtcccataatcacagcactcttcctccccaaagcacagactctctctccacaccacactgtgctgctgggagatggggaargggtggcattggcaaatcaagactgtctctcctgtcctcgtcagtgcctcttttgttgatatgatgttaaaaccaggtactgtgactgctcatctgatttttggttcttatgaaggtgctttcttttgcggataattgttccatttgtattcctgcgggggaaaaatcagtggaggcttcttgttcttgctccacctcctcctgtgtgttcctggattttcttcattttaattttgtgactgctctgttattatctttaataaatgtcctattccaaacactgaatgtcccagatatgtttaatgtataatgttcatcaaagaagtccrctgtgcaatgtaagtgctaatcaaaaaatgttagtttctagttttaccaaactttatttcactaggtaaggtgcaagaattgagttactaactgaccccagcccttcmtaaataagtctaaggaataaataagcaaccaggaagtaaactgttacttctcttgtaacaaccttaagggagacaaagcagtgaagaactacacccaattctgacaataggtggatgaatccttataaaaggcctgaaccctagtcacagaggaggtctgcacacatcctgcctgctcagatgagaatttaagacccgactgtagttctccttttcttatctttcaataagtaaatgaaattgtgcaccctgtagtagccaagccatggcccacatggaatcgytatcattacatccttaattgagagtcactaccaaaatatycataactaagggatacttcctgcaccagaaccaaagggaagagatcactaggggatgggagcttgtttccacgacttccttctatgagcattgtatccagattaactggccctttgcctttgtagagttagctactgaagactcatattggtgagttagggaggattaggatatactgtttttctcatcttcaattcctctaatttatgggctaacagaaataactagaatgaacagttttcattcttactttttaattcatccatttatttatttaatagtcactgaacrtaagcactatcttaggtatttgggatatagtggtagataagatacagtccatgtttttaaaaaaactatgaaagataaagagaaaaagattataatccaggatcatcaacactacagaattatggyctccttcatcactgtaccttctctccttatgtatgtccaaactctactgaggagaaataataaagtttttcttatttttgaggccttagtacctaagataatttggtgatccaaccayataaactgtttctgtaaactttcctctatgaaaatgccttatcgaattgactgctatcttgaaattaatatgcaggtcaaacagtcacataatggaaaagatacaatcacacattggttcattcaaccacatatatgcatactcagaaaaaaaacaaaatcarttaagaccgggtttttgcattacgtgtgaagagctcagaargaggaagtaccaccttgccctcactcatttcccacaatttatattctcacattagcatttttttttttttttagagatggagtcttgctctatctcccaggctggagtacagtggcacaatcatagctcactgcagcctcaaactccygggctcaagcgaccctcccacctcagcttcccaaatagctaggactacaggtacacaccagcatgccagctaggtttattcttcagaataaagcttgatctgcaaagggacactgttaggatagaaatataccatcagggatcagtaatgtacagaggagtacagcaataatgtacttctctagtacacaagcaatagtatatattggcatagattttatcagattagctcagaatatcatatgaaaaaggtatatttttgacagagatggttgggacggggatgagagtggcagcattagtttccatactgagaaatacaaaaaacaaacatctatttcaaaatttgcttaratctggtctttaaattgctcacataatatctaaatagtctcaaagagaatccatcagttaggcatcaatccctaggaggttgtcttgcatctaatgccatatctgagaaagttcagtatttgctaactatatactcatggctttcccaacagccagtggccagctccctccttttagggatacatgacagatctgagggtcaggacagagtggtcatctatcaaagtctgaccttcttacacacccagtgtaaaggaacttcacagcttgaggcttgaagaccatttttgttgatggcaccgcatgtctgcacaaagctattagaagaaatcctgtaagaaatcagaaaagtcaatcacttaaggccrcatgcacagaaaaggagttgaaaggcatgaagggataaaaatgaagcaaattctgtctccctattcaggcccctaattcccccaaacagcagaagaattaaaattgttcatcagcctctctttaaaatgttatcctttttttttttttttttgcccttacccattgttcattcccttccttkttccctatttcctctccttttcattctttcctctcctctccatctgctcttctttatctattccccaagtatcataatttggctttcctttttcctctctctctttttttgcattcctttgaagccccttaccttgagaagtttagaggtgatccrtcttcccacctccagccagaattgttcctcagaccaatccagcaaaaggcctcactgaggaaaacttggagcaggctctaagggagaggttgaaaaccaaaaaagggacctagtgtcacagtcaaacaattattcctttccacattggattcctaatactaagttaagtaattaattaaaagacaaactagcattccttacagcctccatcatcaccactcttaaggactgaatgcgtcctaaaatcaatatgttgaacccctaacccctaatgtgatgaaatctgctggtgaagcctttagcaagtaattaggtgtagatgaggccatgagggtggggcctccatgatgcaattagtgtccttataagaggaggaagagatcaaagcactctctttgccaagtgaggatacaacaaaaaggcagccatgtgcaagccagaagtaggtcctcaccaggagccagagaaccttgatgttggattttccagccttcagaactgagagagagaaacatctgttgttcaagcgatccagtctatggtattttgttagagcagcccaagctaagacaattattcactctaaataactaatttctcatttaacatctaattctaaagatgtgttagctgtagagaggagcagcatcctrgaattgacctttctgtcaataactggattcttataatgtagcaaataagataatattacatctctaccttccattgcaattttctccttaattaaagggagcacctgataggtattcagattatttcaaaagaaagaagctaaacrtttgctgcagaagtggtcatctttcccatcatccttaaatatataaattaygattaagcctatagcaatattcttgtttttttccccactgaggtctcattttccgcatcctcatcaatcttgtatgtggcaagaaaaaaacagttcttaagggaacaagtttaaggtaaaggtaaattggctacaccacttatgtgtgccacgttacccaacagaacagagataaaagactttgatctgcaaagtctgacattcaaatgaagaagtttatatccaaagagaattgcctctataaatgaaataaaataaaatgttaaagattaaaatagattaaaataaaaggttagaaagataatccaaggtaattttgttgtaggatttagtgttggtgtaattaacaattacactttcaatattttctaawgacagcttaattggttaaatacctttggaataaaatattcttttttatctagaaactactaagaaagcaatacaatttcaactgcctatggtgattatgataccaccagatgtcccattttgatgttgtttttattccactcctgaaagatggttgctgaagagtaaacatttatgggctctgctcttaaytgtctctttgcctacttggaccctgcatcagcacaaataaagagttgctcttctaaagttaagggagggccaggcacagtggctcacacctgtgatcccagcacttagggaggccgaggctagtggatcacttgaggtcagaagtttgagaccagcctggtgaatgtggtacaaaaagcctgtctctactaaaaacaaaaataaaaataaaaaattaggcatggtggckggcacctgtaatcccagctacttgggagactgaggcatgagaatcgcttgaacccaggaggcagagattgcagtgagccgagatggcatcactgcactccagcctgggtgacggagtgaggctctgtctcaaaaaaacaaaataaaataaagagaggcaaaaagcctctttgcacttctagtggagacactacaggagagaaaaggagtcttttgtgctatttctcatggtcagaataacctctattttctcttcactgggtttcagtcctgtttccattcaggacatgactgtggtggctcctagacaaagcatttgaaaaatcagtacaacttgtttatcagtgcttttcttcccaaataatctattccttatgataactttgttctctcagagcccagtatcctgaaaacaattatctcttacatttgtattgtactctaaggtttgcaaaatccctttgcgttcattcccagtatcatttgaaatactgaatatacagtatggcatttaggaaaacaaagcagaaacaaaattctggagcctcctagctctgtcctcctatctgaagataagcaggtggtttaatctggctgagcgtcaacttctttatgaggatttaggttagatattttctaggattctttccagttatgaaattcttgacaatcttggaaggtaggcaactattattatcctcacctttagagatgagaagacaaggtcatgtgggtgaaagaattcatccaagtctccttttcaaataatcatccaacttttctctcccagtgctaaacttttaatcactctgtgcccctgattaatgttctccagtagtctcacttttcacatagaataaaatctaaaatccttactatgtacgcacagtcctacacaatctagcccctactaaccatttactcacttcctaggttccagccacatgagccttctttcttttcctttaacatgccaaggtcattcttgctttaaggtctttgcatagcttttccctctgcctggaatatcttacccgagatttctacatggctgtcaatcaggtctagatatcaactcaaatgttccctccccaaagaggccttccttaactaaccaatctaaaatagtattcacatttactattatatcatactgtttcattttctttaaagcacatatcaccatattcatttatttagtctgtctcttccgaagaaaatgaaagcacacgtaacatgtatgcaatgtgtaatgatcagagcaggataattagcctatcacttcaaacatttactatttctttgtgttgggaacattcaaaatcctctcttctagctatttgaaaatatacaataaatggttgttaactatagattaccctgcagtgctatagaacaagggtccccaaccctcaggccatgcaaggtgctggtctgtggcctattaggaactgggctgcacagcaggaggtgagcggctaggcgggccagcattaccgcctgagttctgacccctgtcagatcagcagatcagcggtggcattggattctcataggagtacaaacactatcgtgaactgcacatgtgagggatctaggttgcctgctccttaagaaaatctaactaatgcctgatgatctgaggtggaacagtttcatcctgaaaccagcccccagcaacggtccatrgaaaaattgtcttccacgaaactggtgcctggtgctaaacatcttggagaccattgctatagaacattagaacttattctgcctatctagctgtaattttgtatcctttaacataactctccctaacctccccatccccagccattctcagcttcttgtatcgtctgttctgaggtcaacattttttttagttttcacataagcgagaacatgcagtgtttaactttctgttcctggtttatttcacttaacacagtgtcctctagttccatccattctgctatgaatgacaggatttctttattttccatggctgattagtattctatggtgtatacatacacattttctttatttcattttttattattatactttaagttctggggcacatgtgcagaatgtgcagttttgttacataggtatacacgtgccatggtggattactgcacccatcaactagtcacctacattaggtatttctcttagtgctatccctccccttgccccccaccccccgacaggcccggtgtgtgatgttcccctccctgtgtccatgtgttctcattgttcaactcctacttataagtgagaacatgcggtgtttggttttctgttcttgtgttagtttcatttatccatttatttgttgttgaacattttggttgatttcatatcttggctattgtcaatattgctacaatacatatgagagtgaacatatctcttcaacatactgattttatttccttcggataaataccctatatatataattattatgtgccaatttaaaaaaatgttaataacaaaactaaatttaaaatatcattttccttaaaaataataaataaaatgtaaacattataatagcaacaactcgactaccatatccctagcacctagaaaaatatataaaattatactcaataaatgcagaccaggcacagtggctcctgcctgtaatatcagcaatttgggaggccaaggtgagaggattacttgaggccaggagttcaggaccagcctggacaacatagtaacactctatctttacgaaaagtaaaaaatgtagccaaccaggcatggtggcatgtgcttgtacttggtgacatgtacttgggaggcagaggcagggaggaggatcatttgagcccaggagtttgaggctaaagtgagctgtgatcatgccattgctctccagcctgggtaacagagcaagatcccatctcttttttaaaaaattatgtttaataagtatctatagaaataaagaacacacaattaggtattatgctgcaagaagttaaaactctctgaacacatggcaatcattaaaaagtcaggaaacaacaggtgctggagaggatgtggagaaataggaacacttttacactgttggtgggactgtaaactagttcaaccattgtggaagtcagtgtggccattcctcagggatctagaactagaaataccatttgaccctgccatcccattactgggtatattcccaaaggactataaatcatgctgctataaagacacatgcacacgtgtgtttattgtggcactattcacaatagcaaagacttggaaccaacccaaatgtccaacaatgatagactggattaagaaaatgtggcacatatacaccatggaatactatgcagccataaaaaatgatgagttcatgtcctttgtagggacatggatgaaattggaaatcatcattctcagtaaactatcgcaaggacaaaaaaccaaacaccgcatgttctcactcatagatgggaattgaacaatgagaacacatggacacaggaaggggaacatcacactctggggacagttgtggggtgggggaaggggggagggatagcattaggagatatacctaatgctaaataacgagttaatgggtgcagcacgccagcatggcacatgtatacatatgtaactaacctgcacattgtgaacatgtaccctaaaacttaaagtataataataataaaaaagaaaaagaaaaaaaaaaccctctgaacacaaactctgtattttttactttctctctgtggagcacttaactgtgcatgctgggggtaagaaggtagaccggagagtgaatgaagtatacgacagatgaaatgacactgtaattttcaagatagcttaaaatttttgcatttcttaaccaacttgtttaaagaattatttaaattaggaaaaaaagaatggattttttttaatattttcacaaaattggtgtgaatgatagccatgatctaaaagattcaaaaataaatgttactgcattcaaagtatataaaatttgagtatattcaaatcaaaaattgtaagctaaatatttgaaaaaataaataaaattaacaaaaggaaaaaaagagtgattccccatttctccactgataatgagaaaaacagtccatttctttttctttcatttcaagaggaggaacggcagctaatgaagcacagaaattgataaagatttgctcagaaatttcagttagaatctgcagagctaggattaggtaatgcccacgtacaaaccccaatcctgtgctcatttactaccctcaagacccatataattctaaatcacttgatcagtcagtcctcttacaacttctcattggtgaggctggatattgaaaatgtttattatggcactttcactcgaaaatcttcccacttggaagaggccttcaaaaccatagtacaataaccttatattctatgtactcatggataatgtgtgtgtgtgtgtgtgtgtgtgtgtgtgtgtgtattagaaagagagagaatatagaagcagcatgaaagtacaaatcggtctggtgcagtggctcacatctgtacttccagcactttgagaggccaaggcaggaaaatctcttgagcccaggagttcgagaccagcctgggcaacatggcaaaactccattaatacaaaaaatatgaaaattagctgggcatggtggcacatgcctgtagtcccagctacttaggaggctgagacaggagggtcatttgagcctaggaggtggaggttgcagtgagatgagattgtgccattgcactccagcctgggtgagagtctcaaacaacaacaacaacaacaacaacaaaagtataggtaaaggtggtaactgagaactcttgtcacccagagagggtgtgagctagaacacttaggtgttatgtcacttagagtttgtaatgtttgcttatattttagaaaaaatgcaaaccctaaaagcaaagtgaagataaaacccaaacaaataaaatcaagggcactttttcttttcttttccttttttgcttttttagttcaacatttataccttccacatacacttctgtatgtagtatttttaattgaaattaaaatatcattaaggcacaaagcataccccttaaacttccaaattaaaatggtttacagaatgtatgtaagttatttcaacccatattaagaaaaactaataatacatcaaaactataaaatcttatcttttgattagccaacttaattttagggaatataatgtaaataaataactgcaagcaaaatgatttctataaatatgctcacagctcatgacaattgaaaacaaggagaattttatctaagaatatgaaaagatttaagcaatagtggaatgatgcaagacgtataaaaataatatttaaaactaaataaaaaataaaataaaatctggttgcaactttttattacctggaataatttaatgcttagcaaaaaccaagaatgaaataatgctatttgataaaagcagaatacaaaataatgggttccaaaacacctaaaaacataggataaatgtatttttaggcagtatatctctgttttgtcccaccaaacccatggctgaaatcatcccaaaagcagcgacaggggaattcccacaagggaggaccccaaatcatcatgagatggggttggttgggataccatagaataaagcactaaatgtcaaggtgatctgtgcaaagcatctattaggggaagttacagagggctgcagcaacactcacgatggacagccagagaaaaggagcatttgacctacatatgtccacggccagggggtcagagatggagattttatgagggtttaaggaatctgacttagggctggggctagtttatttcagtgttttgagcagcaacctagatacctttatcagtgactggaaatgttcaaggctggggtttgggtagagcctgcaggggaaaaacctgtagctgggcgggtcacagagcggtcaaggccctctgcgattttcagccaatacacagaaagaaagccaggcactggggaaccctacagtctyatattttaaaataatatcattaatatgtttttcttcagacactttttcaggtgaagtatttaaagcaaaggatgtaattactaatttgaaaaaaatttacaatacagagtactcataaggtctaaaaataattatatctattgctttaaatttagagatgtttcacttgaaaacatgtctcaagattgagtaaaaatatagagcatattacttgaaaatgtaaccaacatactgtttaaaaataagtttagcctgtttccagacttttcagatatcctataatatgaacacattaattaccatcatctaaaaacatgcaaataacgttaagaaatttcaaaggaaaatctgacaggttacaaattactagagsttaatatcaataagaattttccctataattttgtgtaagtacacaatgctaaaagtcagtaagccctgctccgtaaaccatcatttgctccactttttaaaagcttgtggaaacagtgtctgtcaatagatggatatccaarttcacagcagccttactctcaacagtcaaaaggttgaagcatcccaggtatccactgatgaataaatggacaaacaaaatgtagtatatccatataatagaatgttattcagccataactttgatacatgctacaacacggaagaaccttgaaaacagtrttctaagtgaataagtgagacactaaaggacagaataggcaaatacatagatatggtaagtagaatagtgattaccaggggctagagggaggggagttattgtttaagaggtacagagcttcaaytgggratgatgaaaaagttctggagatgatggtagtgatggttgtacaacaatgtgaatgtacttaatgccactcaattgtacacttgaaaatggttaaaatagtacattttatgctatgcatattttcccacaattttttaagttaaaaaatagtggaaatatcctagcttatcatgcccatcccttgttatgcagttgacactagctgcttaatctgattataaagaagcgtgacaaaagatgcacattaccagactgtgaagacctccagagtaaagcaattcccctaccatctatgctgtgtttccagccatttctttgaatcttctgacatgtcatctcagatttcctcataaacaatatactcaattcaacaagtcataatttactctgtgatgcatattttactgaaattgtatgtcttgggacacagaagagcaaagtaaaagttatttttggctctgggctttatattgttttttgagttttttgtgtttttgagacagagtatcactctgtctctcaggctggagtgcagtggcctgatctcggctcactgcgacctctgcctccggggctcaagtgattctcctgcctcagcctcctgagtagctgggattacagaaacgtgccaccacacccagctaatttttgtatttttagtatagatgaggtttcactatgttggccaggtcttgaacttctgacctcaaatcattcacccatctcggcctcccaaagtgctgggattacaggcgtgagccaccacgcccggacagtctagaaagttttatcttcactttgtacatgaggaaactgagagtcaaaaaggttaagaaagttgttgaagttcgcatagctagtaagaaatatagtaaaagcacactcatgactgtctgaaagaaaccaagctgttttcattacctgattaaaaatatacagaaaagtgaccatgttaccatagtgtttgcwttgctgcacccaaagaaggaaactttggatattattagatgtaaatcctaaatatgtgagaagccgacatcaaaagctcggggaatcccaaggtcaggaagataggtaaagttgaatgagaggttgttgcaagagtaaagttggatcatataattccaaattatgataatgaggaagagagatattatagggcaaggagcatcagaatagatttaaagaaatcaaagcagtttcactgggaactcactaacgaatgcatactttaaaataacataccaataactataaggaaccaggctaacaacatccaggatgaactgagcttggtgggggaaaaatggcaagaaaaatcaagaatttgaatatatccaaacatctaaagatatactcatagggcaagaagaagcaagggctgatgccataatgttaacacaaaaatgagaaaataacagagaaatttaatttccattttattttctctatcaagaataatcttgaagtcccagatagaaaaaaaaaagagataataagaaagcatctcactattttaaatatatttaagcctataatcccagcactttgggagaccaaggcgagaggatcacttgagcccaggagttcaagaccagcctgggcaacatagtgagacctcatcacaataaataaatttaaatatccacggtcatacaaygtacattctgtatgtcaattcaaaaaaatttttaaatatgtatagaaaagaaaccagaagacaattagtagaaaaagttgtcttgttgaacatatgcaaaatggattctggaagctgtcaaatacgatatttctataagtgactttgaaggtgagttgatgtggatttttttttttttttgagacagagtctcgctctgttgcccaggctggagtgcagtggtgtgatcacggctaactgcagcctctacttcctgggttcaggggattctctcacctcagcctcccgagtagctgggaccacaggtgtgcgccaccacacccagctaatttctgtatttttttgtagaggcagggtcttgccatgttgcccaggctggtcttgaattctgggttcaagcaatccacctgccatggcctcgcaaagtgctaggattacaggtgtgagccaccatgcccactggagtagaatttaaaatttggctctgccagatttgtagccttagacttacactcattaattctccgaatttttttttttgagacagtgtctcactctgctgcctaagctagagtgcagtggtgcagtctcagctcactgcagcctccacctcctgggttcaaacgattcgggtgccttagcctcccaagaagctgggattacaggtgcataacagcacgcctagctaatttttgtatttttagcagagatggggtttcaccatgttagccaggctggtctcgaacgcctgacctcaagtgatccacccacctcagcctctcaaaagtgctgggattacaggcaggagccactatgcccagccaattcctctgaattttattcattcaccaacaaaatggggatgttgaactctactttttagaattgctgtgacgattaagaatactatacataaaggtcgggcgtggaggcaggcgcctgtaaccccagttacttgggaggctaaggcaggagaattgctggaaccctggaggcagaggttgcagtgagccgagattgtgccactgcacttcagcctgggcaacaagagcaaaactccatctcaaaaagaaaaaaaaaaagaatactatacataaaacatctggcaaaaagcaagtgctcaatccatggtagcctctgttattattgtacactttgccgtaagtgatctaagataggaggtgaactctacgtaagcatctcactgaaagatgaccgtttaacagcataagagggatattttccataggcctgtagattctacatatagcaacaaaattctctagcagcactctccaccaatggaatgtcagtttgaaaaacttcagttttaatagatccatagagctctcttttttatttttacttcttgcttttttggtagtggctcagaccccagtatgatactagaaacattgtacatacctcaaaatagtatgtaaatcttgccctgagaacaaaagaataataacactagaacaacagacgcagcagggcacgtaaaatcaatttggttctacagaatctgacaaaagccggagcaagaaaaagaattaaaccagagaatcaagtaagattccacaggaatgttaaaagtaaaacttatgacatctagcagggacattccgccctctccagcactgacttggccccaaggagccttaggagaaaataaactcaatttggaaatgcagtgaatgtaactctgctggttttactcaacaatagtctaaggaatgggggcatgtcaggaagcagaggaaggacaaaatccctctaatgatcctgcccttcctctgggttcctcagagaaacagaaatattgccattttcccagatattctgtgcccttcatcctttccctcctcacctctcatgatcacactgtgaaatttatagcagctgctacaccacaattttctgtggcagtgtcttgtgctatgactcacractcctgtttatcagttttgccctcaatgtttcaagttcatggctcacttctgctactgactttagtcagctcaaatcctgagagtcactatatcagaatgagaataggagttgctacaacaaggtccagaaagcaaggctatattgctggaggccataaaactaagaactcatgtttaattaatacaactcaatgcattctgccacctcacttagagaaggctttaaaaaaaaaagttagtcacaaatgtggaatgatttagagtttagattctatgtggaattccaaaggagtaagtgttcctttggcagaaaacaagaatctgtatgctttatataggtagttatataggtagctataaaatttaggaactatatgttctcccccactgctttagagtaacctctggatttttcccaaggtaagttaatatagtttaattctcaataaattgttctctgtgactagatcctacccaataaaagaaaacagaaaacaatagcaaaacacaaaaatcagtatcaaattagcactaacacaaaactaagatttcttgttttccttatagatgttatttatgttgacaaattagaatttgattgatttttatactaggcaacctcaggatgtcagttccttgtattgccttgagatggtctaggaccaatagcaagctcttttccaagagattgctgggtggataggaaggatctgaggggcctgaaggaagtggaggccaccacacacacacacacatgcacgtgcacgcrtgttttcttccttatatcccaactttctcaacattgcagtctggaacttattggattccagtgaattaagggaaaactttttaaaagaaggcatttaagcccttgccacaatcactctgtccccgtgatctctatctttccctccctcccaagttccactatataaggactggcacggtggctcatgcctgtaatcccagcactttgggaggccgaggcgggcagatcacaaggtcaggagatcaaggccatcctggctaacatggtgaaatcccatctctactaaaaatacaaaaaattagccaggcatggtggcacacgcctgtagttccagctacttgggaggctgaggcaggagaagcgcttgaacctgggaggcggaggttggagtgagccaagatcacaccactgtgctccagcctggatgacagagggagactctgtcaaaaaaaaaaaaaaagaatctgctgccttgttgttggacctgtaggtttccggacctaagacttcttttaactagacctgtatttcaggtctcattcctctccaaaacactcaccatccttctgcctccttgccccacatacacacttacatgctatacaagcatctgggttgctgtaactgaggtttgttgggtcagacagcataagggtaaagagtggggagggagagggaagaaggcagaagtagaagaggaaagagaagaagagggaaggggaagaatatagtatcccccccaaatcacagattccttctgttccttaaaagaggatacatgatacatttaaatagcagtttaaaaacaaaaacaaaaacaaaacaaaaaccctacattttctaaatgtttgcatttaccatttcctgattgtccgttatcacaaggaggtgtgagtctctggctaggcagaattccagactagaattccagtccttttcctccactgagaaataataacaatggttaccatatttcatccagcggtctgggcagctaggacagctggcacaagtggagtagttggagcctaggagagaagaggacctggttcacatctttatggaccactcagtcttggaaatgaaatgggagataaaatggaatatggcagccctgggtcttccctgctccaccacttttcagattaagggttagagaaatgtgtaacaatgygtggtgtcaatttgaatacctcataatgtcctcataatgtccaactccatcatctactaagtatatattccactacacaagaatatgactataactgaaggaacaaagaagaaagcatacaacaatctgcctgaaaactctggagcaagtacttgacttgtgctagagatctctgtgcacatgtaatatacacacaccagataactgtgaattcatatgatatgcatctgtgtactgtctttgctctgtgtatatattgcataattgcataatgtatattgcttaaatcaggcagaatcattcagaatgcccaactgaaaatgccaaaaagaaattaggaaaagcaaacttaactagaatgaaaggttttgcttttttattatcacagatgtaactgtccctcaccattgaaaactggaaaaaaacccttatacctcagcaaaaagaacttactttgatatttttcaaaagggttttctggcagagaagcataacaggtgctaaagtgaaaagtgatagaatgccctaaccgagctcttttaaatacggaagatccacattcctttaaaatggttggttcatagttctgtcaagatgaaagggaactgaccaggcatggtggctcactcttgtaatcccagcactttgggaggccgaggcaggtggctcacatgaggccaggagttcaagatcagtctagccaacatggtgaaacctcatctctactaaaaatacaaaaaaatcagctgggcatggtggcacccgcctgtaatcccagctacttaggagctgaggcatgagaatcacttgaacccaggaggcagaggttgcagtgagccaagatcacaccactgcactcctgcctgggcgacagagcaagacactgtctcaaaaacaaacaatcaaagatgaaagggaactgaatatgctttcaaggtaattccaaccaagattccaaaattctattgatttttctacttcagtttcaatacttaaacatatgtgcataaactcgccataagcacaattctacagtgagcaagtatgagccattatactccatgagcacatgtgtagatatataattgcagaatagagtatatatctactctagatttgggagttacaaagtggggaaagtagtatttttcatataaatattagataattgttctctaggaagtactggcatacaaccaatataagttctggagatcaagctgttaaattggcaccttatagattttgctttttccatacaactgtgacattactcagcctggattagaaattcccaacttccctaggagttcctttttgtcaaaggtcggacttggctctgaggtagaagccctggagctgaactcttagaatcctaataaatcggcagagcgcaatggctcacacctgtaatcccagcacttggggaggccaaggcgggcagatcacaaggtcaggagttcgagaccagcctggccaacatagtgaaaccccgtctctaataaaaatacaaaaaattagctgggcgtggtggcaggtgcctgtaatcccagctactcgggaggctgaggcatgagaatcgcttgaacctgggaggcagaggttgcagtgagccgagatcacgccattgcactccagcccaaacaacattgcgagattctgtctcaaaatttttaaaaaaatttaaaaaagaaccctaataaatcacttctgtgtaatcggtcactatcatcccctaaaaatataaacctaagctaggactctagactgtaaaacaacaaactgagagtcctctagatcaccagatttaaggtcctagaagaactaaacttaaaaattagttttagaaaatgtgaaagcacctgaatggcaaaaaaaaaaaaaaaaattcagaatgtttcattacattatgatatatctattatgtgaaaagttaaacatcattaatattataattcaatcatcccaataaatatggcagtaaggaaatgtttctggcaacataaaattaaaaagcaatatacaaaattatgagcatactacgataagaactattctcagccttgcattaaaagaaagaaaggtgggagaaattttaagaggacttgactgcagttctattaagaaaatatggtcaggtgcagtggctcacacctataatcccagcactttgggaggccaagaagggcaaatggcttgagcccaggagtttgagatcagcctgggcaacatggtgaaatgtctttacaaaaaaaaaawaataataataataatacaaaaattagccaggcatggtggtatgtgcctgtggtcccagctactcgagaggctgaggtggatcacttgagcctaaggaggtcaaggctgcagtgagctgtgactgtacagtggcacaggatccgctggtatagcagcacacaaatctatcacctacagcctggctgattgagggagaccctgtctcaaaaaacaaaaagaaaaaagaaaatacaagcttacacaagtgcacrtggtcaaaggctatacccaggaaatagctgtatacagatggagagttattttgtttgaattattttttgatttttcaaagcttctgctatgttatattgcttttataatataaaatgaaagattaattttggtttaagtttgcacttaccctggcacaggatccactggtatagcagcacactcagaagaactgcagtcagaagccccaaagctattgccacaaggcaagaacaagaaggcctggaagaggaagctgcaacaacagagtcaaagcacaatcctgagtcagatgacaggttgaaagaaaagagaaagtcagggaaggatatcgcatcttaaagyaatttggcctagtgggaactgagatccaggccataaagattccttttctagatgtgtcaggaacttgctctaaagtctaaggtaaccaccaacacctgtatcaaagaacttactatatttatcaagataaagaatgcttttttcctttgaaactgtgacttacactgtctcatacttaggtggtgagaatacaaattggtacctctttggaggacaattgggcaatatctaccaaaacggcaaaggcatgtaccctttgacctagaaatttctcctacagatactcgcgggtgcaaaatgtcatatttattcgtggcagcaatatttgtaggaggagaagactgaatacaatctacattctatcagtaaaaggccagtcaaatacatttttgatatatccataaagtgaatatatagcttctaataaaaactggcttttttttttaactgatatggaatattttgtaagatatatagtcaagacaaagaaacattctgcagaacaggatatacaaatatctctgcaagcacactcaagaatctgataacattgtttgcctctggaatggaaaaaacagtcactggagacaaaataggaaaaagactttttaccctattttcttttgtaccttttgaattttgaaccatgtaaacayattatctactcgaaattgaaatacataaaatttaaataaaaataatctacatttcagaagtgctttgtaaactgtcgttattaaaagagcagtaagtttaagttgatgccaagtttaagaataggacactacttcatgttagctgttgcatacaaccgaaatctaaattttaaatttgaaaaatggaagtattttcagcaaatctttattttaaaatcaaaggtatctcatagtgcaatagtgtagaaattacgtgtaacgagcaaaactctgtgaagtaagatgatatttaacttctaattttgattcctttgcttaataacatttaattaggaaattaaacttgcctatttgggcttcaattttctgattaaattttagataaattattctatatatgtgtgtatctatggagtattctgaacttcttaaagaaaaaaattcataatgagagatgccttcataaatagagaattctgcataataaatatttggactgatgaatccaaaagcattaagatttctagaaaaacttttaaaaatacatttgcatcacaggagaacatttaatgaaatacacaaatgttcatttttatgttatgctaaattttaaaaaggtatcaaaccataattgaatttgtgtaaccacaagccaattcaagaagtaaagtaaatttttaaaatttactttaagtatatattgaaagcctctaaatagttccaactaggttccaatttatcaccagttgtgtgtgtgaccttgaacatatactttgagatatgcattacttctaacgtaatatttctattccttagaaattaacatagatacaattcaaaaataggaaaaggttacacaaataaagatatccaatgctatataatttatggtaatagaaataggtctaaatatcccaagtatactagaatgatttagcaaattaaggcaacactctcaaaagacattaaaaattataatagtaaaactatgtagtaaaaagagagaaagcttagggaactaccctaaagaatacaccttgtgggagttcactgcctacgatacaaaatcaaggattaattttggcatttacactattacctgtctgtctcagataatattctctcagggctctatgtaaaaatggctcttttgccttcaaatcctcagtcacagagactattatctgtagtttcttgatactttttcttccctgtcaccattctagtgcaacactgtgaagttaaaaaaaaaaaacaaaactagatatgtaaatcagtttctttcctgacaaaaatcttactcgtatccaccagcaaaactattggtgtcctcctcattccatagtcagaaaaacagccatacctagaatttaaacagctggtccaaggttactccgaatataactaaagagataaaattctcccaacaaagttcccgctttagctaagagcaagaaggaataacggcaatgccctaagttgggtttctaagatgcgatcaaagaagtgaacagttagaaaagagtttacctgagacctaagatcagatcctgtaccatacaccaacttttcatattccaactctggactttaaactgaaccaaaagtatttcctcaaattatcctcaattcttctgcaccctctgctttaaacttattctactccccattcatccatagcctactgytgctatgcatcgtcttccatgctaccttggttaactcacatttttgctgtggtccrtagtcattctgggcttgggttgcygtaggcaactctaacatggaataaataacactgtcagtcatcttcagctaagatctttcacatgcagttgagagagttaaattatagaagtgtgaagggatatgtatcagtgaggaaacagcccaatctctaaactgctagcaggaaacttcacaaaagcagaagtaatttttcaggaaatgattcaaatttgggggctgcctatagaaattaatattgtaagttgctatttttttgccccatgacactgtagatgctcactaaatatatattaaattgattccccatctcacctaattctgttgagcaaggaaaaattgctctcaagtccagcaatttcagttatggaaactaaaataaaagtgagagtggttactagctatgaatttctctyrgaattttttctctgctttgtttccttctgaaaaagtagatgtatgccaaatgagactgacttcatcatttcttggaacttttgggcagtgataagcaataacgaaatggactgttgggtgcatatgcctggaatcacgggagaaatagactattacccagatatattttgtgaatatgacatgaccacatcttccccaaaaccttgtccaaattgtgtgatggtctttacccttcacagtatcagaaattccattatattttttctctttgttgtcttattttttttatkattatacttcatgcaaagataactaaaaagaagagcaaagtaaacaaatacattctaacatcttagtaatttgtttttagtaggtgaaaagttaataaaaagttagagtaggccaggtgtggtggctcacgcctgtaatcccagcactttgggaggccaaggagggtggatcacctgaggtcaggaattcaagaccagcctggccaacatggtgaaaccccgtctctactaaaaatacaaaaaaattagctgggtgtggtggtgggggctgtaatctcagctgctcaggaggctgaggcaggagaatggcttgaaaccgggaggcggaggttgcagcgagccgagactgcaccattgtactctatctagcctgggcaacaagagtgaaactccgtctaaaaaaaacaaaagttaaagtaaggaaacagaaagagtattgaaactcttaagagtggataagatcatcaagatagactgcataaggataaaagaagagaaacagggagtgctttatattaatttgttttatattaataaaaacaaatatatttctgcttccagccatgacagaatggcattagacttactctccaatcaaaatacaacacatggcaagacacacaaggcagctattttcaggaacacacaggcagcattgtgatccttgagagaatacaaaggtgagtgcaatgatcaccctagctttctatctaggaccackttctagtacagagcacaaaaatgaatcctaaacagaacagcagtcttactaaaatgaggaggcagatattggagttttgagctgcttaaatggctggaatttgcagggcaggataattcacaagagagaggcacccttaagactgtaggaattcactgtatgtctgtggccaagttctaggctgcgcagacataggacaaaactctgcaagtccaagctgagatagttcctgcagggccaagagctgaacagaaaggacagaggtgatgcattgcttagtagcaccaaccaaaaacagagcaaaacttaacattgccaaaaagagtcatcaatagtttagctgcctctgagaacaaattttcacgcccttaatatgaaggcaaaacaaacaaaatgtggtctacacatacaatggaatattagtcttagaaaggaaatcctgtcatactttataacactgatgaaccttgaaaacattatactaagtgaaatgaactgatcacaaaatgacaaatactgtgtgattccacttatatgaggaatctaaagtagtcaaacccatagacaaagaaagaagaatggttactgaaagaagtttggagggaaaaagaaaaggaagttgcttaatgggtacagggtttcagttttgcagtgtgattaagttctggagatacggtacacaacaatgtgaatattcttgtattcacttgcttggactatcacaacaaaataccatagactaggtgacttaaacaacagaaatttatttatattttcatcattccacagactgaaagtctaagatcaagatgccagcagagttggtgtttggagagtgcttcccctgtgggttgcagacttctcactatatcctcaagtggcttttcctcagtgtgtgcacaagggaagaaagagagagggctctggtctctcttcttacaagaacattaatcctatcagatcagggccccacccttgtracctgatttaaccttaattacttccttaaacactccatctccaaatacagtcacactgaggattagggcttcaatatgtgaatctgggggagacaaacattcagtccataataatacttaacactactgaattgtatgctttaaaataattaagatcattttttaaaaaaaggaaggtgtattagtccattcttgcactgctataaagaaatacctgaggccaaataattgataaagaaaagaggtttaattggctcacagttctgcaagatgtacaggaagcatagtggcatctgcttctgggcaggcctcaggaaacttagtcatggtggaaggcaaagggaaatgtcttacatggccagagcaggagcaagagagacgcggggaggtgttacacacttttaaacaaccaggtcttgtgaggaactctatcaggagaacagctctaggggtatggtactaaaccattcatgaaaaaccatccgcgtgatccaatcacctcccaccaggccccatctccaacactggagattacaattcaaygtcagatttgggtggggatgcagatccaaaccacatcagaaggcaacataggaatcaggggytctttgaagaaatggctaattctagggccaggacagggaaagtacaaaataagcttggaggatcttccagtcttttaatgttaaaaaataagcaagttaaaaaaaaaaagatgggagcatatcaggacacagaaaccaacctggaaaagctcccaatggaacaatatgaacaacaaaataaatgacagtgttgaattataacacaaggggaaaaactatataaatccatactgatttaaataaataaataggtgagaagtgacaaatcttgcttacagaaaataccaaataatatatgtagatactccccattcaggatgtggaatttaactctcctccctttgagggtagtcagggataagagactcacttccaaagagtacaytatggataaaaggaaatagtaactattcattaaagaatcttggcaaataccacctcaaccacatgaacagggttcactgcgtgaaccaccagtgatgagtcttgttgatatcatgtaccccctaatatgatgcaatgataaaagcacctaaccagtaaggtttgttccccaaaatccataaccccagggtggtattatacatatgtatatattggttttcatccacagtttctggctcctaactcctatggtccctgttacagtcctttcttataatgttgagtgtgtcaggccccaaggggaaggcctctggccttcttctgccctcctttcatctgcctcaaggcaggactctaattttcccctrcctttctgattgtgggtcttaaaaccttccccagagagggtcctgccctttactggggtgacaaggggagggggtcagcagcaagaatgctgatgtcctgaagcttccataaaaacccaagagaactgtgtcagaatgcttccagatgactgaacctgtggagattcctggagagcagccttcccagaragggcatggaagctccacacccctttccccataccctgccctacagttctcttcatctgtatcttttgtaatatactttataataaactgataaacataagggtttccctgagttctgtgagctgctccagcaaattaactgaactcaaaggggaagytgtggaaatcccaacttgaagcttattggtcagatgttccagaggcccagacttgtgactggtgtctgtgggtgtagggggtgatcttgcatattgaatccctgaaatgtaagatctaacactatctccaggtagataatgtcggaattgaattagaggatacccagttggtgtctgctaattggtatgtggggaacacccctaccacatttggtcacacaagtcttcttctgtgttgataattgtggtagtgctggtgtgaaagcagaagaaaaacacagctgaagaaagttttcccctacacatccaatgtaaacatgcaaaaaaaaaatcagataattctaaattgagtggtactctactaaatatctgaccaatactcttaaaatatatcaagttcacgaaaaaaaaaaaacactgagaaactgtcatagaccagaggaaaacaataaatataacaactagatgtaatgtggtatcctggattggatcttggaacagcaaaaagagcattagtggaaaactggtaaaattcaaacaatgtagcaatattcatttcttacatttgagaaatgtgccatgattttttaagatgctaacattaggggaaatggggtgaaaggtataaagaaatgttctgtgctatcttaaaaacatttctgtaaatctgaaattattccccaataaaacttttcttcaaaaaagaggatacataacacagattagccataatgcatcacatttaatatctagcatacaataaaatattattagaatccaaagaaataagaatatatgggccatggatcaaagaaaagtcagtaagtagaaaagaaacttatgtaacatagatgctggaactagcaaacaaggactttaatatctgcataaataygttcaaagamttagaagaaaatatagtcataatgaataaaaatttgaagaatctcagagaagtagaaactaccaaaaagaatcaagtgactattccagaacagaacagcattcataatttttaaaaataactgaatgagggccaggcacggtggctcacagctgtaatccagcattttgggaggcgggggcmggtggataatttgaggtcaggagttcaagaccagcctggccaacatggtgaaaccctgtctctactaaaaacataaaatattagcctggccaacatggtgaaaccctgtctctactaaaaatataaaacattagcctggcctggcggcacatgcctatagtcccagctgctcaggaggctgaggcaggagaatcacttgaacccaggaggcagaggttgcagtgaactgagattgcactacggcactccagcctaggtgacagagcgagactccatctcaataataataataataatagctgaatgagattaatagcaaatagaagagggcagataaaaaggtcagtaaacatgaagacagattgctaaaaataatccaatatgaagaatagagggaaaaaatgggagaaaaaaatgaacagaacctcagtgacctatgaacaatgccaaatagtataacaaaagtgaaactgwagtcccccaaaataaaggggacatataatgaaatcggaaaggaatttgaaaaagtaatgatcaaatattccccaaatttgggatacaacctacaggtataagaaactcactgaatccgcatcaagataaacagaaggaaaatcactcctaagaacataatctaaaactaataaaaaccaaagataaaaagaaaatactgaaaacagccagaggaaaataaataacacattaataatgggaaacaacacatgaatgatagctaaattctcawcagaaacaaaaaaggagaaaagcaatgagatgtcatctttaaaatggtaaaatgggccaggcacggcggttcacggctgtaatcccatcactttaggagaccaaggcacatggatcacctgagctcaccagttcgagaccagcctggccaacatggtgaaaccccgtctctactaaaaatacaaaaattagctaggtgtggtggcaggcgcctgtaatctcaggtactctggaggctgaagcaggagaatcgcttgaacccaggaggccgaggttgcagtgagctgagattgcaccattacactccagcctgggcaacaagagcgaaactctgtctcaaaaaaaaaaaaaaaaaaaaaaggtaaaatggtaagactgccaatacagaattctatatccagaaaaagtatccaatagaaatgaagaggaagtaaaaatattttcagagcagagaaaatagcaaatttgtcatgagcagtccagcactacaagaaatgctaaaagaagttcttagaaaataagtatcactagataaaaacatagatatacagaaaacattgaagagcaacagaaatggtaaatatataagtacatataaagaattatatttattttcttttcccatcttaatttctttaaaaaaaacagaaagtaaaacagataaggcaaatcattttaaaaaacagcaaaatgataaagccagtcttatcaataattgaattcatcataaatggactgctgcaccaaataaatggcacaaattgtaagactagaagaaaaagcaagaaccaaaaagatattgtctgttctggctaggcatggtggctcacacctgtaatcccagaactttgggaggctgaggcgggcaaatcacctgaggtcatgagttcaaggccagcctggccaacatggtgaaacgctatctctactaaaaatacaaaaaatagccaggcgtggtggcaggtgcctgtaatcccagctgtttgggaggctgaggcaggagaattgcttgaacccaaaaggtggaggttgcagtgagccaagatcgcaccattgcactccagcctggacaacaagaatgaaactccatctcaaaaaaaaaaaaaaaaaagatattgtctgttctggctgtaagatatgcactttaaatataatgacagattaaaagaaaggtatacaaatatatacaatgtgcaaaccaatatacacattacagtaagcacctggagtggtgtgttagtttcttatcactgctgtaacacataacctaacacaaacttagtgacttaacataacatatatttattttcttaaagttttgtaggtcagaagtccaaaatcaaggttttggcagaactgatttccttctgggaaagtcaaggaaatgttctcctctaaagcctccagaaggaaatcagttttgccaaatttcaaatttcttggcttgtggattcttctgccacctttgaagtatataattccaacctctgcttttattgttacaactctgttttctgactttgactctactgcttccctcttataaggactctcataattaccttgaacccacgtgaacaaaccagcatgatctctccatctcaagattattagcttaatcctatctacaaagtatctgtcatataaggtaacataattataggctgaagggattagggtgttaacatatttgaggtggggagagacattattcagccttccacaagtggtcatactaatataagacaaaaataggtgagtataaagaggtacatttcataattacatgagttactgattgcatcaagcatatataacaactataaataagtatgcacctaattttgagcttcaaaacatatgaacagaagcaaaagctgagttaaagaaaaataaacatcaataatcatagttggatattttaaaaaccttttctcagtaactgataaaactattaaacaaaattcagtaataatataaaaaacctcaacaccaccatcaaccaccttgaccaaattaaattaacccaacaaaatgacattcaccaattaaagaatacacgtttttaggtgtaaataaaatgttcgcaaagatatattacatactcagccataatataatacattacaaaatattaaaatcttacagatatattttataaccacagtgaaatcaataacaagaaaaaatcgacataattcctaaatattcggaaattaaaatacccactttgaagaataacccatgggtaaaagaaaaaaataattttaaacgttaaaatattttaaattaaatgattatgaaaatagaatacaaaaatatatagaacacagctaaaacagtcttacagcaaatactgtagttttaaatgaatggaaaagaaaaaaattaataaataatccaagtttataatttatgagggttaaaaaaagaagagtaaattaaaaccaatgtaagtagaagaaaagacagaattttaaaatggaaaattaataaaatcatgaaacaaagactagaaaaattaacaaagccaaaatttggttctttgacaagattaagactgataaacttctaataagattgagcaagaggactaacacagcaagagagcagactaggatgtaccagtccttatatatccacaaaaacaacaatttagcaattatccacagatgaaaatagctctgggagagttctggagtgcaattaaaaagctgctgcaactcagtgaaacagaaaaactgaggatggtcatgcagaaaagtgtagaaagcattttacctgtgtaaccccattccccaggctggcaaagctcaaagacaagaggaataccatcagctgtgacttcctcacaaggtgaaaaggagagcaggaaaacccatgcaacctgtgccactcaggactctagcagccatccccactgccacaaatacccacagccttaactgccaaggacccccacagtcttcaagaatgctgacaccagccgatggagctgcccagaactcacactgctgcaccccctccaaagctagagcctcagccacaccctctggaaccaggatgaatgctgcttatttaccccaagcccagcattgcatgtgtgcactcacctatcagacccaatgccatgacacaccctttagaactagtgcccatatgtgccccacaagtctccagtcccatgctgacccagtgcaccatgcacctcacccagccactacccttgcaggcagtaagaggtgactgctgtttcaaacgcattgacaccactgcaagcctataaggaacataaaaaattaagaaaatatgacatcaccaaaaaacgcaatagatttccagtaaccaaacccaaagaaatggagatctatgaattgcccgacaaagaattcaaagttaaagtgttttaaagaggctcagtaagctaaagataacatagattgacaactcagtgatatcagaaacaatatattaacaaaactagaagttcaacagagagatagaaatcattaaaaaacaaaaaaacaaaaaaaacagggccaggcatggtgactcacacctgtaatcccagtaatcccagtaatcccagcactttgagaggctgaggtgggcagatcacctgaggtaaggaatttgagaccagcctggctaacatggtgaaaccctgtctctactaaaaatacaaaaattagccaggcatggtggcaggcccctgtaatcccagccacttgggaggctgaggcaggacaatcacttaaacctgggaggcagaggttgcagtgagccatgatcgcactactgcactccagcctgggcaacagagcaaaactccaactcaaacaaaaaacaaaaacaaaaaaagcagaaattatagagctgaagaatacatgagtaaaataaaaaatacaatacagagcttcaacagcagacttgatcaaaagaagaaagattcagcaacctcaaacacaggttatttgaaattatccagtcagaggagaaaaaaaaagaatgaaaaagaaaacctccaggatttgggagacatgaatgtgcaagccaatatacacattatagaagtcccacaaggagaatagagaaagaagcagaaaacatatgtaacaaartaataattgaaaactatccaaattgagggaagaacatagacatccagattcaggaatcctaaaagattccaagtaggttaaacataaagaagtctacacctagacacattataattaaattgttaaaggtaagacaaagagaatttttaaagtagcacaataaaaatgactcatcacatataagactatcagtagatttctcagcagaaacctcatatgccaggaggatgggatgatatattcaaagcactgaaagagaaaacagccaaaccaagaatactatacttggaaaaattatcttttaaaaatgaaggacaggccaggtgcagtgtctcacacctgtaatcccagcattttgggagaccgaggcagatggatcacctgaggtcaggagttcaaggccagcctggccaacatggtgaaacactgtctctactaaaaatacaaagaaaattaaccaggcatggtgatgggcatctgtaatcccagctactcaggaggctgaggcaggagaattgcttgaatccaggaggcacaggctgcagtgagctgacattgcaccattgcactccagtctgggtgacagagcaagatatgtctaaaaaaaaaaaaaaaagacaggccaggtgaagtggctcacacctgtaattccagcactttgggaggctgaagcaggtggatcacttgaggtcaggagttcaagaccagcctggtcaacatggtgaaaccctgtctttcctaaaactacaaaaattagcctggtgcagtggcacatacctgtagccccaggtactcaggaggctgaggtgggaggatcatttgagcccaggaggcagaggttgcagtgagscaggaatgtgccactgcactccagcctgggtgacagagtgagactccaaaaaaaaagaaagaaagaaagaagagagagagagaaaagaaagaaaaagaaagaaagaaagaaagaaagaaagaarraaagaaagaaaagaaagaaaaagaaaaagaaagactgtcacatgtaagactatcagtaggtttctcagcctaaacctcacagaccaagagaaagggataaaatattcaaagtactgaaagagaaaacagccaaccaagatatacctagaaaaattattgtttaaaaatgaaggacaggctaggtgcagtggttcatgtctgtaattccaggactttgggagaccaaggcagtaggattatttgaatcccacatctgggcaacatagtgagaattcatctatactaaaaatgtaaaaattataacattttcaaaaatttttaatgaaggacaaattacttttttctggataaacaaaacttgagggagtttatcaccactagacctgacttacaagagatgctcaaggaagtccttcaagttgaaacatgctaaacagcaaygtgaagtatgctaactagcaatgtgaaagcctaaatctcctggtgaaggtatatagacaaacacagaatcatatgacactgtaatagtggtacatatagttttaatcctaacataaaagttaaaaaaaataaagatttgttaaccaatgcacactatgaaaagaatgaaactcttaatgcaaaaattagccaggcatggtggtgcacacctgtaatcccagctactcaggtggctgaggcaggagaatcgcttgaacccaggaggcagaggctgcagtgagctgagatggggctactgcactccagcctgggcaacaaagtgagaccctgtctcaaaagaatgagattgaaacaatacagaaacacaaaattcaggcagaggaagcaacactgtacagatttgtatgcaattaaattatcaactcaaaatagattattttaacaacaagttattttattcaagactcaaagtaaccactaagtgttacagaaaagaatcaaagcaattcactataaaaaccatcaaataaaaaaaaggaagacagcaagagaggaagagaagaacaaaagaactataaaacaaaaaacaacaaaatggcaatagtaagtcctcacttaccaagagttactttaaatgtaaataaaatccccaatcaaaaggcatacaggctgattagattttaaaactcaagatctaggccaggtgtggtggctcatgcctgtaatcccagcactttgggaggccaaggcgggcagatcacaaggtcaggagatcgagaccatcctggctaacatggtgaaaccctgtctctactacaaawaaaaaaaaaaaaaaaaaaattagccaggcatggtggtgggcacctgtagtcccagctaatcaggaggctgaggcaggaatatggccagaacccaggaggcggagcttgcagtgagccgagatcacgccactgcactccagcctgggcggcagagccagactccgtctcaaaaaaaaaaaaatcagtagctagtgatgcaatgtctacaagaaactcactttagacttaagaacagacatagactgaagtgaagggatagaaaaagatattccatgcaaaaagtaaccaaaagagagcagaaatggctatacttacatgagaaaaaaagtaaactttgaggatgggtgcagtggctcttgcctgtaatcccagcactttgggaggcccaggcgggtagatcatctgaggtcaggcgttcaagaccagcctgaccaacatggtgaaaccccgtttctactaaaaaaaatacaaaaaattagccaggcgtggtagtacatgtctacaatcccagctacttaggaggctgaggcaggaaaatcacttgaacccataaggtggaggttgcagcgagccaaaatgcacgccattgcactccagcctgggcaacaagagcaaaactctgtctcaaaaaaaaaagtaaactttgagtcaaaaacatcctctaaagaaaaaaggtaattttatattgataaaaaggtcaattcaataggaatacataacaattacaaatacatatgcactcagtgtcagagaatctaatatataaaacaaatattgacagatttgaagggagaaattgacagcaatacaataaattagtagacctcactacccccactttcagtaatgaatagaacatatggacaaaaaatcaattaaaaaagcagctgattkgaacaacatgatagaccaaatagacccaacagatatatacagaaattttcacccaacaacagaaaaatattcttttcaagagcacagagaacattctccaggatagatcacatgtcaggtcacaaaacaagttgtaacaaacataagaagatacaaatcattccaaatatctatctctttcaattacaatggaatgaaataaaaatcaataactaataaaatgagaagatccacatttacatagaaactaaaaaatatattcttgaacaaccactgggtaaaagaagaaatcacatggaaattttaaaactatctgcaaacaaaaatgataacacaaaataccaaaacttatgggatgcagtaaaagcaatactaagaggaacctttagagcaataaacatctacattcaaaaagaaaatctcgaataaacaatctaacttcacacctcaaaaaactagaaaaagaaaaacaaattaagccaaatggtagcaaaaggaaggaaataataaagattagagcaaaaataaatcaaataaagaaaagaaaacaatagaagaaaattgacaaaaccaagagtttattttttgaaaagataaaaatcaacaaacacttagctagtctaagaaaaaaaaagctgggcccagtggctcacacgtgtaatcccagcacttcaggaggccaaggtgggcggatcacctgaggtcaggagttcaagaccagtgtggccaacatggcaaaacctcgtctctactgaaatacaaaaattagccagtgtgatggtatatgcctgtagtctcagcgactcaggaggctggcatgggagaattacttgagcctgggaagtcaaggctgcagtgagccatggccgcaccactgcactccagcctaggcaacagaacaagaccctgtctcaaaagaaaaagaaaagaaaagaaagaagaaaaaaagagtgaaaacacaaataaaataaaaaatgaatgaagaggcattacaatgaatgcttcagaaatagaaagggtcataaggagcacttaagaataattatatgccaacaaattggataacctacaagaaatggatacatttctaaaaacataaagccaactgaaactgaattgagaataactagaaaacctgaaaatatcaataataaatgaggagaataaatcagtattcaaaaacctcccaacaaattaaaacccaggactagatggttccatggatgaattttacaaaacatttaaagaaaaattaatagtaatcttcttaaactcttccaaaaaatagaaaatgtggctgggtgtggtggctcatacctgtaatcccagcactttgggaggccgaggcaggcagatcacttgaggtcaggagtttgaggccagcctggccaacatggtgaaactccatctctactaaaaatacaaaaaaaaattagccaggcgtggtgacaggtgcctgtaatcgcagctactctggaggctgaggyaggagaattgcttgaatctgggaggcagaggttgcagtgagcctagatcacaccactgcaccccagcctggctgacagagcaagactctgtctcaaaaaaaaraagaagaagaagaagaagaggtaatgcctcctcataattattatgaggcaagcaatatcaaagataccacaagaaaaggaaactacagacaaatgtccctgataaaaacagatgtaaaatcctcaataaaatacccgtaaaccaaataacaacagcacattaaaaggctcatgcaccatgaccaagtggaatttatccctggattgtaagaatgattcaacactagcaaatcaatgaatgtaatacaccacattaacataatgaaaaaactcttttgattatctcaatagatgcagaaaaagcatgtagcaaaatttgacattcattcataatgtacattctcaaaaaatgggtatagagagaatgtacctcaatataataaaaaccatataaagaagcccacagctaacatcccaatcaatacagaaaaaactgagacagccgggcgcagtggctcacgcctgtaatcccagcactttgggaggccgaggtgggtggatcacaaggtcaggagatcgagaccatcctggctaacacggtgaaaccccgtctctactaaaaatacaaaaaattagccgggtgtggtggtggacgcttgtagtcccagctactcgggaggctgaggcagaagaatggcatgaacccgggaggcggagcttgcagtgagccgagatcgcgccactgcactccagcctgggcaacagagtgagactccatctcaaaaaaaaaaacaaaacaaacaaacaaacaaaaaaacaaaaaactgagagttttgcctgtaagatctggttaaaggaaaagatgtcattctcactatttccattcaacatagtgctggatatcctagccagagcaattagagaagaaaatgaaataaaggcatccaaattaaaaagaaagaagtaaaactatagctatttgcagtagacatgattatatatatagaaaactaaaagactcaacaaaaaaagtattagaactagtaaagttgcagaatacaaaatcaacatacaaaaatcattcatgtttctatacacaatgaactatctgaaaaggaaaattttaaattaataccatttataatagcaagaaaaagaataaaatacttagaatttatttctatttagccaaagagttgaattgaaagacttacacactgagaattataaaacattaatgaaggaaattaaataagacacagataaatggaaagatatcccatgttcatggataggaagaattattactgttaaaatatccatactatgtcttagtccatttgtgcttctataacaaaatacctaagactgggtaattttatttgtcatattctctggaagtccaagatcaaggcacaggttcaatgtctgatgaaggcccagtctctgttccaagatggcaccttgttgctatgcccaccagagcgaatgaacacttgttctcatatgggcagaaggcagaagggcaaaaggcgactacctggtttcctccagcctttttataaggtcatgaattccattcatgagggcaaagccctcatgacccaatcacctcctaaagttcccacattcacctcctaaaggtcccacatcttaatactatcatattggcaattaagtttcaacatattaatttgaggggacacatacaaaccacagcccacccaaagtgatctacagattaaatgcaatctttatcaaagtcccaatggcattcttttttttttttttttttttttttttcttttgagatggagtctcgctctgtcacccaggctggagtgcaatggcacgatctcagctcactgaaacctctgcctcctgggttctagcaattctcctgcctccgcctcccaaatcccagcctccctcagcccagctgggattacaggtgtgcgccaccatgcccggctaacttttttatttttagtagagataggatttcaccatgttgcccaggctggtctcgaactcctgacctcaggtgatccacccacctgggcctcccaaagtgctaggattacaggtgtgagccactgtgcccagccccaagtggcattctttatagaatagtaataataatccttaaatttatatggaatcacaaaagaccccaaatagccaaagtaatcttgagcaagaagagaaaagctggaagtatcacacttcctgatttcaagatatatcagaaagctacagcaatcaaaatagtataatactgccatgaaaacagacatataaaccaatggatgagaatagggagcacaacaacaaatccacgtatttacagttaaatgatctttgacaaggttgctaaaagcatacaaaaggcaaagaatagtttcttcaataaatggtgttgggaaaaccagatatctacatgcagaagaatgaaactggacttaactcacaccatataaaaattcaacttaaaatggattaaagactggctgggtgcagtggctcacgcctgtaatcccagcactttgggatgccgaggcaggggcggatcacgaggttaggagatcgagaccatcctggctaacacggtgcaaccccgtctctactaaaaatacaaaaaattagccaggmgtggtggcgggtgcctgtggtcccagctactcgggaggctgaggcaggagaatggtgtgaacccaggaggyggagcttgcagtgagctgagattgcgccactgcactctagcctgggcgacagagcgagactccgtctcaaaaaaraaaaaatggattaaagacttaaacataaggcctgaaactgtaaaactactctaggaaaacagaggggaaatcttcttgacattggcctgggcaatgagtttttggatgtaacaccaaaagcacagacaacaaaagtaaaaatagacaaatggtatttcattaaactaaaaagcttctgcactgcaaaggaaacaatcgacagagtgaaaagacattctatagaatgggagaaaatatttgtaaaccatatatctgataaggggttaatatccaaaatatataaatagctgatacaaaacttttttctttttaaacagaggtctcactatgttaaccaggctggtctcaaactactggcctcaagcaatcctccaacttcagcctcccaggtggctcaggcctgtaatcccagcactttgggaggccgaggcaggcggatcacttgaggtcaggagttcaagaccagcctggccaacatggtgaaaccccgtctctactgaaaatacaaaaattagccaggtgtggtagcacacgcctgtaatcccagctacttgggaggctgaggcaggagaattgcttgaacctgggggttgtgggcggggtggtgggggggttgcagtgagctgctgcactccagcctgggcaacagagcaagaatctgtctcaaaaaaaataaataaataaaaactaaaataacaaagagaaaaaacacaaattaccaatatcaagaatggagaggctatattgctaaagattttaaagacattaaaagtataataaggtaatgttatatctttatgtcaataaatttaacaagttagattaagtagacraattatttatggaaaaaaaacagaatttaacaaactgacacaaaaagaaataaatttttgaatagctctttaccactaaaaaaaaaagaattggttaatacacacttacccacaaagaaaacttcgtgctcaggtgacttcaatagcatactatattaaactttaagaaataaataacaatgctccttcaaaaagtagaaaatgtaagtacactctcccaatttggtttaggaggccattatgactctgataccaaacctgacaaaaaattgcaagaaaagaaaattacagacgctccgccttcaagattatagacatgaaaatctttaacaaaatatctataaaaatataaaataaatcatcatgacaaagtacagtttatcccagaaatgtacaatgttggtttaacattctaaaagcaatcaatgtactttgccatattaacataatgaaacagaaaaaagatatagatcacgtgaactgaagcagaaagaagcatgaaaaaaaattcaacacccattcagaataaataaggtctgcaaaagaacagaaggaaactttctcaatttgataatggcttctacataaaacctacaactaacctaacacacttaaggtgaaatattgaatgttatctcagtaagattaagaacaaggcaaggatgtcttatttcagcaactctatgaaacactgtactgaaatcctagagaaaagtaaataaataaaagatgaaaaggaagaagtggaatttaccagtgaagccgaaaagtaaataaataaaagatgaaaaggaagaagtggaatttaccagtgaagccatctgggcccaaagctttcattgtgggaaaactttaaccataaattcaattttttccgtggataggggaatatacaggctatctgtttccttgagtgactttggtagttagtgtctgtcaatttatttgttcttttcatctaagtcagggatcagcaaacgttttctgtaagaagccacacagtaaatatttcaggcttttctggcaatgtggtctcccacaactactcacttctgccactatagtacaaaagcagccatagatacaatgtaaatagttgtgtgtgtgttccaataaaactttactcacaaaagaaatggcaagccagattaggcacacaggccagattttactgaccacttattatcgtggttgttttgctttgttttgttttgttttttgagacaaggtctccctctgtagcccagactggtggagaatggcacaatcacagctcactgcagcctcaacctcccaggcttaggcaatcctcccacctcagcgtccagagtagctgagaccacaggcatgcaccaccatacctggctaactttggtattttttgtagagatggggtttcaccatgttgcccagtctggtctcaaactcctgggctcaagcaatccacctgtcttggcctcccaaagtgttgagattacaggcatgagccccaccatgcccagcccttagtatgcttttcatggcttagaatctatagtgattttacctccctgattcctgatattggaaatgtgtgcctttcctctagtcattttgtcaacattttatcaattttattgatcactttaaaaaactagattttggcttcattttctctgttgtttttctattttctattccattgatgtcttgtgcctctttattagattcttccttttgcttactttaagtgtaatttcctcctcttcctctcattcctcaatgtgaaagcttagatcattgatttgagacttttttttttaactaaaataaaagagctcaaccagaagttccacactttcacctgctacggtagccagcccactgccaaggagaagcctgcaacctcagagctggaatgccctcaaatccatgacactgggctcttcccccagaactcccaagaacggctgactgcactgagcaayagcctgggagcccacagagccacccaatggcaacttccagaaagaggtgtgagtaccacgctgtactggccactgcatgtaaacaactcaccattttcacactccactktggaactagccaggagccactgcaccctcctctttcccaaggcctgggcagggaggcacagcagactcagcctggctggaggagccagacacggttttgcctggaagcccagggcccttacttgtttctcagaggcccctcaaccactggagccacatcttagcccctacctgtcctaccctgtccaaggctggagatgggagaggagagctttgttgaggataaacttcactctgtggaaataaaaaataataatgctataaattttagcataatgctaaaattttaatgctatgaatttccctgtaagcactgctttagctgcatcccttgatgatgataatgttttcatttttgttcaattcaaaatattggtaatttaattcattatttcttctttgacccatgggttatagaaaaactgttaattttcaaatatttggggattttccaggtattgttttattaatgatgtctagtttaattctgttttsgtcaaatatactttgcatgatttcagtccttktaaatgtattaaaacttgttttatggccagaatatgtgctatcttggtaaaagtctgtgtgcactggaaaagaatgtacattattcatttgttggactaaatgttatattaatgtcaattaaacagtttaactgatatgctgttcaaggctcctataccaccacagattttctgttaattacgtggggtgggggtgttaaaacctccaactataattatggacctgtcttttcctctcaagttctcttagattttgctttatgtattttgaagctatgttattaggtgcaaacacatgttctcctgattatctgacccttttatccttataaaattatcaccccttatcccttataaaattgtcactctattttagagcaaggcttagtaatatttcttgttctgaaatctactttgtctgattaagataggcactccaactctctttgtatggtatagatttttctattatttcagtgtggtttttttttgttttagatagcatacacttggaccttttttaaaaatctaatctgacgacccgttttaattggagaattttggccatttagataatgtgattatcattttacttgagtttatatctactactttgcatttatcttctgtatgttctatttattttctgttcattttcttttttaaaccgaatgtctttcatgattctactttattattgcttattatttatctttccctttcttgatttattccctccctcctccttccttccctttccttaatttttctttctttcttttctcccttccttccttcttttctttctgttatgattgctctaggttctccattgcacatctttagtcacattctgctttcaaataatactatactacttcatgtatatgaagtgaactttacaatagtatacccatctccctttccctggccgttttcatacattttacttctattgttataaattccaaaataaattattatttttcctcatttctttttttgagacaaggtccagctctgttggccaggctgcagtgcagaaaatacatggaaccattgtttcatatattgagccttgaactcctaggctcaagaaatctcccatttcagccttcaagtagctgagactgcaagcatgcaccaccacgcctggctaattttttaattttttrtagagacggagtctcgctatgttgccacagctggtctcaaactcctgggctcaaaggatcctcctgcctcagcttcccaaagtgctgggattacaggtgtcagccacctggcccagcctggttattaattttttagagatatctttaaaaattaaaacaggtgtcttttacacttatacacatatttaacatttattttattttattttattattataaaacttaaagtataaagttttagggtacatatgcacaacttacaggtttgttacatatgtatacatgtgccatgttggtgtgctgcacccattaaatcgtcatttagcattaggtatatctcctaatgctatccctcccccctccccccaccccacaacagtccccggtgtgtgatgttccccttcctgtgtccatgtgttctcatagttcaagtcccacctatgagtgagaacatgcggtgtttggttttttgtccttgcaatagtttgctgagaatgatggtttccagcttcatccatgtccctacaaaggacatgaactcatcattttttatggctgcatagtattccatggtgtatatgtgccacattttcttaatccagtctatcattgttggacatttgggttggttccaagtctttgctattgtgaataatgccgcaataaacataagtgtgcatgtgtctttatagcagcatgatttatagtcctttgggtatatacccagtaatgggatggctgggtcaaatggtatttctagttctagatccctgaggaatcgccacactgacttccacaatggttgaactagtttacagtcccaccaacagtgtaaaagtgttcctatttctccacatcctctccagcacctgttgcttcctgactttttaatgattgccattctaactggtgtgagatggtatctcattgtggttttgatttgcatttctctggtggccagtgacgatgagcattttttcatgtgttttttggctgcataaatgccttcttttgagaagtgtctgttcatatcctttgcccactttttgatggggttgtttttttcttgtaaatttgtttgagttcattgtagattctggatattagccctttgtcagataagtaggttgtgaaaattttctcccattctgtaggttgcctgttcactctgatgatagtttcttttgctgtgcagaagctctttagtttaattagatcccatttgtcaattttggcttttgttgccattgcttttggtgttttagacatgaagtccttgcccatgcctatgtcctgaatggtattgcctaggttgtctcctagggtttttatggttttaggtctaacattgaagtctttaatccatcttgaattaatttttgtataaggtgtaaggaagtgatccagtttcagctttctacgtatggctagccagttttcccagcaccatttattaaatagggaatcctttccccattgcttgtttttctcaggtttgtcaaagatcagatagttgtagatatgcggcattatctctgagggctctgttctgttccattggtctatatctctgttttggtaccagtaccatgctgttttggttactgtagccttgtagtacagtttgaattcaggtagcgtgatgcctccagctttgttcttttggcttaggattgacttggcaatgtggactcttttttggttccatatgaatttcaaagtagttttttccaattctgtgaagaaagtcattgctagcttgatggggatggcattgaatctataaattaccttgggcagtatggccattttcacgatattgattcttcctacccatgagcatggaatgttcttccatttctttgtgtcctcttttatttcattgagcagtggtttgtagttctccttgaagaggtccttcacatcccttgtaagttggattcctaggtattttattctctttgaagcaattgtgaatgggagttcactcatgatttggctctctgtttgtctgttattggtgtataagaatgcttgtgatttttgtacattgattttgtatcctgagactttgctgaagttgcttatcagcttgaggagattttgggcagagacaatggggttttctaggtatacaatcatgtcatctgcaaacagggacaatttgacttcctcttttcctaattgaataccctttatttccttctcttgcctgattgccctggccagaacttccaacactatgttgaataggagtggtgagagagggcatccctgtcttgtgcccattttcaaagggaatgcttccagtttttgcccattcagtatgatatcagctgtgggtttgtcatagatagctcttattattttgagatacatcccatcaatacctaatttattgagagtttttagcatgaagtgttgttgaattttgtcaaaggccttttctgcatctattgagataatcatgtggtttttgtctttggttctgtttatatattggattacatttattgatttgcgtatgttgaaccagccttgcatcccagggacacagactggcaaagtggataaagagtcaagacccatcagtgtgctgtattccggaaacccatctcatgtgcagagacacacataggctcaaaataaagggatggaggaagatctaccaagcaaatggaaaacaaaaaaaggcaggggttgcaatcctagtctctgataaaacagactttaaaccaacaaagatcaaaagagacaaagaaggccattacataatggtaaagggatcaattcaacaagaagagctaactatcctaaatatatatgcacccaatacaggagcacccagattcataaagcaagtccttagtgacctacaaagagacttagactcccacacaataataatgggagactttaacaccccactgtcaacattagacagatcaacgagacagaaagttaacaaggatacccaggaattgaactcagctctgcaccaagcggacctaatagacatctacagaactctccactccaaatcaacagaataaacattctattcagcaccacaccacacctactccaaaactgaccacatagttggaagtaaagcactcctcagcaaatgtaaaagaacagaaattataacaaactgtctctcagaccacagtgcaatcaaactagaactcaggattaagaaactcactcaaaaccactcaactacatagaagctgagcaatctgctcctgaatggctactgggtaaataatgaaatgaaggcagaaataaagatgttctttgaaaccaacaggaacaaagacacgacataccagaatctctgggacacattcaaagcagtgtgtagagggaaatttatagcactaagtgcccacaagagaaagcaggaaagatctaaaattgacaccctaacatcacaactaaaagaactagaagagcaagagcaaacacattcaaaagctagcagaaggcaagaaataactaagatcagagcagaactgaaggagatagagacacaaaaaacccttcaaaaaattaatgaatccaggagctggttttttgaagagataaacaaaattgatagaccactagcaagactaataaagaagaaatgagagaagaatcaaatagacacaataaaaaatgataaaggggatatcaccacygaccccacagaaatacaaactaccatcagagaatactataaacacctctatgcaaataaactagaaaatctagaagaaatggataaattccttaacacatacatcctcccaagactaaaccaggaagaagttgaatctctgaatagaccaataacaggctctgaaattgaggcaataatcaatagcttaccaaccaaaaaaagtccaggaccagatggattcacagccgaattctaccagaggtacaaagaggagctgggtaccattccttctgaaactattccaatcaacagaaaaagagggaatcctccctaactcattttatgaggccagcatcatcctgataccaaagcctggcagagacacaaccaaaaaagagaatcttagaccaatatccttgatgaacattgatgcgaaaatcctcaataaaatgctggcaaaccgaatccagcagcacatcaaaaagcttatccaccatgatcaagtgggcttcatctctgggatgcaaggctggttcaacatttctaaatgttctacattaccttgtataaaactaacttttcccttggtgttattttccttcatgcagaaaaaattcctttaatatatcttttagtggcctgtttgcaatgaattctctcagcatgtgttcatgttaaaaaaattgagtttgccttcatttctgaaaggtatttttgaatgcatagaactctaggttgacagggttttccatactcaccccagtgttttaaatatatttaactttttccagcttgcatagtttctgatgcaaagaaactatgccattatatattttttctctggctgcttttaacatgttctctttatcattgactttcagcagcttaataatgtagctcagtatatataatttttcatgtttcttctgcctaaaatctaytgagcatctttgatctatgagtttttagtttttatctcatttggaaaaatttgggccaaatttgtcctctttctgaaaccctaattatacatgttagattgactgacgtagtaccacaggtcactgaagctctgatcttttcagggttgggggaggtatcttctgttttccctttgtgtttattttgtttgtttcctttactttttttctttctttctttttttttttttttgggaaacagggtctggctctgtcacccaggctggagtgcagtggtgtgatctcagctcactgcaacctccacctcctgggctcaagctatcctcccacctcagcaccctgagtagctgggactataggtgttcaccaccaagcccagctaatttttgtatttttttggtagagatggggttttgccatgttgcccaggctgatcttgaactcctgggctcaaatgatccattcacctcagcctcccaaagttctgggattacaggtgtgagccaccactcctagcctccatgtatttattttggatattttctgataatacgttttcaagtcagctaatctttccttcagcagtttctaatcattgttgatcccatccatcatatattcatcttatcatttcagatattacacttctcatttctagaagatattatttgaatatcttccatttttctcttcaccatgttcaattttcctctattctctgaacatatggagtgtatttataaaacctgatttatcatccttgctgataattctatcagctttgtgatttctgggtctctttctattaattttttttctccttgttatagatcacatttacctccttcttagcaagcctggcaagagacggggtctcactctgttgcataggctggagtgcagtggcaggatcatagctcactataacctccacctcctggccttaaacaattctcccacctcagcctcctgtgtagctgggactacaggtgcgtaccaccatgcctggctaatttttaaattttttgtagagatgaggtcttcctatgttatccaggttggtctcaaactcttggcctcatgtgatcctcccactttggacactcaatgcgctgggattacagacgacagccaccacacctggcttgtgtggcaatttttacctggatgccagacattgtgaattgtatgctacagagtgccagatattgttgtgttcttttaaaaatcgctgccatgggcagtagctcacacctgtaatcccagtttgggaggccgaggcagacagatcacctgaggtcargagttcaagaccaggctggccaacatggtgaaactctgtctctactaaaaaaaaaaaatacaaaaattagctgagcatggtggtgggtgcctgtaaccccagctactcaggaggctgaggcaggagaatcacttgaacctgggagatggaggttgcagtgagctgagatcgcaccattgcactccagtctgggcaacaagagtaaaactgtgtctctaaaaataaataaataaataaataaaaattgccatctctttttatggaacacagttacctgttatcagtttgatccttttgaggcctgttttttatctagaactgtgaagaatcagagattttatgctacttctgagcaaacacattaacctgccaagtttcacaaatattagctaaagacacaaaactcctggctcaaaggcaaaggacattactatttacagtgtagcaagcaacatgagattcctgtttgcattggtttttcttgcctcccaagtctcaaagcagcaatatggaaaaggccagatggatgctgtgcaaccagtgggtctacatcacagcttgagcagtttaatgtctgtgaacctcagtttccttatgtaaaatgaaacctaacttgctgagttggtacagggattaaaggagatgacactcttggtatctttgataatcagggtagaaattttctttttctcctcttctttgccatctcctacacctcgtcccctcaaataacctaactaccagaaaacattgagtgggtcaaatgagaggagaccttagggaatctcccttgagcttaaggaatctgaatttttataatgtgctacaagcagtactatattttgtcccaaaaggatacatgacctttattatactggacaataaacaaatctgcccttggccccagaaggagacactatttctgtattctaaggctgttcactattcagatattcttgaaaagatagtctggaacaaaaggtcagttagggcctctgcttgaaagacatgcaaaaatgtgaacaatccatggatccatgcttcccaccatattaaagctttatcagggctttatgtaagtctagaactaatttgaatgcgctagtgagtcaaaagtcttctcagaactttactgaaaatcccatatattaagaacatctttccactctggcaggtgaaaacactattcctagcactgtgtgagatctaagagttgttctgcctactmctttgaagtggttcagctcagaactcaaccaaaggcttgagaggattcctctgtagttatctagagctcactctttgcgcatctctcttttctctggtactctgacccacaaatcttagtctttgccttagtcttctcaaactccacactctctccctctgaagctcagtgaaactggcaggctctgtctgggttcccccttcctgcactgcaccttggatagtctctccatgcattaagyagggggaattgtggggctcgcctaacttattcccctcctctcaggaatcactgtcttgtgttacctgttgtccaatatcaggaagccattgttccatatattttcccagtttgccagttgtttaagatagaagaataaatccagtcccagttataccatcatgaacagaatccagaagtctgaaaatagatattaaactagcagacaaaytcattgtctaaatataaaatcctaacaaatctaaaaagcaactgccaaaataagtggcaaactaacagaatacagttacaaatacaaaaaccaattgtgtttctacatactaccagtaaacattcacaaaataaatytttcacaataacttcagttataaaagcatcaaaaaataaagcacttcaggacaaatgtaacgaaagacacgtaagtcctctacactgaaaactgtaaaacattgctgaaaaaaattaaggcctacataaatagagttgtaccctatttgtcatagcccgaggggttcttcttgcctgctgccctgaaaaaaacaatgagaacagcaggtgttgcagcaaagagtttaataattgcagggccagccaagtgaggagaacgacagacacttttcaaactcatccccccaagagttcagaggctagagttttttaactactactttggcaggcagggggctggagaactgaaacaacggattggctggggatgaaattgcaggggtgtctaaaaccatwttcacacagccargtcatttcctgggaagcggtctcaggacgaagtggcatctcttggtctcctgaaatgctaaatctgaaaaatgtctcaaagaccagttcttcaggttttacaatagtaatattacctacaggagaagttggagaagctctaaatcttgcsaccccagatacaagactctggggcagtaagcaacttatataacaaaaacaagctaagyaatggcgggtcattgttcaactatgtctattcttcagcaaagttcaagcccctaccataattttaactttgttttatgaatgtggttttaactgtaaactaaattcctcttatagttatcttggcccccacattagaatggacaaaaaaacaatttaacttgagaggttggaagcaagatggagtcaaccatattagacttctctcattacttatagttctgcaaaggtggtttcatattcatgaattataagactcaacattaagatgtcaattttccccaaatttatctacagattcatatcaaccccaattgtaaccccagcaggattttttttttttttgatacagggtatcactctgttgtccaggctggagtgcagtggtgcaaccacggctctctgaagccttgacctcctgggctcaagcgatcctcccactttagcctcccaagtagctgggaccataggcacaagccaccacgctcagctaattcttaggtttttttgtagagacagagtctcaccatgttgcccaagctggtttgaaatcctgagcccaagtgatcctcccatctcagcctcccaaagtgctgagattacacacgtgagccactatgccttgccccagcaggattttttaacagaaattgacaggttgcttttaaagtgtatatggaaatgcaaaggacctagaatagccaaaacaatcttgaaaagagaagaaagacttataatacctttcttcaagacttaatataaaactagaagaatcaggagtgtgttattagcttaataataaagrtatcaactaaacagaattaagtccagaaacagaactacatttatacaatcaactgattctcaacaaagctctgrcgcaattaagagaggaaaaatagtcaaacaatgttataggaagtcattatatatccatatggggaaaaaaaggaacctcagtcctacctcaactatacacaaaaattaactcaaaatagatcacaggccgggcacactggttcatgcttgtaatcccaacactttgggaggccatgttgggagaagagcttgaggccaggagtttgagaccagcctgggtactatagcaagagcctgtctctaaaaaaatttaaaaataaattacagacataaacataaaactataaggcttcttagaagaaaatacagatagaacccaaacgcccatcaaaagggaatgaataagatgagaaatacgatagttccccacccttatctgcaggtgtgctttctacaatttcagttaccagtagtcaaccgaggtctgaaaatatcagatgaaaaattccagaaataaactactcataagttttacattgcatgctgttctgagtactgtgataaaatcttgcactgtcctgctccatcccacctgggacataaatcaccccttcatccagtggaaacacgctggggacactccctgcccgttagtgtccctctcagttatcagattgactgccacagtactgcagtgcaagtaactcttattttacttaataatggccacaaagcgcaagagtagtaatgctggctatgcagacatgccaaagagaagtgtaaagtgcttcctttaaataaaaaggtgaaggttcttgacttactaaaaaaaaacaaaaaacaaaaaaacaaaacaaaacaaacaaacaaacaaaaaacaaaacatgtattccgaggttgctaacatctatggtaagaataaatcctctatctgttaaattgtgaagaagggaaaagaatgtgtgctagttttgctgttgcaactcaaactgcagaagttactgccatgggccacggtaagtgcttcgttaagacagaaaaggcattaaatttgtgggtggaagatatgaacagaaacatattctcattgaaggcaactgggttagatgctgtctacagcaggggccttggaacatgtcccctgaggagaagggagggctactgtattcataaaatgtaatactaccccaccaaaacacaaaacaaaacctactactgatacatacaagttcacagatattacagtgaaagaaatcaaacaaatgcaaaaggaacatgctattgacacaggattttttggtggtgttccacagccagagacctccacggccgggggggccctgctcaagatcaagattcactcgtgaccactgggctggctccacccactgggcttggcaggctgtgcttggctcttggctagcggtactggcccagatctcacacccaccaagggcaagccaggtatgctagctgctacagcagggcatcacctccaggcaccagcttcatgtgaagctgtggctggatcaggtatactgcaagcagcttctgccttgggcactggcatatgaacgaagggaacgcagtggcgtccaaaaaactcaaaagacaccagcaactgcggaacttcaaaggtcaggtgcagtggctcatgccggtaatccccacactttgggagcctgaggtgggagaattacgtgaggtcaggagttcgagaccagccgggccaacgtggcgaaaccccatctctactaaaaatacaacaaattagccggaagtcgtggcaggcacctgtaatctcagttactcaggaggctgaggcaggagaatcacttgaacctgggaggcagtaagttgcagtgagccaagatcacaccactgcactccagtctgggtgatagagtgagactctgtctcaaaagaaaaagaaaaaaaaatgcggtggggggtgttacagcatgttacagctctggcttggggaatcccgaggtytgcaccccgaagagtctcagctcgtttgtgttacagttcattcattcctgctgtccacaagctttgccgaacgggkgcatgtcccaacttgttcagtcccaccagcccayggctcctgggctggcctggcgccaccaccacttcccataacgtggggtggccgcctggtgccaggagagggcaggagggctacagcctttcacctgctgttcttttgcacccgctgttcggcaggtcccgagttcttgtcctgcgtccaagaagaatgaggttacactgacaattgcagagtaaccaaggcagagaggacgtttattcagcaacagaacagctcccagcagagaggggacccaaaggtggtagtcccactgtgtagctgagtccgggagtttttatgggctcagaatgggggagtgtgtgctgattggtccataggcagcctggaaaaagcaccatttgattggctaaaaggcattgcgggagttctcacttgggtcttagattctacccagaactggcaggtgagttttcaggcttccrgcggtctttgactcgaaggttggttttcaccagggacccgcccgtatctacctaggaatttgtctgcttcccaccactatcagtatctgtccatttatactaagttctaaaataggcaaaattaatctataatttaaaaaaaagaaaaattcaaaagaccaggcttgatggctcatgcctgtaatctcagcacttcgggaggctgaggtggaaagattactcaaacccaggaattcaagaccagctcggggaaaataaggaaacctcatctctacaaaaaataaaaaaaaattatcctagcatggtagcacactcctgtggtcccacctactccacaggctagctgggaggatcatttgagcctgggaggtcgaagctgcagtgagccatgtttgcaccatcgcactccagcctgagtgatagagactctatctcaaaaaaaaaaaaaaaaaaaaaaaaaaaaaaaaaatcagagcaatagttgcctctaggactaggagaagatgactggataggagcatgaggaaattttcttggatgatgaaaatcttctaaattttttgattacagataacagttatgatgcatttgtcaaaataaattgaattgtatccttaagagttgtatatttcggccaggtgcagtggctcacgcctgtaatcccagcactttgggaggccgaggtgggcggcacaaggtcaggagttcgagaccagcctggccaacatggtgaaaccccatctctactaaaaatataaaaattagccagacatgatggcaggmgcctgtagttccagctactcgggaggctgaggcagaagaatagcttgaacccagaaggcagaggttgcagtgagccaagatcgcaccattgcactccagcctgggcaagagatcgagactccgcctcaaaaaaaaaagaaaaaaaagagttgtacatttcatgacttatatattttgccttaacaagagaaaccagaactttaaacaaatatggaactcttactagtaggcttgcttcacacatcgtatggcttatcagttaaaaaatcacttcctgtgttttcttatatgtgaataaatgtatacatacaatgaatataatgggaacttggttcactcttggaaataaacaatttcctagctctgtctgctgacactgaagcagtgacacacaagtagcaacaaacacaactcgtaatcacatcttggtttttcaataccattttccactaaaagaaccaagaccccttggtgaaatgactgattctaggataagggtaagagaaccacaaaactttttaaaaatatacatttgaggcatacaagatattttgattgatacacatatacatagtgaagtgattacttcagtcaagcaaattaacatattcatcatctcatgtagttattttttttttttggtggtaagagtacctaaaatctactctcctggcaaagtaccagtatacaatacaatattaactatagtccttatgttacacactagaacattagaatctaaccgcaacttcgtaccttttgacctacatcttcccatttcccctaccccgcccctggtaaccatcttcctacactgtttctatggtgatttttttcaagactccacatacaaccgatatcatatcatatttttctttctgtgtgtgtcttatttcactcagcatgatgtcctccaggtccattcatgctgaatgctacaagataaaatcggaacatcttatgtgcctgaaagtaaagaattcctcaaaaaatcatatggacatgtcaaaaggataaaggaggcaccactaaaaggctcccactggctgctcaacagaggcccacaccctcccgcaacttctcggcctcatcagtgggtggactgcatgttcctgtggtaggaaacacaccctcccctcagagatctgaatctctaatcttgcaggtggggaagggagcatttcctttaacttaagtaactcctttattaactcttcttcagccctagaagtaacagctccttttcgtagctgcttcttctgtatcatagagtcctcttttagtaactgatcatcttttactagaaaataattctttaaatttttcctgttaaaatcgccaatatgatatctgtttctgaatggaccctgattgatataaaaacgtatcacttcccttgcatttctatccaaaaaaaatgcaaacttaaatataatcatgaggaaatgatagccgcaggaggcagacaaatgcctaggcagatccccagtgaaaccccatctccaagctgaagacagtttaaagcctgaaagccaagctacaagtcaaatccatggaccggattaaaaacctgtcttcccatttggcacatttttctttgattgatccccacctttcacccattttatatacacctaccctttcctaattggttttctacactgtcgtgcccacctttgagtggtgtcttcactttaactgtttttgcatactcacaaaccaatcagcacacacttcccattctgaatccataaatgcccagacctagccacattgggtgagaaaccacctgactgcaggggtgggggaccacctccacctaccgcatcccctctccgctgagagctgttccatcgctcaataaaattcttctccatccttctcatccttcaaattgtcagcatatcctcattcttcttggatgtgggacaagagttcaggaaccaccgaatgcagatacaaactataacacaggcagcaggtcaagtgaggcctgggggttttgcgggggggggtgtcactagctatggacgggtccctggttggcaaagtgaccgagaaaaatcctacatcagatatatcaaacaaaaccaaaatgaaagacattctacaaaacaagtggccagtacctatcaaaatttcaaagtcaagtaagatcaatgacaactaattacaatgtgtgactctggcttggctcctgtgattgttgggaaatcggaagtaactatacatagcatctattgaaacgtgataaaattttgaatacagactatggatttggtaatattgtattaatactgtagttcctgattttgatgagaggatgtccttgtttctaggaaatacacactgatatatttaatggtaatggaagtttactctcaacctgttcaaaataaactaatgtatatggaggggaaaaagatgaatttaggtaaaatgtgtaccagagttctttgtattatccttgcatcttctctataaatgataaatatattaaaattgaaagttaccaaaaactatatttagtccttgaaatatggaaaacatgatcattttgaaaagcatctgagccgggctcagtggctcacacctgtaatcccagcattttgggaggctgaggcaggcagattatttgagtttaggagttcaagacaagcctgggcaaaaatgtgagaccctgtctctacaaaaaatacaaagattagctgggcatggtrgcttgcgcctgtggtcccagctacttgggaagctgaggttctaggactgttaattaccttcctctcttatgattatacagaacaggaggcatccttcccatttgatttcagaccaacaatcctagaactgctttctaaacaaggtgaacaatttaccttgtgtgagagaaggcagtgtgggtgtaggtttattgtggggagtgtgcttgttaataatgaggctaagaaaggaggmaggccagaaatgcaaamaaacaaacaaaaaaaaattctgctcatttcaatttttgccccagcaagaaccttgagctcagttctcagaggtgagarttctaacacagaaagcacccagaaagggcactgaggtctgagaagcaaggaagtgacccaggttgtttgcctctggtcggaaagggaaactacccctgcttccactctgacagcagacaagttaatcaacctactcaattgcatttttggcccattccccatttccaacatgaacagttcctcccctccagcccaatgccactctaggcagtcaccaagaggtaagatttctgaaatcaaaacttgaattaaccaacaaaggaacatcaattctagaacggattgtaacagggatttttgtcttttttctctgctgtatccccaagatctatattatatattctgtggttttggcacatagtaattgctcagtaaagctgtgttgagttacttgataaaaartaagtcagtagaaataacttaaatgctcaacattaatgtcattggttaagtagcaatgcatagaactaaatattatgctattaaaaagtttatttgtaaagtcaaggatatggaaaaatatttgatacatacatatctttttgagataggttctcactctatcaccaaggctggagggtagtggcaagaccatagctcactgcagcctccaactcccaggctcaagcaatcttccagcctcaggctcccaagcagctgggactacaggtgtgcaccaccaagcccagctgattttttttttttgaaagaaggggtctcacyatgttgcccaggctagtcttgaattcctgacctcaagtgatcctyctgccccggaatcccaaagtgctgggattacgggcatgagccacagtgtgggactgatacatttttgaaaaaaggaaacaacatatattcatgaaggaaatacacaccctcctggtgagtttatgtatgatttttgttttgttgttttctgtgttatctgatcacaaattactttcmttttcaggaagaaaaaaatttaattttttttttattggggcaacatccaacccagatatgattactacctagcctgaactgaatgtattactaataaacaaagaaatgcagaatggcatacagtcggtaaagcgtagtgcttgagagcatggattatggagactatttaaatactggctccataacttaatagcttgggacccacggtgttacttagcttctatctgctttaatttactcatctgtaaacttgggataagatacttcctcataaggttggtgtgaagaccaagtgaattaactatcgtttaaagcacttacaaaagtgccgggcaccaccgagatatgcatccgttagcttttattattattagactcaaaacactgtagtagttctaatgagaggggtaagaatmaaaaatccaggcacctgcatagagccagagaggcacacatagaagcaacgtaagagtggaagcggaatgaaaacatgctaaagccaggtacaagccacaagcgagggtccacaggaagaaattgttaattctgaagagagtgaatgcacgaagttacaggaaaaataacatctgaacagagtttaagaatgagcaggacttcaacaagtggctagtaagacataaggaacctacaaaagatcttagcaaaggcgcaaagattaccatcgtattgctcgtttcttcctactttgcagaagtaacctctggcgaacagaggtggktgcagagcatgcttatcaagcaaaataccacgaagcagtaaggaacgacagagataacagtaacaataataattcaccccaaggtactcaactggaaaaaggaaatacagaggagaggtgtcgttaagaaagccaggacgcacatcacggccccgtcgctgcactactctcgtctaggggtcaacagtggagtcgagactcgaagcttccacgcggcggaacagcgtccctctcaggcggcgaacgggctagggaagcgcccggaggagacctagcgtgagaactacaactcccgcggagcccgagggcgagctgcctgcgtaacttccgcttccgccacctgcccctckcaccctcttcactcgaaccctacccgggagcggtcaggcgcgtgaccccgcgtgaccggggtgcgcgagccgagaggccctggaagcgggactctgggaccccattgaaagaaaggcaaccagaaaaggcgaaacgacaacctcgatagtgattggagctgayggaacgagggcggagctaaagtcccagaatactggccaatcagagtttaagattatcagggagcccgggaaggggaaaggggcgaaatggttctatggtcacatgccgcggggtctggtgggaggagcggttgcccagcggcctcttggcgcttcctgtttccggttcccagagtggggcacagcgaggcgctagggrgaacgctggcctctgaaactagctctgggaccggggtctgcggccggcccctagctggccccgtctcccatccccagaagggtrttcactggggattctgagctttggctactccagtttcccacgacacgtgagtgtgaggggcgtggaggaggaggcgggctgggttgcgctcacacttaagcgtctgtgacaggagccggaatcgcattctcccttgaccatggttctagcyaaagatctggctgaggagccctaagggtagaatggaggcggaggcatgagagcggagagtcacggagttccgaaaggtgtgagggagaaaggacttccaagaccagagaggggatttacgatatttagaaagcagggaaaggaaaataccccaagtatggagtccgttggaggtgttggtggatttatttgtaggaggaattttggcctgcatcacggtgggaggtcaagtggcatcatttggagagggtatggctacaagcgcttggaaagtcgggacactagacagagcgagaatttctggcaccctgggagagctttgagggggatgcgactgtggtgtggataagaatggctgayggacggattatcttgtgttcctcgttgtggggagcttccgctcttgggacatagccgctacttgtctgaggctccttctctcttgagttctttcagcattaggccttttagccaattgaggctgcttttctaaacatgtaggctgctggagaaaaagggataaggactgctacatcagaaaggagccagcgggaagacagtagaaattccactggtaaatggccatggctgtcttaacagatggggaagtgagtgctacagaggcccagtggtgtaagctgcttcccagttgctggcttagtcattggccaccctaataaaggataatttttagcattgccaaataaaatagatctgtcgttagagaataagaaaactgaaagatttttcaagatcataaaatcctgctccttatttccaaagtatatagacaaactcttgtaccttgagaatctaattgtagcatattaaaagggggctacygggcccttccatttcattctcttcctgattgttgcacccctatgtttataagttttccagcagttatctttatgccacgaatcgtctaaattgccccagtaacttcacacacatttaatatctgtgtaatgtacagcaagtaatttaacaagtaattctgtaaagcatcagttttctcatctgtgaagtatgaaaaattatacctattttctgggttgtgaagatgaatgaacataatctagggaaaacatttagcgcatatgccactgaattaaagagaagcagcttaaatttaaagacaagccttaagcaggaaagaagaatacagtataaatttattatcctaactttttgaataataagcaaatgaaagatagttcaactcagctaatggctgaggtgtttaacctttcatcccttcctaattttgtgagattccttgttctaatttaggaaaagaaatcaactgtcagtttttaattaggtcctgagagactggaaaggaaaatggcaggctaagtcagtctagaagaaggagtctcctatttctttttagtgagtcagctggtcaagttgtgtgttgagcagtgggttaacttagggaaggtgggagttggaggtctgagttctttatttcacctcctattcagtcaactgtgtgaggaatcacttccccttcacttcttagtagaaaaaaaaaaaaacccacagttttggctgtctactctcatctccaaaaaattgttatgcacatagtggaaatatacatgtagttgttcaacacagaccatgagctctggagctagactctctggctcactccactagctgtgtctcagttttcttactggtaaaatagcaacaataattgtatttactcataaggttgtgaggattaattagttaattaatatatgttaagtgctttgaacagcacctggcccaaggcagtagtctgttgtttcctgctgttgtgtggtttcagtgcattaaatgtgttatgagggccttggacctcttggttagctatgattattctatggaaactaccataatattacagtagagaattgatgtttggggtacaggaagtcaggtagacaatttcccgggattttttgctttagtggggtgtgggaagtggaaggtcagatgttaggttgtttaggggaatggggaaagtgcattcacggccaaggttggagcttccattttcccatcttcaaactcattagtacccatgaaaattctgcctgtttcaagttttatattttaaaaatgaggtggagtaagtggacccgcatgaaaaagaactagagaactttaaagaatattcaaaccaaagtccagacttgcagcgttttttgtaagtgagaaaagtttagaagagttaaatcaggaaattgtccgtgatactcttggaataaacaagtagcaatggcctgagggatcattaacagataccagagtaaagtgttttgcaagggtaagtcagtctgtcctgggtatgaagatggataagagaaaagaaaatgttaggttttggtggggtttttttgccaaaaccayaatgacctttgcaccagtctagtaagtttgggaargagagctgtctgtgtgttttcattcctagagcagtacaagcagcaggtgcattgaatttactcaattgtaaagtggcttggtgatccccaatttgttgtcattgatttgtagtgtaaaagacaactgtacttatgggaagtctagaaacccttgagatttgtgacctgtagaggccaaagaggtttcagaagactacatcaagccatcaaacagtaaagaggcaaggatggctccacccaagctgtcatcattcttttttaagttctttcatttccctcttcccaactttgtagtttgttctgaaagactcacctatacattagactacaagttacatataaatgaattttctgctgcagatgctcttgttacagagatattaaaatgtactatgtgttgcatatgccagagaatcttgtactttctggataattaaaataccatcgatttattacacattcatacgctttatctctttcctctctctcctgatcctayctgccctccccaacacacactctctcccaaaggatgttccctttctacagctgctggaggactggactgctactactactcctggctgtggcagtgagagaatcctggcagacagaagaaaaaacttgcgacttggtaggagaaaagggtaaagagtcagagaaagagttggctctagtgaagaggctgaaaccactgtttaataaaaggtaaatgagaagaaccttaaagagcttgagaaaatatttatgttaaagtcttttcttcttactgattttatttcataatgtgctctcttttatgacatagagcaaattctcagcccagtttttagttgctgtgtgcagttttctcatctttcacagaagtgtagctatttccaagactggatccaagagaccagcttgtagaaatttaaggattatttgacacctacatataataggactttagaaatatcarataaacatatttaggccgacacatgtcattataagtgtcaggaaccttcagatatataaatctgaagttggtccctaagaaacgagactatccgatgaacatgggcccttattcattggaacatggttactaacaggcattctaaaaataactagaatattgagctatcaagatagctcaagtgtgttttaataattcatcatcagcaataaggatggtctgtcaaggttatgaatatcttaaaattaaacaaatattcactcagccatgacctcaaataaataaatcgagcatgttgtttgttttgttttaattaaggaaagggatgctgttattcctgaggctgatagctagtaactctcctcttctttcttcccacttctctttacagctttgagagcactgtgggccagggttcagacacatacatctacatcttcagggtgtgccgggaagctggcaaccacacttctggggcaggcctggtgcaaatcaacaaaagtaatgggaaggagacagtggtagggagactcaacgagactcacatcttcaacggaagtaagaaaactccccttcctaccatcgattgactaactgatcccaagtcaatccctctgacaatcctgtatgtcttggccktttctagtgtcttcagcatatcatacgtgtsgttcggcacacctgagactgtaatataccacaggatgcctaattccacagctcctctgtaagccacagctcaggacagttgtgcattaaaatcagtgaaaaacttaygcaaaatgaagactctagccagaattgttttgttttgttttgagacggagtctctctctgtcacccagcctggagtgcagtggcacaatctcggctcactgcaacctcagcctcttgggttcaagcgattctccagcctcagcctcctgagtagctgggactacaggtgtgtgccatcatgcccagctaatttttgtatttttagcagagacagggtttcacaatgttggccatgatggtcttgatctttgacctcgtgatctgcccacctyggcctcccaaggtgctgggattacaggcatgaaccaccgcgcccagccaactctagccagaattctgtagcctagagtccttttattcacccaaatacttttaatgagtttcacactagacttamaaataccaaccaccaccaccacttttcatcaaattaatcaaagtttaccagttaaattttaagagctcaaacttttttttgcaaactactcagtctgcaaaactttacccactgatttttgtgctatggtggtgatatttcttaaaagtcatattgctggagakgaccatgtaagcacctatggtccaattccctcccatacagataaataagttatacaaggtagctatttactcctggtaaataatacaataaaaaagtaacaaaagggtttggggctggggatcatgtgaccaggttctcctcctgtttcctaatcctgtgactgraaagtcgtatcaccttttgacsttgttttctcatatgcaaaactaggagcagaatctttaccttattcacctcacaattactgaatcaaatgatattttgcaaaagaactgaacacagtaaatactaaagaagagatatgcattccaatcttagatatccactctgaatttatctggggctaagttgaaatcttagatgggcttacccctgctgctcagcaattgtatggaacctctttttttgcttttagaaggtattcagaaaatgaatcagtgttaaggtatggatcataattggttttgcattgtcagttgcctacctttaatgttaaaaattaagattattcttaaatgaatatctgattcttgtcttaagggaacacaagtctttgtaagcaaacaagtttagcttggcatttctggtataccaagttcgtactgatgagggttgtttagttataaccaattgcaatgaattacgcaattccactctgccataccacccagatctgcctctgcttttcccccaccccatagctccattttccttgtccctcctcaggtaattggatcatgctgatctataaagggggtgatgaatatgacaaccactgtggcaaggagcagcgtcgtgcagtggtgatgatctcctgcaatcgacacaccctagcggtgaggcaccctgtgttgtataagccgagggaggagactgaaaggactgacctgaggttggggagaatatccagaggggacacratacgttgggatggacattagaaaactaggagctcagtttctctctgtgtcagacacgcatcttccatggaaaataggctgctgaaccaggaaggagcagatgttttttgggttttttattttgttggacaggagtcaaaacacytaaccacctgaatgtgttatgccatctcatcatcaggacaattttaaccctgtgtctgaggagcgtggcaaagtccaagattgtttctacctctttgagatggatagcagcctggcctgttcaccagagatctcccacctcagtgtgggttccatcttacttgtcacgtgagtatgccttcctttatcagaacagaccttccttccttttgtttttaaggtcagtaactatatggtggtacataagcacaaattgtatgtgtacattatgctgtaattgatggggataactttttaaatcctctggctataaaataattctgccaggacacagggctcacgcctgtaatcccagcactttgggaagccaaggcagatggatcacctaaggtcaggagtttgagaccaacctgaccaacrtgatgaaactccgtctctactaaaaatacaaaattagccagcacagtggcacatgcctgtaatcccagctacttgggaggctgaggcagtagaatcacttgaacctgggaggtggaggttgcagtgagctgaggtcgcaccattgcactccagcctgggcaacaagggcaaaactccgtctaaaaaaaaaaaaaaaaattctgactgcaagtttttgaaaaatgagatttaatgtttagttgccggtatagatttgcatttggaggtgcttttttcccctactgcaggactaggcaatttttatattatttcattagattatgagaacttctagagaaatggaakcatatacttaatggtgattattcttggccatagaatcacacgctgtcacattttgtctgggcctttgcttctcttggactgacagcactctaactggttttctaagagttaccagccccctttttcatttagwatcactactcatttttccttttcagggaatgtatcttaggaracagctgacaataaatgcagaggttatcctatctgagtttttactatttcccagttcttaagtatagatgtctttctctctctacaggtttgcatcactggttgctgtttatgttgttggggggttcctataccagcgactggtagtgggagccaaaggaatggagcagtttccccacttagccttctggcaggatcttggcaacctggtagcagtaagtaacagggcagctggttgaatttgtagcctgcaaacaaggttgggtgaccaaccatcctcgtttgttcacactgagggggttcctgggacacaggacattgagtgctaaaaccacaaaagtcccagcaaacaagacagttgccctagtacagagtagtaagtggcacagcatccatttctggccttggtaagacattgctgaaagagcaacactgttgaccagatgggctcttctaaatctgatttagcttttaagagggcctgggtgggaagaaggtgaggcctaataagaagaaactttttctcctgttgccccaaattgaatttaggctgattgtcagatcttttaggttttctcattatccctatagaaaaccaattcttgccacattcctagaccataagtacactttctcatatcctaaagttagatgctgcgaattatttccttyttttttytccccctacaggatggctgtgactttgtctgccgttctaaacctcgaaatgtgcctgcagcatatcgtggtgtgggggatgaccagctgggggaggagtcagaagaaagggatgaccatttattaccaatgtagattgcactttatatgtccagcctcttcctcagtcccccaaaccaaagctacacagccagatttctcaagcagtctcaactccagtccctcatctcacccttactattgctcttgcttyccagtttgcttttgatttgcatcttytcactagtaaaactgccttccctttgttccttattttctgttttttctctagagaggtacagttgtaagtcagagttaatataatagggcctgtgaaaacagaggcttttgcattgtctcttgacatcagaagttacaataggcatatgggcaaaatggtgtagcaggctcactggccgtttgttttttaaacacattttcacaagtttttgagacactggatttctttaattaaaaaaaaaatgccaagaaacattatttatacagggttgattgytttcatgttgttattctgtaccctatagtagcctccatgagaatctggtatttyttgctgcttggaactactttgcagkgattacttggttgcagtccaagtactctcgtttagtctgagcctggagatgttctagacttgcttctcccacctctgagattaggacaggaaaaatgtgaaatttcccaattacaggattatacggtaccatcacatcatttgtggaaattggggtgactgtatagctgggattgggctaaggactgtggtcttatctgtccacatacagccaaaatgcctatccagaaatccagttcgttggaaaggaaaattggtactcctgtgccacaggggttccagaaaagggaagtcactttaccttgcggtggtgggatcctgatgtctttcatccatttgtagtaaaagctggtaaagcttttcttaytcctggttccctaccagtatttctaaacatgtcgcactttctccacaggcatgtggttttgacctttttttcaatcttctagaaagggaacggaagcagaagtgggacatcgagggctctgctgtcctctgcgctgggtgtggaatgctgctgcacctgtcccttctgctggctcagggaagtgtcttcttgcccacatttctgtggggaaaggtttttaatcctctgatgcttccatcttcctgtttaggccatgtgcccagaaacctggactgatctttctttaatagtgaacccctgggccactgaagagtaacatgrctccactggacacaaaagagggatggaatcaayaggcaggggsccttttataagccttaggaaaagaaaatgaaactatttcatctttggacttttcaatactattggagtgattttttttctttctaaacagggaaaataatgttacaaaagcatcttttttgttatttgtttgcatcccycccccacaccctggtgttttaaaatgaagaaaaaaaaccatcacyttttgtacaaaaactcttaatgattaaamaacaaacaaaacatattggccttgtcatttgtgtgaaagtgggcaaagactggaatagagtaagacaactgaaaccaattttcatccttttactgaggaaaaaaatatttaatatttttgttatataaggaatagtgcctaaggcaggtacttatactcctgacctcagccccacacactctggttttataaagctayaggacagagcagagatggaactgaaaaacagggtagaaaataacataaattggaggggaacagtgggatgcagaaagaatgacaacagccacatgtgccccagtcaaatacttttagtccctgcagcagaagatgccaaccaagtctctataytggctggggatcctgccatggatgcaggagaaaaaattcaatcacaagggagtaagtgacaacaaaaaraaaaaactctgagccacagctacactgggagggggraggaccagattttgctacttctgtcacacaagctagaaaaaccctacctctcccattgggcaggcaacctgacattccacccagttccttgccttaccatactatgtattcctcctcttggagaattaagacctgggctaaatgctccactccrggataaggctgagcagtcctagttctctagactgcctcttttataaagattggattaaggtacgtgaaatggtgagaactgtaaagattttaaaaaataaagtagaacccagagaaaatgtcaaagctgccgccatgtagcaccagcaaccaattcttgcacttctcttccctgtctcagtaatcccctacagaaggttacatgattggaacaactctttcttccctgcaaagtctgctggtaccaggttataacctggacagtggagagtgtctgccttaggctggtttgtgcaagagggccaccttaggtctccttgaggacatttatcttggcgcagatcttgagggcagggcccagcttgatgttcatggcactcataagatgttcttctttaagtaataaaagggcctgtccatcaatctcctgtgagcgaaattcctctgcaatctcttggcagcctagaagaaatggtgagaacatgtaggtaatgccagatgataggagaagggaagctaaatgaaactgaggtctagcaatgattaattccaaagtacctgtcctaaattcagtaatatgaagtcagatggcaagctttaaaagcaaaatgaaattagaaagcaactggtatttaaaaaatggccaggtgcagaggctcacgcctataatcccagcattttaggagaccagggcaggcagatcacttgagctcaggagttcaagaccatcctgggcaacatggcaaaaccttgactctacaaaacatacaaaaatcagctgggcatggtgatgcatgcctatagtcccagctactcgggaagctgaggcaggaggatcatttgagcccaggatgcggaggttgcagtgtgccaaaattcatgccacagcactccagcctgggcaacagagtaagactctgtctcaaaacaacaacaacaacaaaaccaaagtccaagaccaagaaaggaaaagcaactaaattgttcaaccacagaaataacttcattcaaatagcttagagacaggggaaagggagagaacagaaataaaagcatgttttcttttatactggcaaaaagattctttgtgatatttttgtttaagggcccagaattcagacaaatagcaagaagggtagggtgattttcatttccgaaaaaaactctgtcaaaattgcatataggctgagtgcagtggctcacacctataatcccagcactttgggaagccaaggcagaaggatatcttgagcccaggactccaagaccagcctgggcaacatagggaatccctgtctctgtttaaaaaaaaaaaaaaaagaagactagcaaacaagccctctttgaagagtggggcaacaatggccacttagtttctaataccctgctccactgaaaaaaaaaattttttccccatgggaggtatcatagttaattacacaaaaacattttatccaaaaatttagtgaraaatgcagctacatcataagatgagaatcaaayactgtaaaattgctgacattacagaagataatgtcaacccagaaaaaaattaggaagtcaacttgaatattaggagtagagcctctatattagcattcaagctcctactgcttaaaagtcaattactttccctcttatcaaggcccctgtgggatgatgttaaggaaaacaacctgggttctgttgaagaragggtcagtaccttggagagaagcaataaactcgtacacctcctctacactccaacggctgggattactggacaggaacacagggttgatgccatgtaattccggtgtaggtggagctgtattgggattccccaggtcaygttctccatgcccagctcttactgataaaggcccaggagatgttggagagagtgcttcatcataactggaattatctgaaccccggctagagtcttcttgaccctataggggaaaagagcaaaccaatgaggtcagtgtcaaaggtttattcctctctctttcttcccaaaccaccctgggttgggcgtagaagaaaaactcatcttatcatatgtgaaataagcagcaytttatttgcaaattcccaaaatctactctcaaagtctttcaaatagaaactgtatcacttccttgattctccccatgacctaacaattgatctagattttctctcaagtacaattgagagaaattgagtacaattgagtacaattaacaattgtactcaagtacagtgtaaggattaatggaaacatgaaccagtagttgggtaagaggtcyggagacaaagggggtcaggatctcttggaatttgtagtaatgcaatcaatgtgaaaccagagttctcatctcacaccctcttacctgggcaaatgaattgccctgcagggaaagaaaaaaagacccagtttaaaggcatctggctctacaacaagcagctcacccggtggcacttgccctgaatcttggcacgggcaatgtcagaggagctgcggcggggtccacgcctgcgaacgcgagcatagttggcttcttgaaactctttcatttttttcctcttcagccggaactgatggctacagctcacattgtacctacaggacagggcatatataggatgtcaatagygccacagargaccaccctgctctaaatgtgaatttctgcttatgagctgatttggggaagggaataaaagcaaggagggagacataaaatatcagctakgagacgatcctggggaaggggtgtaacattagatggagataccagtgctgagggcaaggaggagggtgcccagagtacctcttagcgcaagtcatggagcagaacctcttagagccacgaaactgctctgcgggggcgtacttcccacagtactcgcacttcaggagattcgccttcttatctaactctaaaaaacaaggtattgctggacagtcaccatgggtttctgctgcccctcaggcaatcattaggctcagagctggattctaaaattattctcagggttcacccccaaaaacctacacaacctagttgagaatccctaaaacgcaaagttcaaaacctaaaatcacgaagacttgtcccktgagaactttatgacgtcttcctaaccttaagccgaactctctccattttagatgtcttactaattttatcctaattcatactcttagatttcagatatgattcaatttctgaggagagaggaactactaatgcctagaaagatataagatccttctaccacaaagatttccaaaagcagtgggaaaatcagtaagagtccttaagatagattataaaatctagaataaggagaactggaaattaaagatayaaatgtcctattttagatcatcttttggaaaaaaaaatttttttgagacagtctcactctgtcacccgggctggagtgccgtggtgctatcttggatcgctgcaacctccacctcccgggctcaagcgatcctcccactttggcctcccaagtagctgggactacaggcatgtgccacaatgcccagttaatttttatatttttttgtagagacaaggtttcactatgttgctcaggctggtctcaaactcctgagctcaagaaatccaccggccttggcctcccaaagtactggaattataggtgagagtcatcacactcggccaaaaaatacatctatagagtaaagaataattcaagggccaggcgtggtggctcacgcctgtaatcccagcactttgggaggccaaggcgggcggatcacctgaggtcgggagttggcgactactagcctgaccaacatgcagaaaccccgtctctactaaaaatacaaaaattagccaggcgtggtggcgcatgcctgtaatcccagttactcgggaggctgaggcaggagaatcgcttgaacccaggaggcactggttgcggtgagccaagatcccaccattgcactccagcctgggcaacaagagcgaaactccgtctcaaaaaaaaataataataataattcaaaagattactttagctggataaattcccctcaccttatgtaattccttttccgtgattctacatactctgatatataatatggtttctatatgtagacagacttcattttattcctacttttttttgagacagagtctcgctctgtcgcccaggctggagtgcggtggcgtgcagctcacttcactgcaacctccgcctcccaggttcaagtggttctcccgcctcagcctcccgagtagctgggactatagacgcatgctgccacaccaggctaatttttgtatttgtagtagagacagggtttcactatgttggccagactggtctcaaactcctgacctcaggtgatatgcctgccttggcctcccaaagtgctgggattacaggcatgagccactgtgccaggcctcatttctactttaaataaataggtaactactattttacaccgagtcctcaaacacatctccacgagtctccttcccccaaatgagtctctaaataaatgctcaccagcagatgggctgtccactcccaaagggccacctgactgattctcagtcagccctgtcggaaggccagtctgtagtggcttctcagactccttcagtaactgagaacaacccacctgtcccagaaaacattgagagttaagttagcctgatccccttctgcttctctatagctttccccaacatttccccatcaattatgyctctgcttggatctctgagttaatgaccaagtctggttcagagagaatcactttcaatacggtaatcaagagtagtaactggtctctatacaatgtttggaaatgagaaaaaaaaaatagtaactggctttttttccagataagccattggagaacaggttcctacgctggctccctattttgtcctcttccttcctatggtgctgagaatgcactaggagtcaagacacctcagttctagtcctggttctgcaaaccctaggaaagctccttaacttcattactataattttattcattataaaacaaactagtttatctaactaaacattacagttttaaaggttactttcttcctttttttctcctcttcctaacattttcattttatggtccacacactcttttccctttccttctttataattaaataaatagcgtaattgaaccattctttcattaaatagttctgtgccttttacttttactggagtttgaaaagacaacaatcagaccaagtccccacttcaaagtcccaccttatggccctgycctcaccgggaaaggttctgctccttcctggataacaaagccttcaatgatgtgggtgagaatctggggcttcacgatggcctgtgggggttttgagtcacccatttgtctagacaccatggctagtgtaggaggcggtactgaaggggcgggggtcaaggctactagttcactgcttggagyattagcattcacattagccactgattcagctttttctggaaaacaaacacagattaagcaacagacatgagatgacatattgatccatctattagttgagccagcatgatcttccataataatctatgtccacccttgacaattcacctggattccctgtttttggatctattcatttgtccaccaacttctggcccattttctactcaaccagwtttatcttttagctcactcagaacattcctctactctgtgtgctctccaacagcattagaagtcagttactcacctccaagactgctcttctcgtccatgacttttgggctttctgctactggagatgcyttggcaggaagcattgaacccaatgtggagacatcatctctctcctcctcagagtcagccttgcgtttgacagccaatgtctggggtttaccctataccgtaaagaataggaaagaaacaaagatgtacaaatgaaggataataaggaaccacaattattaccatatgttcaaagaaaattttcttagttccagatttcccaatttatctacttcccatggtacactaaaattcctggtcattcctagtaactttccatcaggacaaaagaaaatgtaacatgatttagtcctgacctaggtcttgagaccctgtattcacgtagaccaaccaagaactgttgttttttcaaagactgatttggttaaggctatcttgatctaacttattacatacccaaaaacccagaatagtatcagcaacaaatttaggartataaagttcagatattatataatgtgtcactctcttacagaagaagcagataaataccaatattaaccctcttaactctttattcccctattcaattaagctctatttccacttagcccaggtccactctcatgcataatagtgccctcaaaaccatcagacatcactcaccggcaagtgcacagactgcatatagaaggcagcagggacctgggctacaacaggtgaggaggtggtagccccaccctttaccacatgtgctgtcccctgcacaggagcaagggtcatcccaggggccaatgtgggagggcactcctgcagtgcaccaggagcctgggatgaaggtggcgaggaggccaaatgggcctgaccagactgcactgtacctggcatcccccgggaagtaggtacagcagctgccagctgtgccaaccccaaagcctgtgcctgggctgtacctggctgtcgagtgcctacaacttgcacagggatatggggtggtggttgctgggcagctgacatcttagcrgcccctaactgaggcggcttgataggtgctacaggtggtttggattggatgggaattggtggcttaggggctgcatcaggtggaagagacaagggtgaagactgaagcatgggctgaacgaccagggtttgggcttkctgctgggactgggaaggtgggacctgctgagtaggtgggacctgtggtggctgaggggcagtgagggtggtggcttgcggctgctgctgttgctgctgttgctgttgttgctgctgctgctgctgcgccaactggaggtgtgtagctgtgtgaaggagctgggactgccggtgctggaactgctgctggtggtggatggcaatctgctgctggatcaccacctgtttctgctggaggtggatctgttgctgttgctgaatcagtgaatggggctggatctgtgtgtaggtggctataggaacaatcccagaatacaacagagagaaaaaagagcagagaataataatcattytaaattaaaagtaaattcatttttccaaggtataacctagttttggaattatgcggtgaaaagaaatctagtcagtatgaaacttggacatcacttcgtccatactcttcccactcaatcagacattaccaactactactagtcttaaagatctcagagaaagaactyccttgctcagtcatttcagatcctgagtaatttcttgtgtctcttatctttgccatacttaaatattgtattcttttactctgtactcagcaaagaagaatggttagcccctcctccattagacttggagtttctcaaaggctgaatccatgttttattcattttcacatccctaaaacacagcccagggcctgacactgcagaagcacttaatattcactgaaagaagagatacccacagagttaaagatgycaacgtcwtcccacaaatgacttggattttacaaatcatcagcttagaccaccatctgagtcttgagagtcagcacctgtcagctctgacctaactcagtttcctccactgtaaactgggagtgacaaactctacttctccatrttgtaccagattgtccagagatcaaagcatgtgatgataaagcaatttagaaatagaactgctagagtatataaataccaagtatagtaataactaactcttaatttttttgtgagtaaattatctaaatacatcaacaactaaggtactagaaacaaraaaaggcaaaaatcaacatgaccaaataagatacacacatctaactacatcttacccgcagtctgaaagcaagtataaactatcagagtcttgccctgtcacccaggctggagtgcagtggtgtgatcccagctcactgcaacctctgccaaccgggttcaagctactctcctgcttcagcctcccgagcagctgggactacaggtgtaaaccactacgcccggctaatttttgtatttttagtagagacggggtttcaccatgatggccaggctagtctcaaactctgacctcaagtgatccacctgccttggccttccaaagtgctgggattacaggactgagccaccgcaccccgcctctccattagtcttaagtgctctaaggcattgtactgtatctgctatacactggatcaagtaaccacattaaacagtgaggtgagaattcatcccttatagtaaatgctaagttacatgaagacagggaatctacttttcaaaaatgtatccccagtaattcctagaaaacagtaagcaattcagtaagatgtgatgaatgaatagacagagtgataaaactgaagaactcacagcctaagaaagcggacaggggaacttgtaagctgactactgcctggtagaaacagataaaatctgtatctgtcacttgtcctcctgaccctgaactaatatgttcaaggctgatattattcccattccttccactattcaaggaccaacagaagcggggaaaaaacaaaaaggcaaagaaaaaaaggcaaaaaaagaaaaaaaggaaaatttcacatgaattctgagagaataatgacatgaggaatgacaatttacctgagctaataagtgtctggctgggcgcaggtgtggctgtccgtgtcaggttcatgcccacattctgctggccactcccatctgcttctgccttcttggcwkctgcactttctgcctctgtctggctgccctggctcacagtcactgtttgggctgcaggcaagggctgcaccactcctgtacccttyctgggacagctcccaccacccattcctgaggaaggcaactgacccaaaccaccatgtgcctgcccacctccacctggacccatggaccctgggatgctattcccactgcctccrccagcttgactaaggttgagggactggtttgtggccccagaggaagcctgtgccaccgctagggcctggctagaggcctgggagaggctagagacaggggaggctcctggaggaatggccttctgagtggagccttgcatctgaggtccttgagctgaggcctgttgattccttactgccaagttctgaacctgaaagatacgaaaaaacagattgagaaaaggaggactggaggcattaaggttaaagattcaaaagcagccaggactgctattgtgtcgtattccacagaatacctcagctcgtatctctgcctttaccatatactttaaggccttcctacctcctaaggaggaactctggctcygtatctgattcttcagccatcttcactcactagcaagtttatcatcaagtgtggtcttttattccttcaaaatatctcttcaattatccctttcctcgccattcaatcattcagcacctcccaaaaacctactatgcttcaggtactacactggatactggaaatgcagaggaaagacacagtctctgctcttaatgattactttctactacagaagacaagaaaattatcacttatgacataataagatgtatagatatgcacccagtaccayaggagtacagagaaggaatatcaactaagactagggagatcaaggaagggcttcctaaaacaagtgatactgatgtgacactcagtaggtaatggtgaaggtgggggtttaaagatattgataacagcatttgcaaggccagaaccaaaaaaggattattatttaggctgggcgctatgactcatgcctgtaatcccaacactttgggaggccaagacggacagactgcttgagttcaggagttcgagaacagcctgggcaacactgcctctacaaaaaaatacagaaaattagccaggtatggtggcaaacacctgtagtcccagctactcaggaggccaaggtgaaaggatcacttgagcctgggaggcagagactgcagtgagctgagatcacgccactgcactccagcctgggtaacagagtgagaccctgtccagaaaaaaaaaaaaagacattattttaaaatattattaaaaaaaatgtataatttctaaaaagactgtatttttagaaattataaatatttcattatgtttggggagagttacaaggaatggaaagaaataaagcaaggaaggcaggctgtggataaggaggtaggaaggtgctgggccagtaagggcctggtgtattgaaacaaggaatctgaactttagtttgggaacagcaagtttatctgtcttattcattgttatattcctagcaccttcacagttccggcacatagtcagtactccaaaatatggataaagggaaagaatgatgtctgcttaactgattataggaagccaataaagcttattaatcaaaataaacattcacttatacatttatacatttctgattgaagtataaatcaatacacttcctattttagaaaatatttgttatcatatcctaaagttgaacattcacacaccctctaacccaggaattccacaagacaaactcttgccatgtaccacaggaggcatgtgtaggaatgttcatggtggcattattcattagcaaccacgacctggaatcaactcaaagggccatctacagaagagaagatgaataaactatagtatattcatacaatggaatagtatatagaaactacaattaataaactccaatgactgcaacaaaacaaatggatcgtgacaatgttattaagaaagcactctccaaaagtgtacatacagcacgagtaccttacacatttcaatacaattaaaatatatacatggtgtctggggtttgcttcaaaatattccacaggcagagaagggcctgaatgcattggtcatgtgtcgataattgttgaagctggatggtaagtacacaggaattcatactttttctgtttttgtgtacctttaaaattttctataataaaaagggcattttagaaacatagagagatgcaataaaaccatataaaaaaggacccgagggaagaatggacttagaaatcagaaggctcgttactgtgggtaatggaaggcagtagacggaactgcacactgcttattacattattaaaaattacagagtaaataaattttaacagttatgacgagaccaacagtgagagagtgtcatgatccaaggattacaattttatcaaattctgtgtaccagaagtacgattaaaaaattagtagtaacaacatatattttcttatttaaaaaaacatagtaaaagtttcctgatagtaatgtggaaaagaactacaagtaggttaagactgaagtgaagaagaccatgtagaaatctagtacaataggccggtgcagtggctcacgcctataatcctagcactttgggagaccaaggtgggcagactgcctgagctcaggagttccagaccagcaggagcaacatggagaaaccccgtcttctactaaaaatacaaaacattagctgggcatagtggcacgcgcctgtaatcaagctactcaggaggctgaggtacaagaatcgcttgaacccagaaggcagaagttgcagtgagccgagatcacaccacagcactccagcctgagcaacagagactctgtctcaaaaaaaaaaaaaaagaaagaaagaaagaaagaaagaaagaaagaaagaaagaaagaaagaaagaaagaaagaaaactagtacagtacaggttaaaataataaaaacctgaattcaggcaggagcagtaaagagttgatggcttttgagagatattgacaagaatcatcaggattgggtgctagagcacataatattatctggcaattattaatatacagtttttccaatcagcttcatttccataatggctatttcaaactttcccactctctccctatacctcagactaccttctctttctcctcctactcttcacctcttcagagaaaacaaaaaccattatatgagcattgcttcatcagttccaccaccgaatctatacatttatctgcatacacacccatcatttcccccttctctcctcttcctatcaaaaggcaatcagtccttctctgcactctatattccacctcctcctgccatctcaagcagcatataatatccactgcctcctcttccacttcttctccactggctccctcatcaccatgtaggaactgcacattcccctccccagttccaccttcctttcctggtgctgctaaactcttaatagctgtttacagtcactgtattcattcccaccagccattcacacccctcaaactcatactactttggattcaccaccccccaaacaactgaaacaactctccctccctgttaataaaaccatctttctttctctctctacattagaaagagatgccccctgcccacgcatgcgcgcatgcacacatgcacatcttgtaacatttggttcccttgccttcgtgacactacagtccagattttcctatctgctgctctttcccattcgcctctgtcagcccacgatcctctgtcgaccttgaactgcttttccaaagtgggggttcatcctacctcagggccccatattaaacgttcctctcctcaacctgtactatctccccaaacatttttttttttaagatggagtttcgccctcgttgcccaggctggagtacaacggcgcgatctcggctcactgcaacctccgcctcccaggttcaagtgattctcctgcctcagcctcccaagtaactgggattacagggatgtgccaccacgcccagctaatgtttgttatttttagtagagacggggtttcaccatgttgatcaggctggatggtctcgaactcctgacctcgggtgatccacccgcctcagcctcccaaagtgctgggattacaggcatgagccacagcgctggcctttttttttaagatggagtctcctctgttgaccaggctggagtgcagtggcacgatcttggctcactgcaacctccacctcccaggttcaagtgattctccttcctcagcctcccaagttaactggggctatgggcatgcaccaccacacccggctaattttttttstatgtttagtagagacagagtttgactacgctgcccaggttggtctcaaactcctgatctcaggtgatccgcccgcctcggcctcccaaagtgctgggattataggcatgagccactgtgcccggcctccccaggcaattttaaagactgaggagagtaaactaatttagtagatgggggacttcaattatcatctatatgcctactactctcaaatgtttatctccaacccagacctctcctctgagctcaagaaccacataataaaactgcagtctcagtatctcctcatggatggctcacaaacacttctaattaggtctgcatgtccaaaactgaacgtcactctaaatacactcctacattcttcgtctcataaacagcaccaccagccaccccacagatttcctatctggcatctcctttaattcccccatctactaaattagttcaccctcttcaatgattcttctaagttatcctcaaatctatgcatttctgtccatctccattgctacccccagtatgaacatcgtctgtcccttaaactgttagaacagttattctccctacagtcacactcacaccatatccgtttagtctccaaagaggaaatcaacatggtatttaaaaagcaaaacaaaacaaaaatacatccaaatctctctatgacacttccatatttaaaatccttctatagcttccaattgctttttataaaaagcccaaaatcctaaacacagcccccaaagccctgaaagataaggttcctcctacccgtctagccccactatgccaaactccaagaatacaagacttttaattcctctaacaaatcaagttcctgccctcctcaggacctttggacacactgttctcctgcctccaacactctccttccacattcttatctggctaacttctacacaccccaagttaaatgtcacctccttgacttttacaccccatgccaaagctaagttaggtccctttctaaattctcagaacactcggtactttctcaattatttccccattcaggtgactatcagtttaatgtctggtgtttcaatggtctgtgagctccacaaatgcagtgatcgtgactttcttgggcatccaacgctaaggaatgtttgatatattaatagcagtagtttctcctaaacactcactacgtccaggcattcttcaagcagtcaaacgcagcaactcacttagtcctcacaacacatcctgaggtaggtatattacaatacctattttacagatgaaaaaaacgataacagaaagatgtcagatcatttgcacagggtcacacagtaagtagtggagctggaatctgacccatcagatgcgtatttttaactactgccctctgttcctccacatattgacactcaaatatctgatgaatgaatgagcggataaatcaaagaactggatatggaaatggaaccaacctcactcgtggctcccattgctatcaccagagtctaaaacaaagacttgccttacagctagatgaccacaagagtttcttagcaagttccctaacttctcttctccaggaactgttagaacagttattctccctatagttcttcctaagtactttcctcatcttgttaatctgctgttcaatagctagcaatgatccctgtgacctatgaagttaactacaacctcctttatatgctctaccccagcaatgacctcttctatcaycatgcctgttgattctattttatttatcccctcatctccaacgcctaccacacatactcgyatttaaatatatgactatactcttacgcttgctgttctctctctagttttcttctcactccaaatcaaatccactcgtccaagactctgctcaagtatcccaataaggcattgcaaagtaatgtaaccaattcttttccaaactcatgtgtcactcaaagttagcaccatttagtttagcactttctttttgttttggagacggagtctcactctgtcgcccaggctggagtgtagtggcacgatctcagctcactgcaacctccacctcccagattcaagcaattcttctgtctcaacctccctgtaggtggaactacaggcacacaccaccatgcccggctaatttttgtatttttagtagagacagggtttcaccatattggtcaggctggtcttgaactcctgacctcaggtgatccaccctcctcagcctcccaaagtgctgagattacaagagtgagccaccatgcccagcctaatttagcactttcattgtctaagctctttgaagacctgactcacatttcttttttaatcctgcaaaatttctaatacaattgttccttggtatccacaggggattagttccaggctcatggacatcaaagtctgcagacactcaagtcccttttataaaacagagcagtgtttgcacatcatctgtgcacatagcacatcttcccatacactttaaatcacctctattacttataatatctaatacaatgtaagtactatgtaaatggttacacgatgctgtatttttgtattattttttgttcttgtattgttatttttaattgtttttttgcccaaatattttcttttttttttttttttttgagacggcgtctcgctctgtcgcccaggctggggcacagtggcatgatctcggcttactgcaagctccgcctcccgggttcatgccattctcgggcctcagcctcccgggtagttgggactacaagcacccaccaccacgcccggctaattttttgtatttttttagtagagacggggtttcaccatgttagccaggatggtctcgatctcctgacctcgtgatccacccgcctcggcctcccaaagtgctgggattacaggcgtgagccaccgcgcccggcctttcccaaatattttcaatctgcagttggttgtatctgcggatgtggaagccagagatgcagaacctacaggtatgaaacccataaacagggagggccaaaagtacatgaaggaagaactcaacatttaccagcttactgataaataaactaaaaggatgaaataattatcgtaagatcctaggttgtgtcccatctataagaagctaaaattccaggctcaaaaatacatgtattttgggaataagtcatgagaagtaatggtgaggaagacctttactgggaaaaaacagtgaacaggaagagaagactgaaagttgagaactagagtaactcacaaacagaagcaaccaaacattcctccagtaactcagccaggtcagctttacatctaactaacagaagaattctctcaacaatctcttctcttctgacagtactatgagagaattaagactctccgaataaaacaaacccacagaggactagaaggatggtgaggaaatttaccctatcttgaaaataagacttcccagatccacaagactattttcaggcaaatctccttgtctttctaactcagattaactcaaaggttatatgggattcaagttctatggtgattaagggaaggaaaaacaaaacacaaaaagtaagaattctgaaaagtgtaatggggcagaagggtggacccaggtccgtggtcattcccttcatcctgcccagtgcccacccacaggtaaagtcatcgccactaacctgatctgcatctgcatgaactccaggagactgagcagatggcacctcctgctggactgcagccaccgccccattaggcatcaggatgagttgggaggctagaggcacattccgacccagggttcggtttacctgcaataggtttcccagctgtggctggcaaggagaggaagaggaagagcaaagaggmcaagagggaaagaagagacagaagagatggaaaggaaggaccacaagacaaaataaacagaagatattaaacagctgagccctgcctcttccacaccaacccaggagcctcatattctccacatgtaatgaaccatccagaagaaaacctagaawgcatagaaaactacagattgatgtcmaagagtcacacgtcaaagaaatagagaaaattaggattttagaacaagtacttatatatagaaagtaggtaggctgagcgataacacagaatttgtatacttgagccacaggtttaaaggtcgactatatctaacactaatttagtcaaatgttaagccagtattttctagcataatatctcaatttaatctataggctacctgtgaacacagaacatcacttccaggttaagtaaagtatgggaagtaggtcccagcttctctcaaaacatcagggttaccatggtttaaaaaaatggcttttggccgggygcggtggttcacgcctgtaatcctagcactttgggaggccgaggcgggtggatcacctgaggtcaggagttccagaccagcctggccaacatggtgaaaccccgtctctactaaaaatacaaaaattagccaggtatagtggtgcatgcctgtaatcccagctacctgggaggctgaggcaggagaatcgctggaacctgggaggcagaggctgcagtgagccattattgtgccactgcactccagcctgggtgacatagcgagattctgtctcaaaaaaaagctttcactcaagtctttgccagggccagacaattatgcctctggggcaatggtgactgcatctgtggcttacccgtagatacatctgggcctgagactggttgaggggtggggaggtggtgttccccagtagcacagattgggtcaaggtrgtagcactrggagagctcacactctgggatcggctgatgagctgggcggccgatgtggtggccagattgatctgtgtggtacagaaaggaaccaggactaaggatttgggagaagtaaaaggaaaggtacgtgactgacaaattcagagtcacacagtcaagaacagagtatttcactttcatggagccgggggaaataaataatgtcttcatatccaaaactgtcatcctggctactttagggtattaccaaagtgaaaaaaaaccaacagtctctaaccactagtgttaacagttgagaagacaaaagattgaaacagaacagattttacttctcattgaagagtccagggattagtccccttctttgttatctcctcttcttccccaggattttctttcctctcttccttagacttcctctttagagactccaatatagattaatgttggttactttccccttgtactactattctctacttaaaagcagtaactatccactgacggctcaataaacactctcagatcagcggcacaaagtaatttaacccagagacaaagacccaggtagagaagcctctcagtgggagagggcgtactcaccgaggcctgggtggtggtagtctgctgctgtgtagtgctggtgtttggggagctggcctgccgactggcagcaattgtggcctattaaaggggaagggaaacaagaaatagcaaagacagtgaaggaaaaagctctcagtcttctagtaataaatcacaagcacaaaacatagagatttcacattataaacagggagattccactttagggtaaagaaaagtatattcactagtccagtgatcctcacattaccacatatgctaaccaattagccccacataaccctcctggggcagagaggcaacttgtcctccagctcccactctcttttaggtggaaaaagatggtattttttttgagaaggagtctcgctctttcacccaggctggagtgcagtggcatgatctccgctcactgcaacctccgcctcccaggtttgagcgattctcctgcctcagcctccagagtagctaggatcacaggtgcacaccaccacgcccagctaatttttgtatttttagtaaagaatgagtttcaccatataggccaggctggtcttgaactcctgacctcaagtgatccacctgcctcagcctcccaaagtgctggcattacaggcgtaagccaccacgcccagctagaaaaagatcttttggtcargtcatatcatgagtcagtaaaagtctagtccagaggtatccaatataaatataatatgaaccacatttataattttctactatgcaaagttttaaaaagtaaaacaggaaaagttaactttcataatttattttatttagcccaatataaaatatcacttcacatgtaattaatatttttaaattactgatattttacctttttttgtactaagtagtctaactctaaaatcttataggacgtctccatttagactagccacatttcaagcactcaatagcgatatgtggctagtgactacgttattagacaatgcaggtctataacacagccactctatacctaaaaagtgattttacggttcttactgcaaccccagaagctaagatgcatccatcctcccacagaaggacaggaggcggaggaggctgtctgcagcctggcttagtataggatgctatatgcccaaaaaatctcccctacccacctgtagtgcctgtcccctccctctcgggccagctggctgctgacctctcacctgctggacggcagccaggctatgcagctgggcattactgagctgctgctggagcatgaactggtggaaatactgagctgcattgggctgccgctgcagtgcttgcagagcctaggaaaagagaggataaaayatttagaatggaccactcctagctcctattctatgtaaatcactgtatttgtgtgaaagggggccatgggaaggacagaaaccagaggagatgggagtttgggctaaatcgtcaacggctgattttccttcatttttttagagcaaagtcaacctgctctatcaccaggctggagcacagtggcgtgatcatagtttactgtaacctcaaactcctaggctcaaataatcctcctgactgcctcaacctcccaagtagctaggactataggtatgcaccaccatgtccagctaattttttttatttttagagatggggtcttgctatgttacccaggctggtcttgaactcctggcctcaagagatctttctgagccaggcgtggtggctcctgcctgtaatcccagcactttgggaggcctaggagggcagatcacctgaggtcgggagttcaagaccagcctggccaacatggtgaaactccgcctctactaaaaatacaaaaaattagctgggcgtggtggtgggcgcctgtaatcccaactactagggaggctgaggtaggagaattgcttgaacctgggaggcagaggttgcagtgagatgagattgcgccattgcactgcagcctgggcaacaggagcgaaactccatctcaaaaaaacagagagatccttctgcctcagtaagtctatatagtcctttaaaaaccggaagaaacaattacagccatgcaccacatatccactgtttggtcaatggcagactacatacacaggagtggtcagagtaacagcctatactgtataacctaggtacggagtaggctacataatctgggtgtgtgtaagtgcgctctatgacagtcacgcaattacaaaatcgtccaacaatacatttctcaaaacgcgttcctgtcattaagtgacgcgtgaatgtaattctatggtttattctccataggatgttaagaaaagtaaagcagtgcaatttatacaaacttgtttctccaattgggagctggaaatacatgccatagcaaagactagatcgggtgaaaataaacaaaatgccgattaatgtaaagaaaataagaaaaaaagctgggcatggtggagtgtgcctatagtcccagctagtcaggaggataagataggagaactgggagtctgaggctgcagtgagcactgatcgcaccactgcactccagccagggcaacagagctagaccttgtctcaaaaaaaaaaggagaaaatgtaaaagtatattttaggtatacagtaaaggtaatacagccctaatgggttggaaataatgaaaaaataaatagtggcttctaaagattccttcacgtaaaattttcaacgaattcaactaattggcatttttacatatcagtatgctaatacagatttatgaaatgaaaatagtagtttggttttagtgctaactggactttactgtattcttattctttaataattagaactatttttatgatatgtatagttattctagtaaccaaaatatttgctaaaagacctcatttcctaacagaattaataaaaacatggaatttgctgtttgtttaaaaataaatctctaaagagttccatgatacttctattactcaaggggatttacaagaatggccaaagattaaaaacctggcaatccagtatgagaaagggttagttagaatctagctagatggactgaatgtgttttttaaatccttatttgaaagaccrgatttcactgtttgcttgcctaaacatttgtaaactcctaagattctcagagctggaagacagcttagtcatcatctaacccaactctccccagtttgttgaaaaagaactgagtacaattattttccagcatcactgcctaccacaagccaagactcacagaccatggcccctcagagctgagtctcacctgcactgcttgtcgttcatawagtgacatttgagctatctggggccgagagctgccccctgagctagaactcccattggtggaattggagttctgctcgctctcagtctccatgatagtggtccagggtccccaaggctggtgctctgtctgactcaagacctagagggaagcagtaaaaggttaaaatttatatcttgatcccaagctgttatctcatgttattattcaaaaacacaggaaatccataagtatctaagaatcttcctcctcttccataagccatgatttctcatcttaaaactcccaaatcttcaatacactcttgcaaccatgtcttcccaatactaccatcttttgaagctatgcagtctcaaaagaaacaacctttacgtattccctcatggctgtcattaaataaaacggccagaatgtgagatggcaccttacaataccaaagttaccttacattcccatagcattttttaacagtttaaaatctttccacttaaaagttttggttatctcatttttgtctccatctgcatcgttatcatccaaatgagtcaccatatactggagagccactagttgcctcctttcactgggctaggcacttcacctatgctgtatctctctcatagtagtgctgtaaagtcaacactgttatcctcattctacaatttgagacataaggttttctgaggttaaagaagttgccctagtaagtatcaagtctttggactaacacatgcttcttcaaaccaaactgtaattaaggcagtgtcattcactatgatagtgagtagttatcctcattttatggaggaggaccttaagatacagacacattcagtgggtcatggaaggtcataaaactaggaagcagaagagctcacctacagcccacatagcccaaatagctgcctggttccagctcaggctactaataacacctcaggcatgttgctttccttccttatacctgtttcctcactgcaaagraggcttcatactgaatgtaatatatcattttaagaaatgactccggrgtatgaaacatagaaatacacacaatgaaaatcttcaagaaagtaagatgcaactttataatctactaacatgtcagaatttacccactggggactacacttacatttgcaaaaagacacatatgaaaacattgctaagaaccaagcaaagaggcaggagatgagaagaagaaatattcttccaaagcagcactaaatgacaataaggtttttactcattctttttttttgtttttctcttttgttaagctacacactattttctctacttctgaggcactgggccactagaaatatcaggtcaccaaaatattatctggcttaagaatataaacatcaaaccagaatttctgctaagtgttgtcaacagtttcattagggtgaatggactggtcttagggattgcatccaaaacaaacaaacaagcaaagtatcaaactgcttggccttggcaataaagctgaggatatttcttattatctcattcccagtatcatccaatcacactattatccccccccartctttagtttcatttaggactagcaaatgtcactgcaaacatgtatatyacccaaaaagtacataggaaaaatcatatcagcttcaactagtctaccttctccccacatcttttgccaaaatatcaaagcactaaacagatacagacccatgaatcctcattatcagcatgtgaagaaaaaaagtgggtaaggattagaggcagcacggcacagttttatagattactggatttagttcactggactcagagacacgagacccctttgctaggtatagagaacataattcctacattcacatgtgaaaatacaaaccgtatgacccctcgtcttcccaaamctgaattctgattaataattttttttggattgtsaactagaaataaaaatgtaaagggaccaacttaaaagtctcaataaaatcaagggaaactgccaccaaaaccaggattcctggatcccgggcacataaatgtattcatttgtgatcaacattatgactacaagattaaatataaaaaaatggagacaacaaacagtttgggcagcaccaggtatcaaaattttccaaattaaactggaagacagtgagaagctgatccacagatgcccccagagtagctaagccatggtcatcttaaaaggtagcatgtgggcatacatggggttgggtaggcgcacagacctaccgaagggagttagaatgggacattgaggtggacttagcattgggccgagagttggagaaagtcaatatccctaagcacgaaactcttatcatgcagaaaggatgggacataggaagggggacgggagaagggggtggttcagggaagactgtgccaaagacacggtaataatcaagagaacagggagtagacgcccaagggtcctcgttctatatagaaccttgatgaaaatgatgtttcaaagagaaatcaaatacactgggggaagggggtrgatccagtggtgcgccgggaatgaactgacccaagtgagctgggacatgtgcatacagagagcagaggcagaagtcaaggaactggaggctgaggaacccagcggaccacgaaagcagggagataactagacagcatgctcggctggaaggaccaaagtcagagaaggaaaaatgaataagaaaatgagcagtcagaggcagctarggtgacggacagacagcatgaagcgcagcagaatgaatagccagaagactcggacaggcagagccgaaggaccgcagagctcagcgccggaggtaggcagggaaagcaactgggggaggtacctggggcgttacacagatggaggtggctgaggatacatccccgcgcagccaagcccccagaggtcctgcccctccccggccctcggtcgcccggttaccttctcgcctggctgtgcacccaagtcttccccgggggcgtccacctcatgtgccggggtccccagtcgccaggctgggctgggggctcgctcggcctccgcggcgggctcccctcgcctcctccccttcctggaggggcgggggcgccgagggcggggtgggaggcgcccggcgcgaccgcggctccccgcccctcccgccgctccgggtgcgggcccggccgcggctcagccaggcctccggggctcgctccgggcctgtcacttcctgcccggccgagaaggtgggggccgcaggccaggggctgcgggccgggctggaggagggggctgcggggaggtgcttccggggcagccggaccccccccccgccgtccctccgcctcccctcggcgccctccgccccctccctcccgcgcgtccctcgtttcctgccggcgcccgttgccatggcgacgcagctcccgggcctctgcgctccaggcccaggggttttttcctctcttgctctctttctcctcttttttacccccttctttctctccgagttctgctcgccggttggaaggacgaaactaagaaagtgctggcctctagtggggaacgcacctctcggagaggagagggagatgggagaagggagggaagtgacgtgagacggggagaaagaaggtattttctggagctgctgggaataaggggtagaaagaaaggatcaaagggaccaacagacagagagggagaaagagcaaagcaacgacccctagagaaacgatagactgggaaaagaaatgaagcaaaggaaaggaargaaaaggcgagaaaaactttgagaatgagagaaaggagagagaaggttgattgtttaatccctcacctcaactccaagaaggcgggaaagaatgctgcagaaacagctaacccattaggagttgacttcattttcaaagcagcaacctaatgtaacttcctttggatagcatttaagtttgtcatttcagggatttgtgtgtgcttcgatttcaatatgtatatgagttcgaatgacaaaaacgggaaaaggccagagtataacgagatgtagaacaatggggctgtctctgggaacactaaacatttgataggggagccgttgtcgttgtatttatgatatcaacttaccggtttttaattactctctcatcgttcaacattcaataaatatttatagagcgtctactatgtgctaaaccgtggaagcttggattgcatcagtgcacgaaacaragataactgccttactgccttcattaacctttacagaagggtctgggggatgcctcgtggattaacaactgggattgatgccttttctcttgctctcagtcttttcctaacctctatcctaaacagttattttctctgtcaatccactcttccttttctcctttaaaagcccatgcatggtttgtttatagagaaaaaaacagaagtgttatctttgcttataaattatatccatttagattttgctttgagagaggagtatttggactycaaggtctttcatttgtggcagccagattaaaatcggagassaatttctgccaggcttctagkaactagtcagacaggtatgtgagggaagaaaccggagggcagccaaaggactggaaaagcgaagacacggggtatgaggaggtgaaagggtgtgttaccaggccgtggatgacaggcactggctgaggatgatttgaaaagattctgactggtagaactagtggtgaaaacgaggtaaagcattcgttgtttaattcacacctggatttttggcatgtcaaagcagttaaagctttcttgcagaagtttagaaatggatatcgattgagcctaggcggaattttctagcaccaatggaaaaaaaaagcatctatagataattttcagattatacaacattaaagttaagaaacatgactcatgtgcttccttagtttccctgggagaattatcactgttaagtgtctaaagaagatttgtaagctataacaagaataaggaatgcagatatcagagggtatggacttgtttttctatagcctrtggaacttgtgtaccaaragggtacatgaccatatcgcatttcaccctccttacaaatggagcagaattaccgctactgcwtatagttacattccacccctaaagatttttttttwttatttactaggtcaccggctcctatagctactagataatgttaggggataagmgatgaatacttttgttgagtgcctgttataaatttagcctgagaataatctatcatgaggcgagctatactgattatgggccagtagtttaatttttatatgtaaaggtgtgtgctccatatatcacaggattcttttcaagttcatttttctccaagtcaggccagtgttctaaggtcataggtctaaacagttcccaccaaaaaagatttagtataaaaaagaaatatatcaacagcaaagtaaagktataggaaagcctccatccataagaaaatcattttcatagactaaatcagcttgagagcaggcattgaagaacttatctcggtctaaacagcaaaacaatctgtgttccctagagaatactcaacttttttttcttaatttttctaaagtttctcattttcatttaatgactctgcttgaattagacttttctttttcaaacaaaatggttcttctgaatggaggctacagaatgtctttactctgcataacactgaaggccattagcctaaacaggtgagaaggaaaagcatttaatccgrtgtatggaaatggaagccctcctgcaaacttctctaaataaggaaggatcctggtttgaaaggctgtcgatgtttggcagcaactgaagcaaatagactagaagttaagctaatagaacttttcatatcaactgaacattgcttaagcattcctcaagcttctcctgtaaacctagcattctgcaataaattgtgaaggaagagatgtcctttaccctaaaggtgttagtatctttggaatgtgtcyttctacaagtaatcaagtaagaatgtgtgaccatgtttttatgcaaatatggataggaagaagtagagaaaaaaggaaatcataacctttactctccccaccaccaactgtggctgtgaaccaccatacacagcccacctgtgtctcactataattctgcatgccactttaaggtctagttgggagaaaatgaagattgagtggatttataggctcttagatatttaaaggaaaaaaaaagaactttaaaactaagcccctcagttttcagtgaagacrattgaagtctaaatgataaatgtagaagagggatatttcgtaatccctggaaaatagaaaatgtccaataaatattagttaactgaattaatttcctagattcttgcccttctctcataggaaaagaatatgaaattaaaagatataaggatacctctcatctctcgctactaatacctaccatagatcctttcttcaagcagaagtttaaaattaacatactaattggttcagcccaatattccatccatcattgcccgcaaaagatatagaagtacccctacatccttaaggagcataagactgacgataacatactcttcatcagtattgacagttataatgatggcaagttatgcacctttccttaactttggtttgctttcagtaaaacaggggtaacacctggtagttggtggaaataagtgagatgtttgtaaagcacttcacattgggacctgacacatagcacaggctattattaattttccttagtaactaatatatttttgtgatcaccaaatagaactaaaccattctttatgttttattcagtttacatcacaaccttattaactcacaatttagttgagtttatgcattaattagtttagtgaacttactattattttatatracaaagagtattcccttccttgtatactaaatttacctctttcgggcttcaggtgtgtcgtcttgtctactatttcagtatttagggagcaaaaccatgttgggaccaagcactagatttataccctctgggattatgtgtcctaggcccagagarccaggtacctgggaaaacatctaaagggaaaaacaattcaaaatatacttagagcctctgctcatggcctcacatgcattattgcattcaactcaataaccttttctgctagctgtttttaatccttaatttatagatgaggaaattaaagctctggaagattaggtaaattgctcaaggttcataggtgtaataagtaatggagtcagaatttaaattcaggtctgtccatcttcaaagctcataactacattatatccttcacagtgtgaaaatagagtgatgcaaaagatctatttaaaatgcttagcacacacataaacatttgcacaaagaagcttggcatttgccatggtaaatacctgcaatggaaggccactctgcctttgttaactagagaaatagctctagttatcagtctgtaaagacactgtggagatgtctcagcagaaaatagagatatatatattatttccctaaattggctgttttctctcttgtctactgataaactgtggtaagcagaacaatgcccccccaccaaggatgtccccatctgtgaaatctgtgaatacgttatgctccatggcaaaaagaaattaaagttgcaattggaattaaggttgttaatcagttgaccttaaaatagggagattatcatggattaccttggcaacccagtgtaatcacaagcrtccttaaaagtggacgagggaggcaggaaagacaggttcagtgatgtgacatgagaagtatttaacctgtcatttctgtctttgacactggaagggggccacaagccacgtaaggtgggaagccttcagaagccagaaaaagcaaggaaatggatcctccccagagcttccagaaaagaacacagacagccctgctgacaccttgattttcacccagtgagacgcatgtcagacttctttctttttttcttatgttatttatttatttattttaatttttattatgttctttttgagactctttttgagtctcactctgtcacccaggctggagtgcagtggcgtgaccttagctcactgcagccttgacctcccaggttcaagcaattctcatgcctcagtttcccaagtagctgggattacaggcgcctgccaccatgccccgcccagcctatttttgtatttttagtagagacagggtttttgtttttttgtttttttgtttttttttttgagacggagtctcactctgttgcccaggctggagtgcagtggcacgatctcggctcactgcaacctccacctcccaggttcaagagattctcctgcctcagcctccagagctcagacaatccgcccgccttggcctcccaaagtgttacaattgcaggcctgagccaccacgcctggccttttttctttttctttttctttcttttctttttttttttttttttgagacagagtttccctcttgttgcccaggctggagtgcaatggcacgatctcggctcaccgcaacctccgcctcccgggttcaagcgattctcctgcctcagtcgcccgagtagctgggattacaggcatgcaccaccagccccagctaattttgtatttttagtagaaacggggtttctccatgttggtcagactggtctcaaaatcctgacctcaggtgatctgccctcctctgcctcccaaagtgttgggatttgggaggcgttagccaccgccacatgtcagacttctgacctacagaactgtgaaataatacatttgtgttgttttaagccactaaatttgtggcttattgttgtgtcccaaatcattaccagtggcaacagaaaactaacatacaacctagtgtaggmgaggaaaacttccttctactctcttaggttctgcagctggtttaagaattaaactgacaaattagctaatcccagctactagggaggctgagaacccaagaggtgcggcggttgcagtgaaccagaatcatgataaaatagattaaggccgggcacagtgggtcatgtctgtaatcccagcacattgggaagccgaggcgggtggatcacctgaggtcaggagttcaagaccagcctgggcaacatggtgaaaccctgtctccactaaaaatacaaaaattagctgggcgcggtggcgcgtgcctgtagttccagctactcgggaggctgaagcaggagaatctcttgaaccagggaggcagaggttgcagcgagcctagattgtgtcactgcactccagcctgggcagtgagactccgtcacacacacagaaaagaaaaaaacaggccgggcacggtggctcacgcctgtagtcacaacactttgggaggctgaggtgggtggatcacgagrtcaggagttcgagaccagcctggccaacatggtgaaaccccatctctagtaaaaatacaaaaattagccgggcatggttgcaggcacctctaatcccagctgcttgggaggctgaggcaggagaatcactttagccccggaggtggaggttgcagtgagctgagatcgcgccattgtactccagcctgggcacagagcaagaccccgtctcaaaataataataatactaaacaaaataacagattaagaagaaaaaaggatataaatgcatttaatatatttacatgtacgtgggagacttcagaaggaaaatgtaagacccaaagaggccagagcagtggctcacacctataatcctggcattttgggaggccaaggtgggyggatcacctgaggtcaagagttcgagaccaacctggccaacatggtgaaaccccatctctactaaaaatacaaaaattagctgggcgtggttgttcatgcctgtgatcccagttactcgggaggctgaggcaggagaatcacctgaacctgggagatggttacrgtgagctgagattgtgctgaggcaggaaaatagggtctggaggcagggagcrtaaggccaattcacacttaagctaaaacaggaaatagcctctccatctggcgtttgccataaatgactttgtaactttatcctcttcatttacataggacataccctgagtagagggtatttaaactcagaaaaactctttaacagtgcctgagtccctctgctcaggccctttcccatactgtggagtgtactttcattttcaataaaatctttcattccttccttgctttgtttgtgcattttgtccaattctttgttcaagatgccaagaacttagatatcctccacyrttaacatattttggcaagccagccaggagggagaagtaagcccaaagtttgggattcattttccctttccttcctgctccatccatggagcagaccttgggactttccaacttgggaygcttggtggaccgtgcctaaacatggaagcaactgcaggtttctggccgtggccagtgaaactaaggggtttccatgtggagaagcctaaccgccactgcccagatcacttaaggaatctgggtctttatttatgtttttttcttctctttcagtcttacagtggctgtttcttagtagctccttgaaattgagggcaattgtctggggtcactccctggtactgcctgaaggccgaggagcgaatgggaataattacccctgccccaaagtgggaaggactttttaaaaaaaatattttccacgcatggtccatgatctctacctgctgtgcggctcagagcaaacttgcacatatttcaggcaacttaaacctccttttcatatgctaaattcttcccaggtcgtactctactggctaaggaacaaaagtctcacccggcatccagttctcattacagttcttggctattcttataaatctcatagtatgctttggaaggaaaacctgcatttgatgcacccacctaaggccagtgatgtctggaactctaagattggattccacaggaggatgctctgtgggttctgcggacctcaaactctccaaagaggaagctgttggcagaggttctgaggtctagtattaaaccctccttagaattttctcttgcagaccgggcacagtggctcatgcctgtaatcccagcactttaagagcccaaggcaggcggatcatttgaggtcaggagtttgagaccagactgaccaacatagtgaaaccctgtctctactaaaaatacaaaaaattcagccaggcgtagtggcgcatgcctgtagtcccagctactcaggagactgaggcaagagaatcgctcaaacctggtaggcggaggttgcagtgagccgagatcacaccactgcactccagcctgggtgacagagccaaattcggtctcagaaaagaaaaaaaaaattttttcacagttgtgatgctgcttggccccaaaattgtttagaatctgaaatttactgtctaatcagaaagtgggatggcgttgcatgtatccaggcttttgtgctgctgttctaagcagggggcctggttaacatgtgacaccctcctttggtactgtttggccccggtgctccttgaagtctagggaggctgggaggctttagcccttcaatatcgaactgccatggaggctgctttacctgaaattttggttcagagccgtccttgtattttctattaggttgaagtaaaaccgcaagcttgtattgctatctcgtggctaaggttccaaggtattggatcttcgttgatgtatgtgtatacatgtctagatgtgtttatttgtttgtacacttactgttatatgttgtgtctaccaaattggcttataagtaaaagtgcgctcataaatcaagtaaataagtctaagcaattttcaagttcacgtgacttaaagtgtaacttaacaagctagctttaaaattattggcagaataaaaatagaaatgccttcagaattgtccgcataccttccaccgttaacagcgccactgcattccagcctggatgacggagagagactctgtctcaagaaaaaaaagaaaagacccaaagaggcaattgcttgaacctsggaggcagaggttgcggtgagtgagatcgtgccattgcactgcagcctggrcaacaagagtgaaactccgtctcaaaaaaaaaaaaaagaaaaaagaaagaaagaaaaaaatacaaatttataaaaaaccaattcactataacaacaacttacacagcatttacattatattaggtataagtgatctagagatgatttgaagtatacaggagggccaggtgcagtgactcatgcctataatcccagcactttgggaggccaaggcaggtggattgcttaaggccaggagttcaagaccagcctagccaactggtgaaaccccgcctctactaaaaatacaaaaattagccaggtgtgataatgcacgcctgcaatcccagctacaggctgaggcacaagaatcacgggaacccaggaaacagaagttgcagtgagccaagatcactccactgcaacccagcctgggtgacagcaagaccctctctcaaaaaaaaataagataaaaaaaatgtatacaggaagatgtgcataacttgtatgcaaatactatgtcattttatataagaacatcctcagatttttgtatatgcagggggtggcaactagaaccaataccctgtggataccaaggaactactgtatacctttttacacaaagaattataaattatggggatgtgacaaaacaaaggggcttggtgtaatggcagtaaattgtgggacagtgactaggaaatataaagggggaaccagtggaagttaaaggttattttagtaagactatttgcatagatctatttcagtgtcagttccctttctatggtgataagaatgttctcttccttgtacacagagggcatgtttctcatggaaaattgtatgacctgctttcaggtagaaagggagaatcagagagcttttcctgcatcagctgtttctccagtgtcttcagctcaaatgaatatgccaaaacaacatattttggggtggcataatctgaagccctttatttatttttcaaaaagcagcaagcagctgaacgttctctgctgcctgaagtttagccggttgccaactgtattagtgcgctggcaacagggaaattcatgttgtcacagggttggactaatcaatgggtaagtactcaggtatcattttgagtggcagcattttagttctgtaaaagtgatattaaaatataattttcaaaaagctagaatcataactcatgcaaatataaaacgaacacgtcaaagattttatacaacttattaattaatgaaagaatctataagatatcaaaatcagttcaaagtgcgtttgagaagcatgggtgtttctaggcaatttaacaaaggaatgttagtgagattgctgtattggatacaaaagtggttaatgtcctataggaccatgaaacataaccttcaggattatcctttccaccaccagacagcagccagttgcagctatgagttaatctctgcctcttctgacttgtgaagtgactgaattgatgggaatcaatcaaagacacaagcccagtattgaactgaaagaacacctggtaacctcttccttttccaactttcagaggatatctgtggcaactgtaaatctgactaaggaaactgttagagttgccagagtccgagaaaatggatcaccccatcagtgcactctgcctcagttctttttcttgacgacactggagatagccagtcatcacaccttcagcaaacctgctcctcccttagacttccctgatttggaaagtggcaatcccaattgcccaagcaaaaaacgttgaagtcattcttgactcttctctttagatcaccccctacatctgagtcayccatttattcaatattcaacaaaaatacattgagggcctcccctaagacagtcacttttttttctgtcatgggtggccatcagtagacaaaacagacaaaatgtttaccctcatggagttcacattgtagtgggggagaaaacaaacaaatcagtaaaatctaaaatccatgggaattcgcatgatgagaactgctatgggaacatttttttaatggaaaaatgtcaggagaattggaagatggggcttagaattttaacagagtggtcagggaagacttcacagagaaagtggcatttatgaagagatgtaaagggaacaagagagggggcatgtgtgtatctgctccaggtggaggattgtgtgcccggtgtgttagaacagcaagcagagtgtgcctggaccagagtgagtgagatggtttagctgtgtccccacccaaatctcaacttgcattgtatcttccagaattcccacgtgtgggctgggcgtggtggctcaaacctgtaatcccaacactttgggaggccaaagtgggtggatcaactgaggtcaggagtttgagaccagcccagccaacatggggaaaccccatctctactaaaaataccaaaaaaaaaaaaaaaaaaaaaaaattagcagggcgtggtgacaggtgcctgtaattccagctactcgggaggctgaggaaggggaattgcttgaacccaggaggtggaggttgcagtgaaccaagattgctccagcctgggcaacaagagcaaaactccgtttcaaaaaaaaaaaaacagaattcccacttgttgtgggagggacacaaggggaagtaattgaatcacgggggcccgtctttcccatgatattctcgtgatagtgaataagtctcacaagatctgatgggtttataaagggtttccgcttttgcttcttcctcattttctcttccactgccatataaggagtgccttttgcctctggtcatgattctgtggcctccccagccatgtgaaactgtaagtccaattaaacttccttttcttcccagtctcaggtatgtgtttatcagcagcatgaaaacagactaatacagtaaattgataccaatagaatggggcattgctgaaaaagatacctgaaaatttggaagtgacttaggaactgggtaacaagcagagattggaacagtttgaagggctcaggagaagacaagaaaatgtgggaaagtttggaacttcctagagacttgaacggctttgcccaaaatgctgatagcgatataggcaataaaatccaggctgaggccggatgcagtggctcacgcctgtaatcccagcacttcgggaggcccaggtggacagatcactgaggtcgggagttcaagaccagcctgaccaacatgaagaaaccccgtctctactaaaaatacaaaattagctgggcgtggtggcacatgcctgtaatcccagctacttgggaggctgaggcaggagaatcacttgaatccaggaggcggaggttgcggtgagccaagatcgtgccatttcactccagcctgggcaacaagagtgaaactccatctcaaaaaacaaaaaacaaaaaaaaaatccatgctgaagtcgtctcagatggagatgaggaacttgttgggaactggagcaaaggtgattcttgttatgttttagcaaagagatgggcagcattttgcccctgccctagagatctgtggaattttgaacttcagagagatgatttagggtatctgacagaagaaatttctaaacagcaaagcatccaagaggtgacttgggtgcacttaaaggcattcaattttataagggaagcagagcataaaagtttggaaaatttgcagcctgactatgtgatagaaaagaaaaacccaagccagctgcagaaacttgcataagtagcaagaagcctaatgttaatccccaagaccatggggaaaatgtctccaggccatgtcagagaccttcacggaagtccctcccatcacaggtccagaggcccaggaggaaaaagtggtttcgtgggccaggtgcagggtccccatgctgtgtgcagtctagggacttggtgcactgtgtcccagccactccagccatggctgaaaggggccaacgtacagctcaggctgtggcttcagagggtggaaaccccaagccttggcagcttccatgtggtgttgagcctgcaggtgcacagaagtcaagaattgaggtttgggggccgggcacagtggctcacgcctgtaatcccagtgctttgggaggccgaggcaggcagatcatgaggtcaggagttcgagaccagcctggccaatatggtgaaaccctgtctctactacaaatacaaaaattagctgggcgtggtggcacatgcctgtagtcccagctactcaggaggctgagacagaagaatcgcttgaacctgggaggcggaggttgcagtgagctgagatcgcgccactgcactccagcctgggtgatacagcgactctccatctcgaaaaaaaaaaaaaaaagaattgaggtttaggaacctccgcctagatttcagaagatgtatggaaatgcctggatgcccaggcaaaagtttgctgcaggggtggggccctcatgaagaacctctgctagggcagtgcagaagggaaatgtggggttggagcctccacacagtccttactgggacaccacctaatggagctatgagaagtgggccaccgtcctccggaccccagaatggtagttccactgacagcttgcaccaggcacatggaaaagttgcagacactcaatgccagctcgtgaaagcagccaggagggaggctgtaccctgcaaagccacaggagtagagctgcccaagaccgtgagaacccacctcttgcatcagcatgacctggatatgagacctggagtcaaaggagatcatttgggagctttaaaatttgactgctctactggatttcggacttgcatgggccctgtaactcctttgttttggccaatttctcccatttggaatggctgtatttacccaatacctgtataccagttgtatctagaatgtaactagtttgcttttgattttacaggctcataggcagaagggacttgccttgtcttggatgacactttggactgtggactttggggttaatgctgaaatgagggccgggcgcggtggctcatgcctgtaatcccagcactttgggaggccgaggcgggcggatcacctgaggtcgggagttcgagaccagcctgaccaacgtggagaaaccccggctctactaaaaatacaaaattagccaggcatggtggcacatgcctgtaatcccagctgctagggaggctgaggcaggagaattgcttgaacctgggaggcggaggttgcagtgagccgagatcgcgccattgcactccagcttgggcaataagagtgaaactccatctcgaaaaaaaaaagaaatgctgaaatgagttaaggctttgagggactgttgggaaggcatgattggttttgaaatgtgaggacatgagatttggaggggccaggggcaggatgatatggggttttgctgtgtccccacccaaatatcaacctgaattgtatctcccagaattcccacgtgttgtgggagggacccagggggaggtcattgaatcatgggggcccatctttcccatgatattctgatgatggtgaataagtctcgtgagatctgataggtttatcaaggggttctgcttttgcttcttcctcatttttctcttccactgccatgtaggaagtgccttttgcctctcgtcatgattctgaggcctccccggccatgtggaactgtaagtccatttaaacctcttttttcttcccagtctcaggtatgtctttgtcggcagcatgaaaatgggcgaatacagtgagctaggaatagaggagctggaagtaaggtcagagttataacaaagtgtgggagtgccaggggagaggagaacggggaggaagagagcaaataacaattataaaaactgactttagctttgttggagctcagaaaatgataccccaaagtatggcgctttggcatgctgagtactttagagactaaaaagcctcagaagcaaagtctctgaccttctcctgccctcctgtctctcacctctctttctcccctgaggagtcacagaaaccataattcctcttccccaaggttggtcagagaaactagaacttctctccccacaaacaagccataaaacctagaaaggtcactttctctgttgtccattgaagaccctcactccagaagggtcctgccccaaacccaggaggaaagaatgctgcacagagaggccaagaaggatctgaacagagagaccttgctgggtttccccgcttagtccattaccattagatcatacccttttgtccaatcacattcctacaccgctgcccattcttcatcagacctaagcacagagacacagtgttctctgggtcttttggtcttcatttctgaagacactggtgtcacctaaaactttgatgaagtacrtttgttatgcttttctcttattaacctgtcttttattataggagtgccagccacaacccttatgatgggtgaggaaatatatcacacttttttacccttacagcttttattgcgactgggaactgttggaaggatttgaatagagcagtaatgtggtttgacttacattttaacatcatcactgtggctgctgtgttaagaataggcctgagagacaaggatggaagcaagtaaatgttaggaggctgttgcagtagaccagaggagtaacaatagaagtggtgagaagtagttggattcggaatatattttgaagcgagtcaacaggatttggagacacggtgcatgtgggatgtgagaaaaagagaaaaaacagggtacctccaaagtttttggcctaagaataaactttagagattatcctataagaggatatctagagctatcatttttttttttttttgagatggaatttcactcttgtcgcccaggctggagtgcaatggcgcaatctcggctcaccacaactcccgcctcccaggttcaagcgattctcctgcctcagactcctgagtagctgggattatgggcatgcaccaccacgcctggctaattttgtatttttaggagagacagggtttcaccatgttggccaggatggtctcaatctcttgacctggtcatctgcccaccttggtttcccaaagtgctgggattacaggtgtgagccaccgcgcccggcggggcggagtcttactctgtcacccaggctggaatgccgtggcatgatctcggctcactgcaacctctgcctcctgggttcaagcaattccactgcctccatctcctgagtagctgggattacaggcacgtgctagccaccatgcccgactaattttgtatttttagtagagacagggtttcaccatgttggccaggctggtctcaaactcctgacctcagtagtagaataggaggcatatggcctcccaaagtgctaggattacaggcacgagccactgcgcctggccagtgttagatgacttattgtgtaacccttaaaatttttatagttgtctttttcttttaaaattcttatttttaaaaaattcgtttggtttttttttttttttgagacagggtctcgccctattgtccagggcgtgatctcggctcactgcagcctctacctcccaagttcaagcaatcctcccacctcagcatccctagtagttggggtacaggcatgcaccaccacacctggctaatctttttttattttttgtagggatagggtttcactatgttgcccaggctggtcttgaactcctgggctcaagggatcttcccaggctggcctcccaaagtgctgggattacagatgtgagccaccgcctggtctccatcttggttctaacctccaagctgcccttcttaatctctgggtgtaggttgagctaactttgggaggaacttagtttatagcttaactgtgtatgactacttgagactgaaaaacgacttctaagcacttagtctactacaggcaatgagcaagttgtcaaacctgctcagtagttcagtttcctgcaggaaagtatatgccactctggcataagaattattttgagctgaaagcaattcagaaaaaccaaacacaggacaagctccctaccctccctatatgaaaagagggcatatattctccttgtgcaggcgaccgccccctttcccatatcaggaagggaagaacagcccttattaccagagatggaaatggcaagagagagatgacgtaagtgtctacatgaataaaccttactaactagccctaatctcccattagtatttcccatatatttacctccccacaatttactacctcctagaactagaaagttagaaacccccttcctttgccttgttacttctctataaatttgttgtccttcctctaaatggcataaaaacccccaagcctcgctgcctcttcggggagtttctcttctctgtggatcacccccacgttttgccacattaaacttataaaataaaacctggggccgggcatggtggctcacatctgtaatcccagctctttgggaggccgaggcgggtggatcacctgaggtcaggagttaggccaacacagcaaaaccctaggagaggagaggaaaaacctttttcctcctcagcaaccctctttagatatgaccaaggaagatcttccagagggtggagtgataggcacagagaacaccaactggtgaacccttcctgggggacaaactgggacctgattaggaaattcctcatccctagggtaagaaaccctttgctcatttgtctagaatttctacagaatgctttgtatttccctttcctaatgggagggttttcctggccccattccaccattgtacattggtgggagacgaggcacagatatcttgtctttttagttcgtacgtctccagatcaaaacggccacgtctgaacgtggtgcaagcactgcctcacatcattcccaaatataggggctatcacatatcacctagagattctgaactttgagcttaatgctgtaactggacaggacttgagggttgtctctctttgtggggtattttgcatatgtaaaggagagagaaactaatatgtatggtgataaatagataaaagtgggctgggcatggtggctcacgcctataatcccagcactttgggaggccaaggtgggtggatcaattgagttcaggagttcaagaccagcctggtcaacgtggtgaaacctcgtctctactaaaaattcaaaaaaaaattagctgggcgtggtggcctgcacctgtagtcccagctactcgggaggctgaggcacaagattcacttgaactcaggaggcagaggttgctgtgagccaagattgtgccactagactccagcctggatgacagaacaagagtctgtctaaatatataaataaaacctctgaaagataatacagaaaactatcttcatgaccttgcagtaaggaaggagttcttaagcaagtcataaaatatactaacaataagggaaaagattgttgttttgagcattaaagttgaaaatatttatttattaaggcaccattaaaaggcaagctacaaatgtcaatcaaaaccacaatgagattcctccttacaccaacgaggatgtctagaatcaaaaagaaaaacaataacaagtgttggtgaggatgtggattaatcaggactgttatatactgctggtaggaatttaaaatggaagaatggctgtggaaaacattttgagttttgctttgtggcaagccacaaagtagraaaaaaaaaatttgtgtaagtcatgtaacccaaagaagctcatatctasaatatataagaactcctaggccaggtgcaatggctcacgcctgtaaacccagcattttgggatgccaaggtgggcagatcacctgaggttgggagtttgrgaccagcctggccaacacagggaaaccccatctctactaaaaacacaaaaattagccgggtgtggtggcgcatgcctgtaatcccagctacaggctgaggcatgagaattgcttgaacccgggaggcagaggttgcagtgagctgagattgtaccactgcactccagcctgggtgacagagtcagactctctctcaaaaaaaaaaaaaaaaaaaaaaaaaaagaaaagaaagaaagaaaagaaaaaaaatcrgagaacccaaragaaaaatgggcaaaggactcaagcaaaatatgatatccaaatagtcaaaaatgtagaaaaatccctcaacctcattagtaatcaaattaggtagaagtgcaaataaaaacataatgaaatataataccattacacatgttccaaattagctgaaattttaaaatgtgatagtgccaagagttaaaagcrtttgacattatctagtaaaatttaagattcaactatttgtgacccagtcatctcactcttatgaatgtgtgcttgtktccacttggagtcatgtacaaggatgttcccagcagcaactgtttatcagcaataaaatggctacattgtcatctgttcatacaatgctaaaaattcgacactatagtgaaaataaatgaagtatagctataggcaacaatatatatgaatctcaaaaacctaattattaagtaatggaagcccagacaaaagaatacatgctgtctgaaatacttgttcatttatatcaagttcaaagccagacagaactaaacttcgatgtttggaaaggcatacatgggtattataaccagaaagtaaagcaaagaagttattacttttaatgtcaatgtagtagtttcctctgggggctgggaagggggtttgattgggaattggtacgtatgagctctgggttgctggcaatctatttctagatctagggagtggctacactctttatattaacctaaattaatgtttaaacactcttcctttaataaatggttttctaaagtaatctaaaaaacccaaaacaacaaaaaacttcccagcaaggaaagccagagttagaaattgtggctgtgagtgataaatctgctgcttagcatagacatttgtgtaggtctcttgtctatttgttgacatttttgtggtcacaatgggaaagagagagagctaagtaaatgtcatccatttctatagcatctctatgttttaagatgaagctttgtggtttgtaatgtatttcccctaaaggaaataaaattttaagagttaacatgagaattcagagaatcaccatttgcaaaattaattttttaatattaaagtgtatatcaaaataaaatactttaaatgtgcccctgatatatttttaagttgacatctaaaatttgacatcataagctgggcacagtggctcacgcctgtaatcccagcactttgggaggccgaggcaggcggatcaggaggtcaggagatcgagaccatcctggctaacatggtgaaaccctgtctctactaaaaatacaaaaaaattagctgggcgtggtggtgtgcgcctgtaatcccagctactcaggaggctgaggcaggagaatctcctgaacccgggaggtggaggttgcagtgagctgatgagctgagatcacaccattgtactccagcctgggcaacaagagtgaaactccatctcaaaaaataaataaataaataaagtaataataattttaaaataattaaaatttttagaaaggaattctgcactttgggtcttattttcctcatttttcagttgaagagacctgattgcatgatttctaaagacatttccaattctaagaaattctaattctattttctgccaatgatgggcatttcttgaactttatcaagagtgcagaaaatagtcttcactccatctcctgagaactaaaaaaggtacagggtcttgtctccctaggaccactaacatgagaggctctcgctgatgagggactttagtcataggatggattcttatgcatttaggatggtgacttcctcacttggaaagtctatgtgtacattcctattcaaaatatctggaaagctgggcgcagtggctcacgcttgtaatcccagcactttgggaggccgaggcgggcggatcatgaggtcaggagatcgagaccacggtgaaaccccatctctactaaaaatacaaaaaattagccgggcgtggtggcgggtgactgtagtcccagctacttgggaggctgaggcaggagaatggcgtgaacccaggaggcggagcttgcagtgagccgatattgcgcccctgcaccccagactgggggacagagtgagactccgtctcaaaaaaaaaaaaaaaaaaaaaaatctggaaagcagaccacaagatgtacagaacaaatggcggaacacagaaaccagaaacacggagaaaagtaatctcagttccagagaaggcataggctatctccccttacaagaacaatcctcccacaccgcacccctcacctgtctcattcctgyttattcttcatcttgcaacttgagtgtcacttctgggaattcttaattcagcccaaagattaggttaggttcccacaacctgactgtgctttgtcacattcatccccctaatgaagggcaggyagtgttgctctccctcactaagctgcaagcctgggaagggcagggagtgtggttgtcacattcatcctgttcactactcagtgggtgcccaacagattcgcacttaatgaaggcccctctgctggccttcagatttcagtgcttatggaataattatttctgtcccctgccactcagccctgtactctgctttgtgatggaaaagaggaaaccaggaataagaaaatgtgccccacagattttgccaaaaccataatctgttagataaattgctgagagggaaaacactagaatacctcaaacggtaattccattcaacacaaaatacgtaaatatacgtactttgggaaagtacatcacatatcaccacagagcaaacgctgttggatcgccattatttaaggaatatctcatactcagtttctggatttctgcaacaactggtaaaggggaaaatatcacatttcttaaatttatacatgtataggctgggcacggtggctcacacctgtaatcccagcactttgggaggccgagaggggaggatcacttgaggtcaggagtttgagaccagcctggccaacatggtgaaaccctgtctctactaaaaatacaaaaaagttgtctgggcttggtggtgggagcctataatcccaactacttgggaggctgagatagaagaatcacttgaacctgggaggcggaggttgcactgagccgagatcgtgccactgcactccagcctgggtgacagagcaagactctgtctcaaaaaaaaataaaaagataaaaataataataaaagaaatttatacatgtatagttgaataagcacagaatatctctgaaaagatataccagaaactgagaattagccaagccccacccacacactttactgcctacattagcttgactttgctattctactgtctttaccaacaagactttagtatttcaggaagcccttgccccaaaaataaaagctgtaatgggaatgggtaatgggtacaaaaaaatagaatgaataaaatgtagtatttgatagcacaacagagtgactctaatcaataataatttagtgtgcattttaaaataactaaaagtacaattgtattattattttttcttgaaacagagtctcactctgtcacccaggctggagtgcagtggctcagtcttggctcactgcaacctctgcctcccaggttcaagcaattctcctgcctcagcctcctgagtagctggaattacaggcgcccgccaccacgcccgcctactttttgtatgttcagcagagatggggttttgccatgttggccaggctggtctccaactcctgacctcaagtgatctacccacttcagcctcccaaaagtcctgggattacaggcgtgagccactgtacctggcctaattgtattgtttgtaacacaaaggataaatgcttgaggtcatagatatcccatttacccggatgtgattattacacatcacacgcctgtatcaaaayatctcatgtatcccatatacctactctgcactcacaaaatgaaatttttaaaaactttttatttccataggttattggggcacaggtggtatttggttacatgagtaagttctttagtggtgatttgtgagattttggtgcacccatcacccgagcastrtacactgaacccaatttgtagttttttattcctctctcccttcccaccctttccgcccaagtccccaaagtcctttgtatcatacttatgcctttaattttttttaactgaaaaaactttttaaaataaaacttttaaataatgttattgttcatttcaggaatatccagacaacgtattttaaattgcttagctttccagtacagttatcaaatgattattcatgctccaaaacttttttaagccctcaccttgctaaatcatgatccgtacccaaacttaatcagagcccttcactgaaagacccaccttaatccaacctagarcctcataaatatcctccctttgccctcccctcccagatgctgctcaagtttccgcaaggcggtgtgctcccttgctaagacatgaataaactccagctttgcctatctgtgagatttcgggtggtgtatttcagggcgctgacatttggcaaaagtaatagtataggttacatccgaggagggaactgagagaagaaatgtggaaggtgtctcttaggacctttgaatttttacgtgggcgtgtattgtctattcgaaaataaatgctaaaacaaaacaaaaagtttaaaagcaggacaccattgtgtaatctcmtttmtgaccagaaggtggcgcctccacctttcctggggctggggaaggggaaagctgtagagaggggagaaaggtcccagtgaaacaacaggggcctacattgagagtggaaattttacctcctggcaagaaaggtccagaatctctcttcacaataatagctaatatttattgaatatatattaaatgccaattaagatttttaaaacaggccgggcacagagtctcaagcctgtaatccgaggactttggaaggctgcagccagtggacagcttaagtctaggagtttgagaaaagcctgggcaacacggtgaaaccctgtccctattttttaaaaataaaaaatgaaagattttaaaacagcattcttctttttttcttttcttttttttttttttttgagacggagtcttgcttttttacctaggctggagtgcagtggcgtgatctcagctcactgcaacccccgcctcccaggttcaagcaaatctcctgcctcccaagtagctgagattacaggtgtgcaccaccactccaggctaatttttatatttttagtagagatggggtttcatcatgttggccagactggtctcgaactcctgagctcaaagtgatccgcctgcatcagcctcccaaagtgctgggattacaggcgtgagccactgtgcccaggtttaatacagcattcctaaggtaaaattggtatacaataacagcacatatttagtgtacaatctgatgaatattaacatgtattcaaccatgaaactatcaccataatcaagataatggaacatatcacccccaaagctttcttgtgctaatttgcaatccctcccttcctccctatcagttttaagtactttacgtagataattttatcttcactaccactctttgaggtattatcactcccattttaccaaggaggaaactgaggtatagttaggctaaataaattgcccaaagtcattcagctagcaagatgtagagctgttatttgaacacmggctgattgacactagatacacactacatcagcaattttcaaactggagtacatgtatctctggggtgtacaaagcctttccaacatggacagggctgaaatttccagattttgacttccagatgcagtctccatcttgacacttcaccaagaatgttctctacgtgtcaaagcatcttctttcccctctccctgctcactttacaaaaggttactgcaactctcattccttccatggtatgctgttctagggcacacacatacacacacacacacacataccccctcttgaccaccaaagataatttgaaatattgtcactttgtgtagataaagtactttcatgaaaaatctttttggaagtcaagatttataattctttcaaccaaattaaaggagcatctaatcaagttgagtgctgatraatcagtttttgatgaaagattattataaggttttggtatataacttgaaagagttcacaaaattcactggcattgctaaagctaaatgccttctactcttatttatatgagtgagatttctcaaataatatacctgaagaaattaaaaattggaatacaattaatcttgattcttgtctcattctagaaataagcaaattatgggccaggcatggtggcccacacctgtaatcccggcactttggtgggcagatcacttgaggtcaggagttcgagaccagcctggccaacatggtgaaaccccatctctattaaaaatacaaaaattagccaggcgtggtggcaggcgcctgtagtcccagctactcaggaggcagaggcaggagaatcacttgaacccaggaggtggaggtggcagtgagctgagattgtgccactgcactccagcctgggggacagagtgagactccatgtcaaaaaaagaaaaaaagaaataagcaataatcatctgtgaatgtatgcactaatatattattggataattgaaaaaaatcccaaccacattcatgtcattagaaaatgtgcttctagtttttactttttattatgtgtaatattttttggccaggtgcagtggctcatgcctgtaatcccagcattttggaaggcaaggcgggaggatcacttgaggtcaggagtttgagaccagcctggccaatgtagtgaaaccccctctctgctaaaaatacaaaaattaactgggtgtggtggcacgcacctgtaatcccaactactagagaggctgaggcaggataattgcttgaaccccggaggcggagrttgcagtgagcygagattacaccactgcactccaacctgggcaacagagcaagactccgtctcaaaacaaaagaagtgatattttttaacttcttattttaaaaatgtgtgctgttttgatccaatatgtctaattgtgatgttaactcaatccacaagaagccttgaatatatttgagccttataaaataaaaatgttttgatatctgaagttatagacatatttttatggcagaaactctgataagatgatcaataaaacttttaagcataaaaacatattaaataaaattctctgataaaagtggatgaaggctaggcatggtggctcacaccagtaattccagcactttgggaggctgacatgggatgattgcttgagcccaggagtttgagaccagcctgggcaacatggygaaaccttgtctctacaaaaaatgcaaaaattagcctggtgtggtggcaaacacctgtagtttcaagtactcgggagtctgaggcaggaggatagcttgagcctgggatgttgaggctacactgagccatgattgcaccattgcactccagcgtgggtgacagagacactgtcttaaaaaaaaaaaaattaaatgttgaccaaaaatatgcaaaagaatgtatgctttttaaaaattattttaaaaaattattttaggaggtaggcaataaaaaatgtttgagtctataggtttccttatgtttgcgtcacagaaaacacaattattatttttgattggtcaaaccaaaatctcttcagggatgtgttattgtagtgggaaatcagagactggagagactaagcggagttcaggagggartattttaagtgtacactagctcagcggacatgcatcttgaaagtctgagcagcaaacaaagaaaatgaatgtcttttatgcactttgaggtgggaattatatgatgcaggaagctggtttacaaaagcgagaacaaagcagttaattatcaggtgacattcttaggactcagcttacatcttgggaaaacatgtcttgcgactcatgcttatctatcttgtgactttgcagctgcacagcaagaaaaacaggagcttacagaacttacaaaatatgtgggggagagatatggttaatgcttcacagaccttacagaggagcagttaatattctttcttaactcttatttcaggggggctacttcatgtctattctagcataactttaaactgtaaatttaatttcttttaatttttccactttattatgaactgaaatgtgttccccaaaatttatatgggtttttttgttttttttgtttcgttttgttttgtttgagacagggtcttgctctgttgcccaggcttgagtgctgcagtggcgtgatcttggctcgacctcctgggcttaagtgatcctcccacttcagcccccaagtttctgagactacaggtatgcaccaccacacccagttaaatttttttgtttatttatttatatttttttgtagagatgagtctccctgtgttgcccaggctgatctctagctcctgggctcaagcaatcctcctgccttggcctccgaaagtgctgggattacaggcatgagccaccacacctggcttccaaatgagtatgttggagccataacccccaatgtgactgtatttggagacagggcctttaaagtggtaatcaaggtgaaatgcagccataagggtggctaatccaatgtgactgatgtcttcagaagaggaagaacacagttacaaatgcataatcacagaggataggccactatgggcaaaagtccagagcgggcacaactggtagctatcagttgttaacactcccaggaagtgaaggaataaatgcttctgtcttgaaagggggtggttctgggtgccgtgccacagagtccactatgctgtcattgttcatggaccacacaattgtgtactgagataatttaaaagaacctaaggaaaaaaccaagacaataagcaaatttagcaaggttgctggattcaaggtccaaatacaaaataaataggaaattagatgttattactgaaattgtttacataacatcaaaagaaccaactgcctaggaattaatttaatataagatgtgcaacacccactacactgaaaactacaaaacactgctgagagaaattgaggatggacttaatacttaagggatagagcatgttcataaattagaaacttaatattataaagatgtcagtcatcttcaactctatagctccaaagcaatcctcccaaattcccagcaggttttttgaggaaattaacaaactgatttaaatttatatggaaattcaaaatgccaagaatagctagggctatcttgaagaagaatcacaaaatctagaggattatactacccaaaatcaagaactataataaaactataktgtgtgtgtgtgtgtgtgtgtgtgtgtgtgtgtgagatattgttgaaggataggcgaagtaaacaatgrgacaaaacagaatccaggaataaactctcccatgtatggctaccttatttatgataaaagcaacatgctgtaatgtagtgggaaaaggatggtctttcaatagatgatctgagccatattaaatatccatgtaggaaaacaaagtctcttgacctagctcataccatgcgcaaaaagcaatttcagataaaattaaaacaaaaacagcttttagctgggtgcagtggctcaygcctgtaatgtcaaccctttgggaggccgaggcaggcagattgcttgagctcaggagttcgagaccagtctgggcaacatgctgaaaccccaactctatcaaaacaatacaaaaaattagcggggtgtggtggcatgtgcctcctgtggtcccagctattcaggaggctgaggtgggaggattgcttgagcccgggaagcagaagttgcaatgagctgagattgcaccactgtactccaacctgggtgacagagtgagagagtgagaccctgttttctaaaaaaaataaaataaaataaaaagcttttatttgaaaacataaggaaagcattttttgaccctgaagtaaagatttctttctctttattttgattttgattttgtagagacagctgccttcaaactcctggcctcaagtaatcctcccacctcaacctcccaaagtgctaggaatacagatgtgagccaccacacccaggcaagattcttaaatagaataataaaatcactcacttgaactatattaaaattaagaacttttgttcaccaaaagacattattgaaagagtgagaaggcaacccatagactgaagaagatatttgcggtactgaagtttattctgaactttttgcaagtctgaaaatctcacaaagtcctctgatctagacatataaagaatttcacaagccagcaatcccattactggatatatacccagaggaatataaatcattctaccataaagacrcatgcatgcaaatgttcattgcagcactattcacaatagcaaagatatggaatcaacctaaatgtccatcaatgagagattggataaagaaaatgtggtacatataaaccacggaatactatgcagccataaaaaggaatgagaccatgtttttcatgggaacatggatgaagctggaggccattatactcagcaaactaatgcagaaacagaaaaccaaatcccaccagcctggccaacatagtgaaacctcgtctctactaaaaatacaaaaattagccaggcatggtggtgcatgggcacggtggcacatgcctgttgtcccagctacttggcagcctgagacaggagaatcacttgaacccaagaagtggaggttgcagtgagccaagatcgcgctactacactccagcttgggcaacagagtgagacttcgtcttaaaaaaagaaaaaaaagaaaaagaaaaccaattcccacacattctcatttataagtgggagctaaatggtaagaacttatgaacacaaagaagggaaaaacagacactggagtctactcgacggaggatagtaggaggagggagaggagcagaaaagataactattgggtactgggcttaatacctaggtgatgaaataatctgtacaaccaacccccgcgacacgtgtttacctatgtaacaaacctgcacaggtagccccaaacctcaaataaaagttaaaaaaaaggaaaatagttaaaaaaaaamaaaacaaaaaaaawmaaaaaataaaaaaaagaatttcaaaagaaagtcaatccagaatcataaacaaaagccttgaacagatcctttttcatcagaggatatccaaccacaatgagataccacttcacacacactaagatggctagaattcaaaaaacagggccaggtgtggtgggtcacgcctgtaatcccagcactttgggaggccaaggcaggcagataacttgaggccaggagttcaagaccagcctgattaacatggcgaaaccctgcctctactaaacatacaaaaattagccaggcgtgttggcgggcgcctgtagtctcagctactggggaggctgaggcgggagaatcgcttgaacctgggaggcagaggttgcagtgagccaagatcgtgccactgcactccagcctgggtgacagaatgagactctgtctcaaaaattaaaaataaaaataaaaaacaggccaggtatggtggctcaacctataatcccagcactttgggaggccgaggtgggcagatcacctgaggtcaggagtttgagaccagcctgaccaacatggtgaaacaccgtctctagtaaaaatacaaaaattagccaggcgtggtggtgggcacctgtaatcccagctacttgggaggctgaggcaggagaatctcttgaaccygggaggtggaggttgcagtgagccaagatcgtgccattgcactccagcctgggcaacaagagtgaaactccatctcaaaaaaaaagagagagagagaagaagaagaaggaaatactttccagggacttccggttactttttgtaggctggaattctgccacatggccaaacctaactgcaagcgattctgagaaggtgacgattttagttgggcacgtggctgctccaaataaaattgtactttttgtcagtgataaagagaatagataatggggtgtggtggtggggagttggaagcacccagcacagggtccagcyttccagagatcttacactctgatgggggagatgggagggtcaacagaaaacaggaacccagcttggtaaatcctccgctggaatcacaggtgctgtaggagcaaagagctcttaaggaagccttgccagagtaggaaacacaccttggaggccattccttgaaggaccagtggaagtcctccaagcagaagagagaaaagcttttcaagcatgatagaaagcatctttgaaagttatcggagattttagtggaaattgggaaccaaatgttccgtgttcctgaagtgtgagggtcaaaggccgaagatggagctggcggggagggggcaggaagaaaatagtcatgaaagtctgctatgccatgaacaggaatagaactttacccctaacagcccctgaagggttttaagcaaatgaatgtcataatcagattaggattttattttttaaaaagaatgagattgggtcttgctatgttgtccaggctggtcttgaacttctgggctcaagtgatcctccttcctcaacttcccaaagtgctgggactacaggtgggagccactgcacctggcccagattttaaatagctggcagtacatcacctgacacaattctaagggttagttgaatagaggcagccttgtgtatagagaatatgtaaaataaaataatagacataggggtggaggaatgttctgacatagaaggggcagcaactgggtttttgcaacagtctggatgagatatgataaatatttcaacagggctacaggaagaaggatagaaagttctctgtgctccaaatgtgacatattttgcttattaaggtaggattcttagaaagaaaaaaaagtaggattcttttctgatactggttcctttccacttcctaccaaatccttgatgaaggcggggattcaagggggaggtaggagaagggaaagccttcaagaggccattgttatgggaagaaatattggtgagatcctgggttctgaagtcccttctcttcctttgctgttgaaatgttggcactccctttcagtctctcctcttctcatttcctgttccctagctagtcctcaacactcttggcttctcactacttatttgctgctaactgccagtctttatcttcagatttctttctttaatggttgacatgaccctttatatcccactatctcaacatcttcaccatcaggacttacacattctcaaacttttttcttttttttttttgagacagagtctcgctctgtcgcccaggctggagtgcagtggcgcaatctcggctcactgcaagctccacctcccaggttcacgccattctcctgcctcagcctcccgagtagctgggactacaggcacccaccaccacacccagctaattttttgtatttttagtasagacggggtttcaccgtgttagccaggatggtctcgatctcctgacctcgtgatccacccgcctcrgcctcccaaagtgctgtgattacaggtgtgagccaccacacccagccactcaaacttaatgtagtaaactgaacacactattttctctctttctatatctgtacctgcatggatggcaccatccacccagttaaaagggatcaaaatatgccagtccaaattgtgccactttggcataagtaggattttgtgctggaaggcaattaagaaacacttaaaagcaggatataaatttccccttatgaaggaaagtgtctctctccccctctcccatatcaggagaaggagaataacttatatgacaagagacagaaagtcagcaccaacttgaatctgcgtaaacaaatcttactaaaatggyyattatcttccattagtgcctccgatatatttaccttcccataacttactgccccaaatgcccagatctcacttccttggtcttgttaatgtttccacaacttgtcctttgttaaaatggcatataagcccccattcctmattgcttctcttattttcacttcttccctgtgaagttgtcacatgcttgtgaaataagcctttccctttcatctgtcttttctcggtttcatttgcaggccccgtatactaaacctaacaggtagaggaaaaggtttttctcctgtatgtaatccacagtctagaattctggcagtcttcccagcctcttcccttactctcctttcttgcattcacttagtctctgacactggtgaaccacctgarccctgtgcttctgtaaaacaggtcagttaagaaatttacccatcgtgttgttttccaaaaccctccaaccttttgtgttccaacaaaaaagctaactgcaaagaatcactctgctcacacatattccataaaaagcctcatctccatccttcattatggctcccataagatccatgtatgactcttttgtttgctgcctctatgaaacctcaggtccccttccttttctctgagatgttattaattaatgaacatgtgttcttgattgcaatggcccgaataaaaccacctgtgtaattgtctggtacgttttgtctttgatgtcagtaagtcttcctgattctatcagctaagctgagtagctgctgagtgtcccctcctccccctcccactccccgttcaccagcttttacctggataactgtagcagtctcctaaatggtttcaaggacttcggctttcttcttctccaccccattcttcacattactgctagaatgatctttctgaaaagcaagtcattatccaatctctgtttcccagtctaactttgaggagacactacccacgcccccaccccgccccacacatacacacacataatccatgagtacactgaattacttgggtgaaataccgtgctttctccccacctcttttttttagacagtcttgctctgttgcccaggctcctggagtgcagtgctacaatctccgctcactgcaacctccacctctcagatgcaagcaattctcatgcctcagcctcccaattagctgggattataggcacctgccaccacactcggctgattttttgtatttttactacagacgaggtttcaccatattggccaggctggtctcgaactcctgatctcaggtgatctgcctgcctcggcctcccaaggtgctgggattacagrcatgagccaccacacctggccttccgtagctttttgtgctttcttctatcatttttttggtcacactgtattataactgttaatttgtttgtttccttcctccctccactagtctgtgagctttttgagaagagaaacttcattttatttatctttgtattcccaggcctggtgtaatacctgacatataataaatgtatgtatcagtatttactgtaagtactgtaataccaagtgtcacttgaatgctaaatgccacctaatcctcacaatcaccttctcaaatatgcacaaatatttatatttcaatgagttggacaatgtacatgttctcattaacatccttttattcagcgtagttgataatttaagcataagaatattctttttatcctatctgaaatcccaaagatacaagaataaagagttttcctaatcatttaagatgtattctgcccgcataacctcttaagtcttgaggatcaccatttcctttcgttccaaaagaggggatgctctggtaagtgctgcagacccaaaatgtacatgggatggagcttttagtgagtggaaggggctttcatgatcatgactaccttctttttttttttggacaccaagtctcactctgtcccccaggctggagtgcagtggtgcaatcccagctcactgcaacctccgcctcccgggttcaagcrattctcctgcctcagcctcccgagtagctgggattacaggcgcatgccaccacgcccagctaattttgtatatttagtagggacagggtttcaccatgttagccaggctgatcttgaatgcccgatctctagtgatccgcccgcctaagcctccaaaactgctgggattacaggtgtgagctgctgcacctgacaactaccttcttttctttagagttccctctgctctcttcctttgatacccaagaggcaagcttgggaatgacctcctttgcatatcttcccccatctgccctcactataggaactcctagaaggaccaggacagacacaaggatggaggagaaaggtacagaacaattaatgcaactgtgaccctgggcttgggggaatattctcttcagtatacgcttttatttattttattttattctatttttttgagacaaggtctcaccctatcacccaggttggagtgcagtggtgcaaactaggctcactgcaacctcctcctcctgggttcaagcgattctcccacctcagcctccggagtagctgggactacaggaacacgccaccatgcctggctaatttttgtatttttggtagagatggagttttgccatgttgcctaggttgatctcgaactcagagctcaagcgatccacccaccttggactaccaaagtgctgggattacaggagtgagccaccatgcctggccttttcaattttaaattcaggagatacatatgcaggtttagattcagggggtaaatatgcaggttttgttacatgggtatattgcgtgatgctgtggtttgagttagtgatcccgttacccaaatagtgaacatagtacctgaatgtaggtttcaactcttgccctctttcctcccttctcccttttggaatctccagtgtttattgtttctatctttgtgtctatgtgtacaacaggtttagctcccacttaaaagttagaacatgcagtatttggttttctgtttctgcattaattcacttaggataatggcctccagctgcatccatgctgctgcaaaggacatgattacattctatttatttatttatttatttagatacggagttttgctcttgtcgcccaggctgaagtgcgatggcatgatctcggctcattgcaacctccacctcccaggttcaagcaattctcctgcctcagcctccccagtagctgggattataggcacctgccaccacaccctgctaggtttttgtatttttagtagagatggggttttgccatgttggccaggttggtcttgaagtcctgacctcaggtgatccacccacctcggcctcccaaagtgctgggtttacaggtatgagccaccgcactgggccgattgcattcttttttatggctacatagcattccatggtatacatrgaccacattttctttatccactctaccattgatgaacatctaggctgattccatgtctttgctattgtgaatagtgctgcgaaaaacatacaggtgcatgtgtccttttggtagaaagatgtatttcctttgtgtatatacccagtagtgagattgctgggttgaatgttaattctatttttaattctttgagaaaactccaaactgctttccacagtggctgaactaatttaccttcccaccaacagtgtgttagcattcccttttctctgctacctcgccaacatctmttattttctgactttaataatagccattctaactagtgtggatggtatctcattgtggttttgattttgcatttctctgatgattagtgatggttagcattttttcatatgtttattggccacttgtactcttcttttgagaagtgtctgctcatgccccttgcccacgttttaatgggattatttgtttttttcttgttgatttgtttaagttccttatagattctggatattagttctttgctggaggcagtttgttaatattttctcctattctttaggctgtctgtttactctgttgatagtttcttttgctgtgcagaagctctttagtttaagtaggtcccatctgtcattttttatttttgtagaatgtacttattttccctgacttttcagtcagaatttgcaatcaaggggagcataatggatccagtggatacccaggataaaagggtgtaattgcctagagaatcttttctgttaaatatcattcatcttacttcccttatccctttgcctccaaacctgtttccaaaacaaaagcattcctctgaggaagtgcttgcacggtgataggtgatagatagcccaygtggggagaggttgggagaatcatgcagaagagaaaccgagagagatggaaacggcattctggccagccacttttcttgtaatccatcactgtttgccctgcagtagcgggctggttgagcagagccccataattaaaattctctattctaacctgtcstcacatctttaagatgattctttgagaagtctgggttaaaaggtttaaggaagaaaccaaattgtgagttttgggggaaaggatgatcatcatctttaaaagaacttttggtttccaaagaaatatgcatagaactaaatgcacagattttcttttccatttttatttttttagccaatttccaaagccctaaatcacattttcccttagactgaaactctagaaaaacattattattattattatttattattttttgagacagggtcttgcctcattgcccaggctggagtgcagtggcacaatctcagctcactgcaacctccacctccagtgttgaggcgattctcctgccttggccttccaaggggctgcgattacaggcccgtgccaccacaccaggctaatctttgtattgttagtagagacgggttttaccatgttggccaggctggtcttgaactcctgacctcaagtgatccgcccacctcgcaatcccaaagtgctgggattacaggcgtgagccaccgcatccggcctaggaagacattcttatcttctctagttcaccctctaccaccgtctcctctctggagagccccctgaatggctaaataaaacagctaaaccacctttcttccccctatgaccctgyccatgcaacgcctcctctgagtgattgttcctatcccatctccttgcaaaggtagtagaaagtattatagctgaggttcagacatattcatttgttacccatatactagtcagagaaattaaattatttgattgaatgagttctgcttcaagcgacagaagaatgttccaccctccagtaaatgtcacagaggactaattgagtttccagctcctatcctgaaaagcgaacaatcaaacaaaaaatagaagacactgtgatactcagaagctcattacatacatagaggatacttgacctctctmtatatatacaaaaaaatctcacaaatgcacagttggattattaatagtgttatctcacaggtgtagaatcaggtaacctttacttttgtcttagtattttcatataacaaagatgtatcatgtaaaaatatcaggaaaaatcaatccattttcaatctgatagaaaaaagtattgttttaataccaagcattagctttttcttctgtaaactattttcaagagtttaggacaggccgggcacagtggcttacacctgtaatcccagcactttgggaggctgaagtaggcggatcacctgaggccaggagtttgagaccagcctgaccaacatggcgaaaccccatctctattaaaaatacaaaaaaaattagctgggcgtgatggcacgtgcctgtcatcccagctactcaggaggctgaggcacaagaatcgcttgaacttgggaggcagaggctgcagtgagctgagatcacgccactgcactrcagcctgggcaacagagccagatcctgtttaaaaaaaaaaaaaaagtttaagacaaaaaaggaaagctcactttctatcaacaatagcttccaaaagacaataacagggctgagtgtggtggctcatgcttgtaatctcagcactttgggaggccgaggtgggcagatcacctgaagtcaggagttcgagaccagcctggtcaacatggtgaaactctgtctctactaaaaatacaaaaattagccaggcatcatggtgggcgcctataatcccagcaactcaggaggctgaggcaggagaatcgcttgaagctgggaagtgagccactcaacctccgccactgccctccagcctgggcaacaccgcgagactctatctcaaaaaaagacaatgacagtaactcgaaaagaggctcctcttaacttctgccaccctaacccataactccacccatttctccgctggacttacctcattcacagggatcagaatactgaattgttgcctgttcatctgtgaaatgaaataagwcatattattactttgagggcctcctatattcagaggraaaatgcttcagaaaagctactgcttgagccccttccagagaatctctacaggttatgagcatattcagaattacaagaaagyttcaatcactaatatttgtacattgtgacaaactattaatcataccaaaaataatagaaatagcccttygagaacaatggttcacattgttctccgatcayataaaatgtctctagtgtacgcaacttaaaaatggcacacaactgaattaaaatattttaggagattagataatttaattatgtgctacttggcttgggaaggagtatttgtaaaattaagagagaagccatgaagaatgaggcagaagtaagttgggagatgcaggtaagatctcagmtctcatttcagctcagccctctcacctggtaggtagtagtcatagaccttgatggttgctggtttcaagttggtgaccagcacactttggctgatggtgaaggtgtaagtctgagygttcttaatgagctgtggggaagacagatgaaacagtaccttagaagtaaaatgaaaattacactgtatgcaatgtggaataaaagacccttgctgtcttcatgtagattttctgaagccccgccaggcacggtggctcatgcctctaatcccagcactttgggaggccgaagtgggtgaatcaccagaggtcaggagttccagaccagcctggccaacatggtgaaaccccatctctactaaaaatacaaaaattagtcgggcatggtggctggcacctgtaatcccagctactcaggaggctgaggcagaagaatcgcttgaacctgggaggcagatgttgcagtgagccgagatggcgccactgcactccagcctgggcgacagagcgagactccatctcaaattaaaaaaaaattttttttttaattaaaaaaagattctctgaaaccctctatgtaccgctactgccctatgagtcttaaagacattgcctcctgctgacttcctggctctttcttcttaggatcttacagctctctggccctcttgtgaactggttccctttgttcatggtccaccctgacccatggcttctccactaaattagtcaaagtggccagagaaacagaggcttgcattttactccaacagttctatgccccttactggtttgctttcttcaatctggtccctgagcaaatgatacctcctcaaagaggctttccttgaacaccttatttaaaaagagtcacatccctggcctgccccaccagcactctttatccccttatgctgcatagcacttattactactgaaaaaaaatgtgtgtgtatacacatatacatgtaatttttaaaaacctgaatattgttgtctctccactagaatatcagcactcttaggccaggtatcatatctattgttttcattgctacgtctccatcacttagaaaagtgactggcatatgttggttgttcagtaaatatttgttgaataaattagcaaatggagaatctaaggcaattgtataagttactttaatataaaaaaataaatcctagctacttgggaagctgaggtggaaggatcatttgaacccaggaggtggagattatagtgagccaagatcgggccactgaagtccagcctgggcaacagagtgagaccctgtctcaaaaaaaaaaaaaaatcgtattataaatttagatatagcgctattaacgcctaattggaagggatttccaaagttcttcaggtatagtgcttctcaaagtgtggtcgagggacctcccctactccagggatccccgagattgcatcagaatatctgagaggtcagaattatttttagaatgatattaagactttttttttccactctcattctcttacaaatatacaggagattgtttccttctggggaaagtgatttaaaaaaataaaaaacaaaacaagtatacaggagagttatcagaggctactttatgtgtaatattgcaacggtttgaatgtaggagtaaataggaaaatttcattctctttgattaagccagatattaaagcaaaaatgcaaaacaatgtcaccattcttatttttttgttttggaaaatagttattttctttttctttttctttttttttttttttgagatggagtctcactctgttgcccaggctagagtatagtggcatgatctcggctcaccgcaacctctgcctgccaggttcaggcgattcttctgcctcagcctctcaagtagctgggactaccggcacgcacaaccatgcccagctaatttttgtgttttcagtagagatggatggggtttcaccatattggccaggttgatctcgaactcctgatctcgtgatccacccgcctcggcctcccaaagtgctgggattacaggcatgagccaccacgcctggccagaaaatagttattttcacaaaaattttatttatattaagatgtagtgagtttattatcatttttaaattaattaataaatattttaagattgtctcagttttaatttctaatatgataaagaccaatagttaaaacccacttcaccgaaagctgtttgaggtcctcagtaaattaagagtataaagggacactgaaacaaagaatttttagaaccactgttcttttctatcatttggtcaccataatgaattaaagcaaatgactaatatgaaccaaaagaaagctggggtagcagtttttttttttttttcttttttcygagatggagtcttgcaccgttgcccaggctggagtgcagtggcgcaatctcggctcactgcaagctctgcctcccaggttcacgccattcttgtgcctcagccacctgagtagctgggactacaggctcctgccaccacgcccagctaactttttgtacctttagtacagacggggtttcactgtgttagccaggatggtcttgatctcctgacctcatgatctgcccgtctcagcctcccaaagtgctgggattacaggcatgagccactgcgcccggccaggtagcagttttaatatctgactaaatggcacccaaggcaagggaaaaaaattgtgtgtgtgtgtgtggcggtgggggagtgtaagaatctaaggcaaaagtaaatgatataaatatatacacatatatagtaatggggaaaggatagtatgtactaatataaggaaaatttaataagaagatatgttcataacatatatatctaattatgtagtctcaaatatatcaggaaacaattggcagaaatgtatggataaatggataaatcaaatatcataattagaggccaggcgtggtggctcacacctataactccagcactttgggaggcctaggcaggcagatcacttgaggtcagaagttcaagaccagcctggccaacatggtgaaacgctgtctctaccaaaaaaatactaaacaaacaaacaaaaaccatcataattggatattttaacacatgcttttcagaaattgttaaatcaagcagaaaaataagcagagttatcaaacacatgaacaacagaaataatgatctcagacttctagatcagaatccaagcccaagagaaaagaaatagatgttcttttggagtgcacactgaacacctgcaaaaacagatcatggattaggtcatggaagaaacttcagcacattccaggcaatcaggatcatgaagactgtattctcagaccataatgcaacaaaattagacatcaggaacaaaaggatggctttaaaaattccatgtgtttcccaacaaattaagaaatagttagaactgaatgacagtaaaaacattkcttgtctgagattgtgggagagggatggcatgtacctagagggacgcttatagtgtaagttcatcaaaaaataaggaagactatatatgtgaataaggtcatcctctggtgaaattgatcaagaacacaagggagaagacacacagaaaagaggaaataaccacagatacaatgattagcactggcttttagatcattaggcctgttaactcaaattagaagccaactggcagatttggcaggacacactgaggagcagttcattgcagtctcaggcatggtgtcatggaaatcagactccccaggttctgctcccaccctagacactgacagatggtatgacttggacaacccactctctctctccaactctgtctccttatgtctaaggagggtggctgtaagacttgaataagtcatgtatgaaagcatcataaacttggcaaagttttaaacagcaacatcatgattacagggtagtgccagataagctaacccgagctgtctcaaaagaaactatacacaactcggctgggtgcggtggcttacgcctgtaatcctaacactttgggaggccgaggtgggtggatcacgaggtcaggagatcgagaccatcctggctaacacggtgaaaccctgtctctagtaaaaatacaaaaaattagccgggcatggtggcgggcgcatgtggtcccagctactcgggaggctgaggcaggagaatggcatgaacccgggaggcagagcttacagtgagctgagattgtgccactgcactccagcctgggtgacagagcgagactgcgtctcaaaaaaaaaaraaaaaagaaactatacacggctcacacaacataaaaaaccctggctccctggaagacaggaaacacagttagatgatggggttggtgggtgggcagggggttggaaatggatgttactaacaacagtatgttttgatttgggatattcttgtcttttggttatattcaataaggataactttgttccttgtgtggaatggaatatcatgaaaaggaacattgtaacaatctttagaacattgttagtccttgagaacttcttgttttgttaaaatgaaaggttacatacaatgtctgattaatattaagtaatattaacattatgttaaaatgataggaatagctataaagtgatgagggcttactctataccaggtacagttctaaatatttttacatgtcttaaataatttagttttttctataactctaaaagaactattttgacccctacccacacacattttacagctaactttcaacagcttgtccagttactcagtcaatgctagaaccaagatcacagcccaggcagtctggcttcagagcttctgctattaaccactataacatactctagagttgcaatgtcacttgtggctattgagcacttgaaatgaggtcagtcagaattgagatgcactgacagtgtaaagtacatactggatttcaaagatgtggtacagaaaaaaaaaaagaatgtagatatctcattaatacgtctgtatattaattgtatggtaaaatggaaatatttggggtgtataagcttgcataaaatataccgttaaacttaatttcatctgtttctatactttttaaatgtctaccagaaatcttcaaatgtcgtaaacggctcacattataggtctgttggacagggctcctctagaggcacaatggggtgttttacggtataccagcatggaggcagaactcatggcatggtgtggactcactcccaggcccctcatccccatgtgtgtgacacccgtatatacagattagaagggaagtcatgaagatccgtaagcaatccagctctttgatctggttcctgaatacctacctcatccaagtaaatgttaagtgtgtcagttccaaattcaaccttcttcaccaggggttgctggagaagctgaataagagagggagaaaaaaaagatactaagagccagagccttccctggggtagtcttccaaagctctgccatgatcaaggaaacaatatatactgtggaaaaggtaggaaaagggaaccaagactattacaagttgcatgtcatatatctgctacaaccttgcagcccatttaaataatccaatcatgagtttgtgtgtatkaatatatacatatatgcacacatatatgtacatacatgcacatatatacatgtatatatacctacatatgtatacacacacatatatataatcacatactgtgtatatggatgccatatatatatatgaaaactacttttcttacaagtgtacatacatatacatacatatatatgtatgtatatacatgccttgtgtgtgtgtgtgtatacacgccatgatgcccattttaccagttttttaaattataacgttaggtcccctcacarctagataaatgaagaaaacagaagtaacttactaactgattggtgccctccatgggactgaacccagatagcatcttcacttccacaatagccayattggaagagctacggctccccacataactgagagcaggaagaagaaaacacatgtgagcctattacttcagtgcactctgcatccccaacacacacacacacacacacacgtacacacacacatacacagmcacacacacacrcaagtgtcccagctcagctcctatgaccaggtgctctgccggccaccagcaccccagctttaatcacctggtgtgaatagtgagagtcaaggatcgaggtgaagtcggytgctcacatctagcttttcctatttccacactaagactaaaggtcttcatatttgtgggagggagaatattgtatctcaacaccgtctggtaggaagaaataggtagccaaatcarasttggaaagaactttaaagattgtacagttcaaactacttttcttacaagtgagaaagaaagagagagagaaggcctaaggggaagatgctctccgactctccttcccaatgtcygctcattctcatggatctctacttacctgcacatagacacagccctggcctgaggcctccaacgtgtacattccagggayattgggcagggtatcctgctgaaataccaatctgttractgactgtatgttgaatgtgcgctggaaattctcagtggattttacaaccaggttgatctcctcagatggcaygtaggcggtagtggcatatttggcaagagcttggagagcaactacagtatcctgagggaaacaaccaaacgtatacttaccattttgtgagccattggaattaaccttgaacaactctataacccacacatctggttgttgttagttggcttggatgatgacttctttaagtatttagagaactatacccacctcctctggagaagctggcctagaaatcacagtagcttgctttttttttttttcagatggagttttgcttttgttgcccaggctggagtgcaatggcacgatctcagctcattgcaacctccgcttcctgggttcaagtgattctcctccctaagcctcccaagtagctgggattacaggcgtgtgccaccacatccggctaattttgtatttttagtagagaaggggtttctccatgttggtcaggctagtcttgaactcccaacctcaggtggtccggctgccttggcctcccaaaatgctgggatgacaggcatgagccaccayacccagccagtagcatgcttttatagaaaatcaccatcaacaaggtactactgaacatccacagattacttggttaacctaatcaattcatgttcagaaaccaacagtttcagaatgagttattgctagaagcaagtggataattgttcagtatatattttacagcttccttatttgggggagaaacagtagtaacttgatagccctagaaattgcagtctatgaagtcatttaactgtgtaatgatcttctacatgacagttggaaggagtataagggaccctaggaaagtccttccctgcaggctggcttcttagccattataccatgtgacaatcttttatttctctgggaataagacagataaactgtcactaagtgagcatggtacagtgatatttgaactgtttcattctgaaaacataattcatataaattacaaggggaaagaaaaatgaatgaagtgttcaacaaaattgttatatctcactcgtgtaaaatatctattataaaaaatatctattacaaaaaaaaacccgatttcttcatctcacaaatgaaaaatacattcttatttcgacattatcactgtcctacaaaacaggaagacaggtcacccaccctggtgaagctgtgaagaagttctatctgtgcagcttcaccatctacaaacaatttttgtttaccttttgtggactggagccagggaggttttttactgcttgaacatatggagacaattcaaagaaagggacctcactgtcagctgaaaaaccagtgtgggtaatatatgatatatgacttcttgtgatagccaaggatttcattgaaaaaggattctgacatatacctgtcactgagagttgtaaacatttcacccactgctttccaaaaatattattatatattataattattcaggaccgagcaagaaggagtattttgtgatctttggccaagaatttccctgaaacagggaggcatagtaccatataatttttttaagtttcaattaagtcattaccatatttaaacttggtgctttttttttttttttttttttttttttgagatggagtcttgctctgtctcccaggctggagtgcagtggcgcgatcttggctcactgcaagctccgcctcctgggttcacgccattctcctgcctcagcctcccgagtagctgggactacaggcrcccaccactgtgcccggctaattttttgtatttttagtagagatggggtttcaccgtggtctcgatctcctgacctcgtgatccacctgcctcggcctcccaaagtgctgggattacaggcgtgagccaccacacctggcctaaacttggtgcttttaacatttttaccaaacatgcaacctattaaaagatgttcattctttcaggtctgatttacatgttatatcttcagtgaaattggctaatttcaacaaatcagaatataatcttcatgagaacaagaaatacattttcttagttatttctgtagcctcatcaaagtgatttggacatggtagatatttaatattttcagaatacatagattaatgactactctcttcattataatctaaaataattttttatgatttgagtttatcatacaattctacccctctgttttttccatactgccacaccactcattcaatttcccaatttccccttacccctaacctagataaaggaaacagtctcctgatctcttcaagtccaatgtttctcctctctaaattatctcacacaccaagtggctgattaatctttctgaaacaaagttaaaatttttgttgttgttgttgtgttgttgttgttgagacggagttttaactcttgttgcccaggctggagtgcaatggcgccatctcggctcaccgcaacctctgcctcccgggttcaagcgattctcctgcctcagcctcccaggtagctgggattacaggcacccgccaccacgcctggctaattttgtatttttagtagagatggggtttctccatgttggtcaggctggtctcgaactcccgacctcaggtgatccgcctgcctcggcctcccaaagcactggtattacaggcatgagccaccatgcccggccccaatgtttcacattcaacaacaaaaaaagaaaattaaatacatctggtactattaatgtgctcttataacccattttatgaatacttccatatattgttcacaggcttttcctctctctaagcccctggaccgagaaggcaaggacaatatgttttcctctatctccacacaagatctaattctacctgataagtggcagtgggagaacaggctgtttacctgagtagaagagaagcccccatatgcattgcgttgcttggccaaccaagccactatgctagtggccttcgctatctccttttgagtcaggctgggcttggtaagctgggccaacaatgcatatgctgtgagttccacatctacagccgcaggctcagaccaagggctggcgttcgatgatggagtaggtttctggctccagtaaatggattctcctatggaaaaagaaacataactaggatgtccttagaaggaactggctttcccacattcactttgtaaatgcagcatcttagagcagagtaagtaccaactgagaattaaacagagtagaaaaaaaatttcttagatttagctgattaattgaccttgatgtaaatgcaaggatgcatgtgcgtgcctgtgtgtaaagctagaagcatcgataaatgttcctgcctccagcaattacatgaaaaccacccttgttaatttatcagttttgatgctaatggaaataggtaaatagaagcttcttataagaatctctgtgtttgggggcaatttttgtttgcttacagttttatgaatttttcagcatttatttcatttaatcaaagatttaggccgggtgcggtggctcacacctgtaatccagcactttgggaggccgaggcgggtggatcacctgaggtcgggagtttgagaccagcctgaccaacatggagaaaccctaactctactaaaaatacaaaattagccaggcgtggtggcgcgtgcctctaatcccagctacttgggaggctgaggcaggagaatcatttgaacccgggaggtggaggttgcggtgaactgagatcacrccaatgcactccaacctgggcaacaaaacaagagcgaaacccagtctcaaaaaaaaaaaaagatttaacattttaagtagaataaaaatggcagagtatatgaaagaattctgagaaaccatgaagaaatgctaatgaggyyaactatatgaaacatgcttagaaggcagtccaatagaatgagaccaaaagaaacctctgtgacagccaagatgacagataatggataacttgaagaaaaataaataagaaatgagaagactgtamgttagaagactaattaaacagaattttagagataataagtaaccacagaagggcaatctaattggaagaacgtaacaggaaacatgtgagcttgcaatacaagataatggaaaagagatcatcacaataaaccaatayacggtggaacaggtgtatttaacccattgtctcggacaacatttcatgactggagttgcttagacacaagagaaaaaactacctgaccccctgtgagaggacagctcagccatgacgctcatataaatgaaggctgagactgcacttctgcctggaagaataattttaaatacacagccagataaatgaaatgcattaatattttatttacaagatctgtcatacttcaaatagtattctaaatatatttaaagtggtccaggccaggtgcaatggctcacgcttgtaattcagcactttgggaggccaagaggggcagatcacttgaggtcaggattctgagaccagcctggccaacatggtgaaaccccctctctactaaaaatacaaagattagccagtgtggtggcgggcacctgtaatcccagctactcgggaggctgaggcaggagaatcacttgaacccaggaggcaaaggttgcagtgagccaagattgcaccactgcactccagcctgggtgacagagcaagacaccgtctcaaaaaaataaaaagtaaaataaaaatttttaaaaatatttaaagtggtcctacatcaaagcactttcaaagatctccaaaagggtgattccacaatgccaatatattttccgactagcttcttcaatgtagtttctcttcacattaaaagtataaaaatgtggccaggcatggtggctcacgcctgtaatcccagcactttgggaggccgaggcaggtggatcacctgaggtcaagaattcgagaccaccctggtcaacagggcgaaaccccttctctactaaaaatacaaaaattagctgtgcatgatggcacacacctgtaatcccatctactcgggaggctgaggcaggagagttgcttgatcctgggaggcagaggttgcagtgagctgagatcacgccattgcactccagcttgggcaagaagagagaaactcgggcgtggtggctcatgcctgtaataccagcactttgggaggccgaggcgggtggatcatgaggtcaggagatcgagaccatcctggctaacacggtgaaaccccgtctctactaaaaatacaaaaaattcgccgggcgtggtggtgggcgcctgtagtcccagctactggggaggctgaggcaggagaatggcgtgaacccgggaggcggaacttggagtgagccgagatcacgccactgcactccagcctgggcaacagagcaagactccgtctcaaaaagaaaagaaaaaaaagtataaaaatgccctttgagcacttgcgtgtgtttctcacaaacctcccaacaataatttgatgacttaataactgttactaaaatgaatcctagagtacatgtgtgggacagaggttactagggagattatagataactcacagcttatgttcacaatttcaaagaactctcaacaggaccaacatacctgagatgatagcctgttgatctaactgtttaaggagaatgtttctgatgtccatttccccagccagggagaaaatgtaagccaacagggcctgtgtgtagaggttggtcrtggaggtggccraattcttgagacaccrtagaccctgactcaccattgggtcctaaaaagtgaagatgaagactataacttataaggcattcctttaaaaatggcaagtaatcaggaaatcatcttatccttcttgaccttaaaagggtgactagagacaaagatgggtgaatgtctctaggaatacgcatgagaaggagggtatcaagagcaggagccaggagaacttacatctacatcctttcccatctccagcaatgcagctgtgacatacgcagtcaaggagacctcatcatcarcaccaccctagaggcaaacagggaggcagtgagtcagggcarcaggcagcagctgcaagaattatgtgcagattgcaaaacagcctcccctctgaatagatgaataatttttaaaaagaaaaaagaaaagaaagctcttttttccacaggctttytgcagctccaagcctccaggacacacaaagagggaacagtttggacttcataactgcacagccttaaacagcctgcaggaggcagcatgtggacttcagctgagtgggtatttaagaaacccaagagaaggagttaggaagggtaagagctttaaagaagggaggaataaggagagaatctgccgcatcaccgcatctgagcctcctcacatgcagctcccctcaagcagcacaatacccagcccttctccagcagagattaggtgagaccttccctgcttatcgcctttcccagaaagagctaagcaaatttttaaaaatatctactcaaattattatcctcattctataaataagaaaacaaacacttaacaagattaaatagcttgtggtcacgcacagtggtttatgcctattatcccagcttgaggccaagtcggtggggaggatcgcttgagctcaggagtttgaggccagcctgggcaacacggtaaaaccccaactctacaaaacctgcaaaaattagccaggtgtrgtggcacgtggatccgtggtcccagctattcaggaagctaaagtaggaggatcatctgagcccggggaggtcaaggctgcagtgagccatgatcgtgccactgcacttcagcctgggtgacagagtgagaccctgtctcaaaaaaatgaataagtaaataaataaaaagattaaatagcttgctcacggttacatggctcatctgcagcaggactggaatttgaacccaggacatttaactctggagctcatgtgccacaccactaaccttgkctacacagaggatggatttctcaatggactggcctgctctcaaaagaaagtaggaagaggctgggcacgcataggtcacgcttgtaatcccagcactttgggaggtcaaggcgggtggatcacttgaggccaggagttcaagaccagcctggccaaacatggtgaaaccccatctctactaaaaatacaaaaagtagccaggcatggtggcacatgcctgtagtcccagctgctcaggaggctgagatcacttgaacccaggaggtagaggttgcagtgagctgggattgcgcaactacactccagcctgtacaacagagtaagactcttgtctcaagaaaaaaagaaaagaaaaaaaagggaaagaaggaagaatacctctgagatcttgctctagtcaagtcctttatcttagtagagacagggtttcagactggtctctaattcctgacctcatgatccactcgcctcagcctcccagaatgctgggattacaagcatgagccactgcgcctggcccccacgcatatttcatacagtgtataagagaagaagaagacaaaaacttaggggagactaataagatcctgcagaggaagactaatgaatcctataaatagattttttttttaacactcaagatttttaatccttgccctggaatagcaatgtaagtgatctctctagaaaagtttatacaagtctttcttgcactgagtgtgtcctgaattgaacaagttatcctgcaggatctacgcctcgccctctgcttgggacaggtacagacaaggtagtgaacagaagaaagcagtgcctctggagtgcaactgcctggttcaaatctcagtcctgccacttattagcatgcaccttgggcaatttacttagtctccatggcttagtttcttcatctgtaaaatgggattaataatggcataccaatacctagctcattgatttgttgtaaacatgaaataatatcaaataaaccacgtgcctagaatagtgmccaatagagtaaacttcttacaaaagacgttgggctgcctactagtcctcaccacaggaaatggctttcccagatggatttggtgacacagtaagaggcccagagatcttttagtccagtagtatcaaatttcagtgtgtatcagaataatcaggagggcttgtcaaaacacaaatttctggcccaccctcccagagtttctcattcagtaggtgtgggctgggagtcagaatctgcgtttccaacaagttcccatgtgatgccaatgctcctgatctgggaactatgctttgagaaccatgttccagtccacattctctttttctttttgaggcagggtctcactcggtcacccaggttggggtgcagtggtgcaatcacggctcactgcaggcttgacctcctgggttcaagtgatcctccaacctcaaccacccaagtagctgggactacaggcatgcactaacaagcctgattaatttttcatattttttttgtagagatggggtttcaccatgttgcccagggtggtctcaaactccygggcccaaacgatctgcccgcctcggcctcccaaagtgctgggattacaggcatgagccactgcacccaggcttcatctgtattctcattctacagacatgaaaactgaggcccagaccagctaagcattttgatcacggtcacccagagccacagtggagatcaggagaaaactgattcccaggccagtgctcttttgcttctactcggtcagaggtgtggggtccttcgagacagtggttggctgcaggctcctggacagatccgcaccttcatagctgtrtgaaggagatttccyacgttggcatagcagccactggggagctggtttcctgccatccacttgagagcatcctggatgttcttgggatcaatgaagatgaatttctgagcttggccaaagcattttgtgacaaacgctgtcagcctacatgggtaaagaggaaaatatggcatgaagaggaatttccaggtgagggtgcaatcatttcttcatttatttgggtgtatacttccagaaggggagctgagggaacatatgccatagcaggcctagaaaagagaggcattaatgggcaccaatgaggacaagaacaggggaggcacaagctcaggaagatcgagggacttgaccatccatgagggtgaaataaacagtattaaagaggtagaagactgagtgcaagaaggaaaggggttaaggggagaggtagtggaatagttccagagggctcaggaattaygctctggagtacagaactcattgggaattgggtgatattaccatgtgtttccatttccatctcgctccccaaaggcactgtatgagccattgctgtgtttgtacatcagctccttctggtaccctgggaagccaaatgtggttttagatcacagcgacaacttcagaaaacacccccatgccgttcaaggatatgggacacttgaggggctggaattccctgtatcatcaatctgtcatagggcctagtggaggagagtgttcaagaaagaaagactgaaccaacttacctatttccaggaaacccactgcccgagacctgatctcctccgtcagcagccctgccttctccaggtactgcaagacatagatgatgggagcaaacaagaccatgttctgctcgccayagccactgggcatctgcaccagaccatccaggttctgcagrgctgtgcccataatgtctcctgggatccaaaaggagagagagaaggtrggggtacagagaagaagggaccctctaagagttatcatcattcactgaacaaacacgtattagctatcatttaataagtacctactatgggccgggcgtggtggctcacgcctgtaattccagcagtatgggaggccgaggagggtggatcacctgaggtcaggagttcgagaccagcctgaccaacatggacaaaccctgtctctactaaaaatacaaaaaaaaaaaaaaaaaaagtacctactgtgtgtcctgggaagaccacagtaaatcaaactcggtctctaccctcaaaaaaactcacagaggagcaaaccattacaacacattacaatttttattcattataaacaattttaatacagtactacaatgtcatactggatatgtacgaggtgctaggggacacggagaggcacataagctatctaagagagttcagggcttttaagaagacatgtcactgagctgatgagtgatgtgacaaaacttataacacttaggatcaatctcttaagctcctctaccactgcatgtacgttcctcaccctccaaatcaccaagtttctctaaaacacagttctgacactcttttccaagttgtcactgaccccttcatatacttcccaagccagtgaacctgacataagtgactcattaacatctgcattgtagccaacaagctcaattcaatctataaatgtgtcctgaatgtcaactatgttgcaggaactgtactaggaacacaaaagaaaaagatgtggcccttcctcttcaggagcccccaacacagtgtggaagacagatatagacagtgaactctaatacaataagataagtgctatgtcagacttacgaataaaatagacaaaacagagacactgtgactgcaaaggatctcaatagagggtgagggagtaaagaaagagcctaacattcatagggctcctactacatgctagatattgtgctggggactttatattgcatttaatctttacaccagtctgagaggtaggttattatcactgttttacagaagaggaaagaaggcccagaactgttcactaacttgttcagggtcacatggctattaaatgacaggttagatatgatttctamgttcatgcttttcaacccacttcctcccttgccccaaacagtaagtgtgctgcctattgtaaatatggttgtatcttccctaaactatacccaaattcctcagttttgaaaatggttgctgcaaatattctgttttcccttcacccaatttatagactgtctaaacctaaaatcaagcatcagcgaccttaccttcttcctaccctgactctcttccatttttaactagagtacaagtctaatcccatctgtactgttgcctacactgtatttccctcctatataaaatasgctctttttccttcatcacttgttattagttacactctccggataggtccgtatgtcccgccccactccacacctttgcagcctccattmgccttttcctttctgagtcaagaatctctaactgcttacccagaaccgtaacataagccttggtcgagtcaggaacaatgtccactgggagctccagggagacagattcagatgccacctttcctgtsagatgcagaaaaaaaggtgacacaatagaagatggggaatggcaggggttctcaagacaaaattttagaagaactttctataatccagggatttctgtactcggtgctttctctgggatgcagaaagcactgggtactattcatagtgatcttgctgaaaataaattccacagagagtcatcatcgtgctgcacactttctcttcttcctcctgcctcccagttaatcagccccatgaggaatggcacttcagactctcctattccttctggtactatgcattcctccttttgcctatgaaaatctcctgctgccgggtgcagtrgctcacgcctgtaatcccagcactttgggaggccaaggcaggaggatcacaaggtcaggagttcgagaccagcctggccaatatggtgaaaccccatctctactaaaaatacaaaaattagccaggcatggtggcatgtacctgtagtcccagctactcaggagactaaggcagtagaatcacttgaacccgggaggcagaggttgcaatgagctgaaatcgtgccactgcaatccagcctggacgacggagcgagactccgtctcaaaaaaaaaaaaaaaatgaaaagaaaatctcctgccctctaagggaattctcaccaccaatcctgctctgagtccacccaccttttgggcacagcaatgagctgtgtgtcttctccaccaggactccctcaggctgcgatgaagagagacacagataaaaacaacaaagatgaacatcaggagggatggcactaaaggaaagggaagggaggcccctcgctgtgcccccagggcttccctcagaactgcagacaagagcttctcactswrsstcarmmgaactctgcgtcaacccaaggatgggccctttctgtaaagttctttctgggcaagtgctagagccaaagmcacatttaggcaacttctaagaggcaagattgacaatgggcttcatgatgggacgaaaaaggcagctattgatgaagacagacattttaattaggtaaactaacatttgttgagtgcctatgaggtgccsggttttaggtgctttcataggccgtgggtgtggattaggcaaatgttcaaggggccagggaaggagaaagttgaagctgcctggttggactggagtatggttgctgtgagagactaactcacagcaagacgagatgctgagcatccctcggttggttgctgtctctacctctgaagaaaactcactttgacgagaactggcttgatgagcgtgtcacttcggcccttttggggaacaaaccccttctggcccccacatggttcattgctgtccagaatctttgtactaatagtaaagttaatgtgacctgagagaaagaagaagggaagccattagccctattgccagaggtaccagtgaggtccattcccatttggatcagcatttctgaaactttaatggggatcttgcaacagtgcaaactctgctgccatagacctggggtggggcccatattctgcatttctaacaagctcccaggtgatgccagagaggctagtccagtgtggtaggtaacctctaagggccctcagagatccctgcatcctgatatttacatccattgagtgtgagctggattgagtgactcgcttctgttaaagagaacagggtgaaagtaatgactcttctgggattaggttacaaaaaagactgcagcttccatcttgggygcaccccttttctcaaactgcttgctctggggaagacagctgttgtgtgatgaggcagcccagcagagagattcatgtgatgagatactgagtgaggcccctagccaaaagctgaggtcaagaactgtgtccttcagtctagcagcctgtaaggatcagagactttgggatgagcttgaaaaatcaatcctctcctagtcgagtcttcagatgaaaccagagtcctgactgacagcttgattgcaacctcatgagataccttgagccagaggtacccagctaagctgcacccagattaatgacccatagaatctgtttgataatgtttgtccttttatgacacttaagttttacaataatttgtcaagcaacatgagataactcatacatatgaaaatcaaactttgagttgcaaggatttaatctatgagtgactgacatcccatagggttgggggtgaggattaaacaagttaaaggtgcrgtgactcattcttgtaatcccagtactttggaagggtgaggcgggagaatcacttgaacccaggagtttgagaacagcctgggcaacagagcaagaccgcttctctgccaactgaattagccaggcatggtggtggcatgagcctatagtcccagctactccggaggcctaggtgagaggatcgcttgagcctgggaggttgaggctgcagtgagcaatgaccacaccactgtactccagcttaggtgacagagtaagatcttgtctctctaaaaaaaaataaaaggccaggcgcagcggctcacgcctgtaatcccagcactttgggaggccgaggcaggcaggtcacctgaggtcaggagtttgagaccagcctggccaacatggcaaaaccccacctctactaaaagtacaaaaattagccgggtagggtggcacgcgactgtaatcctagctacttgggaggcttggcaggagaatcacttgaacccaggaggtggaggttgcagtaagcacagattgcaccactgcactccagcctgcgcaacagagcgagacttcctctcaaaaataaataaataaaataaaaattaattagtcaatcaatttaatgagttaatatatgtaaagcagttagaatagtgcctggcccagggactcttatagtaagtccttgattagttacatgaccatgtattccttgtccagctataaatattaaaagctctccctttcacactcaaaatattccggtttgaacaaatttgtttggtcacctatcaaagagtgtttgtgtattgacttataacagccttaggagggagaaaaatagtggaaaatggaggaggaagcaaagcagatgtggcagaggaaaagactgagtgctcagtcactggtcttctgctgctggctttcctcgcccgtctaccacttccctctcttacccaatttgacagctgtgatgttccagtggtgggtttttgcktcatcagcacagagacaactggaggtctgagaatctgcccatgattctagctggtactcatgcgatttagccaggtcagtctgaacctacggaggatgtttaagagacaaagggtacaaacaaaggaggtagtgcatagaggcctggggaaacctgggggctgagacgccgacatctcctctctttcccagggaaaattgggatgcttccaatttagagacaaasttatgggggaggtgtgattccagggctgacacctgattcctgtatccccagctctcaccctgatgcaatcctttaggtaattgaagatggtggcagtaagacgaaaggattccccacggactactgagtaagggagagtcaggtcaacaaagaayggcttgaaagcagttagtccaacagtgggtgaaagcccgaagcctcttgactgggaagtgcagaaactcatcgccttccactcggtgatggcgtcaggaactgtgacgtggaccrcctccttccccgagttactgtgaaaacacaaggaccaacatgaggcagaggtagcgtggggcaaggagaacatttgtgaattaagccacaaattcggtggggtgtgctggcttacacttgtaatcccagctctttgagaggctgaggtgagcagatagcttcagcccagcagtttgaggccagcctgggaaacatagcaagaccctatttctaccaaaaatttaaaaattagccaggtgtggtggtgcatgcctatagtcccagctacttaggaggctgaggcaggaggattgcttgagcccaggagtttgaggctgcagtgagctatgattgcaccactgcactccagcctgggtgacagggcaagaccctgtccaaaaaaaaaaagctacaaattcatctgcagaagtaaaattgttattgttattgtatggggagaagtaaagaggcaactgaacaggtgagtctcagtgtgagtgaggctgcactcatacggaggagggggactatggtggggagtcggggtgggcatctctgtgcaagcacatctgacagagaggctggtgccctctgagtctgaggatgtgtggtctcagggcttgtcaaaatggatatgcaagcagtgagcaaaaattgatgtcaatatatacctttaaatgtgtgtggttctgtagtgagaacacagggcctgcaatgtgtgagtgtggaattgtgtggatttgttttgagtggttgtatatgaatgcatgaagaattcaggtaggccgggcgcagtggctcacacctgtaatcccaacactttgggaggccaaggcgggtggatcacttgaggccaggagttcaagactagcctggccaacatagcaaaaccctgcctctactaaaaatacaaaacttagccaggtgtggtggcatgtgcctatagtcccagctacttgggaggctgaggcacaagaattgcttgaacctaggaggttgaggcctacagtgagccaaaatcatgccactgcactccagcctgggtgacagagcaagactctgtcttaaaaataaaaagaaaaaaagaattccggaaaataaataaattcccacaccccatcaagctttctttgcttaagatttagatccattaggaatgcgtctgattctgagttttctacaggctctacattgcagaatcttactgttttttttctgggtttgttgttgtcgttgtcgttgttgattttgagaagggttttgctctgtcacccaagcaggagtgaagcaatgtgatcttgcttcactgcagcctccacctcccagactcaagtgatccttccacctcrgccttccaagtaggacacaactaccatctggctatttttttwatttcttttgtagagacagaagctcattatgttgcccaggctggtcttgaactcctggtctcaagtgatcctccctcctaagcctcccaaagtgytgggattacaggcgtgagccatgcacctggccctttactgtacttttgagtcatcacttacccaataggaaacagatcccagagccaggtctctgggaagtactggcggacctgagaatcctctgcttgatgtaaaggagttgatgactcaaaagcctctggatgaccaccgcctgctgatgaaattgagaatacgaaaactttaggaaacaggagacttcttgttgtgacataaattgggatggagggattactagaaagaaatttagagggaagcagagaacatccagtcagaggcaaggaggaaggaccaaagaggaactaactagtcacaaaggccatcgagggaagtgatagccaaggaggtttggccggggaatggatacataagcttcaggcttcaaaagctctccccagagagagaacacttgggaaactgtcctgcatctgtgacccacaacccattagcattctcgggctagaggctcagtgcaagaacaggaggcaagaggaaatctgcagagttccaggactgttaacatctcagagaatccacagaccacagaggtggcttaccacccatagcagtgctgtattctggagatctgtgactgcaatctactggcttcttgattttggcattggacagtattttcaggcccacgtcctgataggcatcagagaaataagtattaaggtggtcccttccccaactacaagggctactgcccaggaattccaccatcaaagagttgaaacaaaacattctttttgaattaatggtgaacctgggtgttcttacctgaaactcagccactgaggctggttggcttctgttccagctagcatgaaaggctttcagttaaacttatttcatcattacatacatgtaatggttctgccaaatattattcgctatgtccttactatttgacttacgctgtaaacatgctgagggtagggaccatatcagcgtactcaattcaacaaaaatacaatgagccttatgaagggtcaggcattagagagaatacaaagatgaacaagacctagttcctgacctcagggacctcctggtcagacttgggtcacacagcatcccaaatcctgctcatagaataggtgcaaattattttttataataatgataagagacctctggtctaccttctctaattttccctcctgattgatctcatggaaatcagtgtttgaggacaacaaaaagaggaagactaggttggacatcttcttcaagcataagggccaacagaggcgaccttacacgtcagaagcttctttcaagattttgttcccatcagtgcccatatgagtctctctgctttcttagatatgaactttcctttgcccattcccaccaccatctttcccataagaacaaaatgggtaagaagacctacccggaaaaagctgaaaaggtccgtgccttcagagaacgagggcctccagataatggaacgctggctcgaatgcccttggggcattgggtcaatgaggggctgaggaaagtcccatgggccagacactggacactgatcatactcagccacttgataggggtagtgaccataccagaatggaaacatcccatagacctgggacaagagggggagaggaaataaagcattgatatagtgatatcagttgagaaacttctctcagattctggtgctcagttcactactcctgtatcatttctctttattacttcagaattatttttatattcattctgtcataattacctttctcactgtctaaaactttaacctctatctcacctattttttcataatcctatcccctatttcgttctctttcttgttttttttttgagacggagtcttgctctgtcgcccagattgaagtgcagtgggacgatctcggctcactgcaacctctgcctcccgggttcacgcaattctcctgcctcagcctcctgagtagttgggattacaggcatgcgccaccatgcctggctaatttttgtatttttagtagagacagggtttcaccatgttggtcaggctggtcttgaaccccagacctcaggtgatctgcctgccttggtctcctaaagttctgggattacaggctcattctcttttcttgtctctgcattcatactaaccatgcctttctcttatcctttctttttttgtttttgtttttttttttttgtttttgagacagagttttgctcttgttgcccaggctggagggcaatgatacaacctccgcctcccaggttcaagtgattctcctgcctcagcctccccaggattacaggcatgggcccatgcccagttaattttttttttttttttctggatttttagtagagacagagtttctccatgttggtcaggctggtctcgaactcccgacctcaggtgatctgccagcctcggcctcacaaagcactgggattacaggcgtgagccaccgtgcccagccctcttacactttctaacttcattttcacaccagcctttttaccgccttatggcagtgcattatttccctaagactttctctcccctgcctgaaacctacctcttaattgtcttctccatcaactccctcctcccactctgtcagcagacagttactcacagagcggttgctcagctctctgtctggcctaagcagtaagacactctcatccaccgcccggagcgcacacagggatccgggagctgcctgcagctgcagctccacttctgctcctggaagctgctgggagggggagaagccaagggamacctggggaagggaaaggtataacttggggatcaggtcagcctggaaaggaagggaaacaacataatttgggtcatcagcaaatatgccccagctatgacatccaacccattctttcacttttgtacttatctttctttgtaaagtctagctcttcaggacgtgtatgccgtgatagagttgggaaacgtgagcagcacagtagaaggatagagaaagtttagaagacaaaaagtagagagaacatgtggaataactatatagaacatgtggcttcccagtatggcttttttttttttttttttttaatagagacagggtcatgcctgtaatcccagcacattgggaggccaaggcaggtggatgacctgaggtcaggagttcaagaccagcctggcctaacatggtgaaaccccgtctctactaaaaatacaaaaaaaaaaaaaaaaaaaaaagccaggcatgggggggcatacttgtaatcccagctactaaaagactgcagcttccatcttgggygcaccccttttctcaaactgcttgctctgggaaaaacagctgttgtgtgatgaggcaccccaccagagagattcatgtgatgagatactgagtgaggcccctagccaaaagctgaggtcaagaactgtgtccttcagtctagcagcctgtaaggatcagagactttgggatgagcttgaaaaatcaatcctctcctagtcgagtcttcaaatgacaccagagtcctgactgacagcttgattgcaacctcatgagataccttgagccagaggcacccagctaagctgcacccagattaatgacccatagaaacctgttagataaatgtttgcccttttatgacacttaagttttacaatattctggccaggcacatgagatacctcctacatatgaaaatcaaactttggaattgcaagggatttaatcctatgaagtgactggactccccataggggtttggggggtgatggattacaccaagtannnnnnnnnnnnnnnnnnnntccgtgggaacattctttttttaaaaaacaccccctccccaaaggggggttcccccaaaaaaagtggggaaccccgcccccccccaaaaaaaaaaaaaaaatttttaaaaccaaaaaaaaggagaccccgtgggaaaaaaatataaaaacagggggtccccccaaaggggtttttttttttttttttttaaaaaaaaaggggcttcccgtgtattcccccccctttgggggccaaaccggggggtatccctgtgacgagggtccaagccccccggggtttcatggggaagccccccccctttttaaaaacccaaaaaaaaaaaaaaaaaaaaacccggcatggtggggcaaacttgtaaacccagctactcgggagttttaagcaaaaaaatccctttaacccaaaaagcaaaggctgcaattaaccgaaattcccccattgcgcttcaaccttggcaacaaaaagaaaactctgttttttaaaaataaaaaaaatagacagggtctcgctctgcagccgttgaactcctggggctcaagcgatacacctgcttcagccttccgactagctgggactacaggtatgcatcaccacactcaactaatttttttttttttttttgagacagagtctcactctgtcactcaggctggagtgtaatggtgtgttctttgctcactgcaacctccgtctcctgggttcatgcaattctcctgcctcagcctcccaagtagctgggattgcaggcatccaccaccatgcttggctaatttttgtatttttagtagagacacggtttcaccaggctggtcttgaactcctggcatcaggtgatccacccacctcggcctcccaaagtgctgcacacccagctaattaaaaatttttttgtacagacaggatcttgctatgttgtccaggctggtcttgaacccttgacctaaagaaatccctctgccttggcctcccaaagcactgggattacaggagtgagccactgcacctcagccagcatgacttcttaaaataaaaagtaggagagagatggatttcaacacaaaccccaaacactaaagatataaatataatacaacatccaacgtcaacactatcttctttccctgacttgtcttgtttccaaccgcagcacacacaagatctttctctatgcccaacttttatcttcacccttctccgctatcattttacctgattgtcaaagcacatctcgactgagaactgaattttgtcagctacaacacctccactgggaaaaatggcatagatcaccagggaaggatcaggggccagtctcgaagtgaaggtcagtgagagagagaaggaggctttcagtcctgaaagagaagagggaatatacaggaaaatcagaatgcacattcacctgccaacggcatctaaccatatgtacttttcactgagccagtgcaggcaccatggtgcaagttacttctcatttttctcttctcctgtgataactgttagtgctccaattccattacttctgtggataagaatttttttattttattttattttattttattttatttatttttttttttttttgagacggagtctcgctctgtcgcccaggctggagcgcagtggcatgatctcggctcactgcaagctccgcctcccgggttcacgccattctcctgcctcagcctcccgagtagctgggactacaggggcccgccccgacgtccggctaatttttttttgtatttttagtagagacggggtttcaccatgttagccaagatggtctcgatctcccgacatcgtgatccgcccacctcggcctcccaaagtgctgggattacaggcatgagccaccgcgcctggccaagaattgttttctggaatttaaaaatatcctgtttgcttccgggaaaagcatgtacactcacctttcttcttagagttcaggtgtttctgcccctccatcaccaaacttcctttccctattaactaaagaagaaaagaaaagaatcaactgcacagaagttacagtaatttcaccttggaccaacttccagagcatctctgcatcccttcatgaggagaggttcctttcacagttcagagtccgggtcaatacctcacccagcatccactagcttgacaaatgcaggatgctgccaacgggtcctggtggctcctcctgcagttggaggtctggctgagaaccacgcaggtggatgggaggagtctgacagcatagaaattgttcctcaccatagataactgtctgccatttcttgaagatctccaaattttattttcttataatctttgtaacagaaagtcagcgaaaatctatcctcataagtgttttttaattacagctcaatttaaaattcagtggaaataatttcatcctaaaccaccctgagcccttctgacattgaaccctctagaggagaaatctcctcttctaactcccccttcccgtccactctcacttgaaacagaactcggtgatcttgtttgcaagcaggctctcatcccacgctcctgcagggctccaaggtcggttccttggacgcctgcccagcattagccattccacgtggctcggccctaacttcacttttgtcctacacctccccacacttcggtcctgaagacagagcccgctttatcactggacttgttattttccacctatcttttctcttttcgttgtattaggatgattttttttttttcacttaacgacaacactgaaaccatggaagctactgcaatgatccagaggggagaaagtctctcatagactgacaggaggataacggaacaaagaggctccgagccatcaaacctgaggtttccattctacttcctgactgtcaccaaggtgacaggaaagctgcttatccttatacattgctttcaggctaccaagttatgattttatttccccaatgaggctgctatcgatgtgaatttaaccccatatcatctatttgataatattgaccaatggaacacagaatgaaatgtatcctggctgggctcggtggctcatgcctgcagtcccagcactttgggaggccaaggtgggcagatcacctgaggtcaggagttcaagaccagcctggccaacatggcgaaaccctgtctcatataaattaaaaaaaaaaaaaaagtatcctgagtcccatccctccccactctccctcccaaccacccagctggttttgtttttgtttttgttttttttggtcctggccagcactattttctcaggtaattcctcattttattttcccacacaattttcctgtgttcctgctcagaatctctttcttcccccaatgttttccatctcttacacctatactgggccatgcagtatctcatagccacataggaatattgaatacttgaggccgggcgcggtggctcatgcctgtaatcccagcactctgggagactgaggcaggtggatcacgaggtcaggagatcgagaccatcctagttaacatggtgaaaccccgtctctactaaaaatacaaaaaaaattagctgggcgtggtggcgggcgcctgtagtcccagctacttgggaggctgagacaggagaatggcgtgaacctgggaggtggagcttgcagtgagccaagaacacaccactgcactccagcctgggcaactgagcgagactgtgtctcaaaaaaaaaaaaaaagaaaaaaaaaggaatattgaatacttgaaatgtgctcagtccaaactgagatacgctttaagtgtaaaatacatactgagtttcaaagacaccgttgaaacaagaatgtaaaatatctattaaaactttttatatggctttcgtgttaaaatgttaatattttggatataatgggttaaataaaaaatacatttaaaattaatgtcaactgttcttttacttttttagtgtggctttaaaattgtttttaattagatgtgcatctgcaattcagatagcctaggtgcaccctctggctgactcttctcattctctttccttcccagcatactctcacccgtccccgtttccyggtctcacatagtaggagaagctgatctcttggtcagggcttgcatcggccgggtcgatgtaataatccaccagcacttcctggggctggccacatttcaaggggccgtttagccggtggatgccaaggaagctgcgggttgtgctgtagaagggtcgcaggtgcaggtaggcattttggtagtaacgtggcacttgttccggattatayactaagtcttccatttgaaactttccctgagaataaaagagagagagagaattttagcatgygctccaaccatggaaaccccacggacttgttacggttttcaaatagagctctttctctcaaatcttcactgcctgagaatggcatgtgggtatttcattagcggtccagccaaggatggataaagaatccataaacgtagctgtgtacagcaatattttggtatgtaggasagcgacagaagggctgaattatagttactaaatgagaggaaattgtgggtgatgtatcttcacagatattcctgggatagatgaacgtgacttagattatatagaaatcaaagattatatttcagggataagaaaactaggcacagaagacactaagattgaaaaataattatttctgagtaactgagtcatgcctagagtaaagaaatagtcaaattagccacaaggcaagtagtatgtgtttgcttaagtcctgaggttgaacgatctcattaatggctccaattcctcacacgcacccygccccctccragatcagcatccttgagcatgtggtcttccagtaccctcctagtctgtgcccactgttcgatttgttgggaawggggtgttaacatatgcaacaggggccgggcgcggtggctcacgcctgtaatcccagcactttgggaggccaaggcgggcggatcacgaggtcaggagrtcgagaccatcctggcyaacacagtgaaaccccatctctactaaaaaatacaaaaaattagccgggcgtggtggcaggcgcctgtagtcccagctactcggggaggctgaggcaggagaatggcgtgaaccggggaggcggagcttgcagtgagccgagatcacgccactgcactccagcctgggtgacagagtgagactctgtctcaaaaaaaaaaaaaagaaaaaaacatatgcaatatacagaggtttrgaaaagccctgaacatcagcttttgcacttgcacctcatcactgccataagaatatacctgggctagcyggctcctgcatgagaggcatgcggagcagcagcttatggccagccgatctgcagacagttctggaaatcgaaatcagcagagctgcctgactgaatgccccagatgcacaagcagtgaatgctttctgctgcacgatactgaagtttgtagctgtttgataagaagcattgttgtggcagttgataattgatacttataagttatctagaatctagagttctcttgtttgctgtttttattaagtaatgaggggatgggaaggggaaagagaaagaaaaagactctgagtcacctattcctccctgctctaacttcatatatagataggatcagatagagatgggggtaagttaaaagatgtattagtagaaatagtagttttcatccaagtaaggactatttatttgattgatattaaaaacagaaagcatctaaggaaaactttttgtcaacgggagagcaggacttgtgagtgagaaagatgtaattccaagcagaggggagrataggaaacaggaaaattctgaagttttccttcagggaagccttcctttctaggaagctggtcctccgtccatgcttacctccagagaaacgtctgtcccattccaaccggatgtctccaaggtaaagggagctaggccattgttatcagtaaccagggtctggttgaaggttccatttgtgccataaatcaccagaaacactagatggttcttgaggraggagtcrtcatggcccctaactcttatctgaaggacaaagatcattacggattagaattaggtttggagtaagcttgagtatgaggtaaagtgaaatattaggttggtgcaaactaattgtggtttttggcactaaaagtaataacagaatttctaagaatacatttcaggaaagagtcctgaaaaagataaatgtgattcaagcttttgaactaggatctgtgaggaaccgaaaaacaaacagaagtaacagcccagagcagagctagatttgcccggtggctaatgaagcttcagggctcttcatatgcacaggctccttcaaaggttctgcacgttgttttgctttcttttttctttccttccttccttccgttccktccttccttccttccttccttccttccttccttccttctttccttccttctttccttccttccttccttctttccttcctttcttccttcctttctttctttttttttttgagatggagtctcagtctgtcgcccaggctggagtgcagtgggacgagctcagctcactgcaacctctacctcctgggttcaagcgattctcctgcctcagcctcccaagtagtgggactataggcccgtgccaccatacctggctaatttttgtatttttagcagggacgggttttcaccatgttggtcaggctggtttcgaactcctgacctcgtgattcgcccgcctcagcctcccaaagtgctgagattacaggcatgagccattgtgcccagcctattttgctttctttttcttaaagcgaatcccctaccctcccaaaytgtgtaatccttaggctctaaaaataatttgcacccacccttggtctagagaaatgataactgaggaataaatgcatctctatgtgtgcaatattattgtgtggaccagctgtacaagaagtaaagaaagataagctgaacaagagagaaattcagttagatatcagaaagaaaacactagcaaagaaaatttaattatgtatttatctttttttttttttttgagacagtctcgctctatcgcccaggctggagtgcagtggcatgatcttagctcactgcaccccctgcctcctgtgttcaagccactctcgtgcctcagactcccgagtagctgggattataggcatgcgccaccatgcctggctaatttttgtatttttagcagagacaagttttcgccatgttggccaggctggtctcgaactcttggcctcaagtgatctgcccacctcagcctcccaaagtgctaggactgcagacgtgagccaccacgccctgccggaaattttaaaatctctaaagaaaattgctagtcaggcacagtggctcactcctgtaatcccagcactttgggaggcccaggtggacggatcacctgaggtcgggagttcaagaccagcctgaccaacatggagaaaccccatctctactaaaaatacaaaattagccaggcatggggacacatgtctgtaatcccagctactcaggaggctgagacaggagaatcgcttgaacctgggaggtggaggttgcggtgaacagagatcgcgccattgcacttcaggctgggcaacaagagcgagactgtctcaaaacaaaacaaaacaaaacaaaaacagaaagaaaaacaaaattgcttacagagctatacatggctgtcaaggaaagtttcatattaaccttgcctagatgcaggagaccaggctggatgatttctctagaaaccctgcagctcttaaatatgaagatttagacattagaagatcagcccctggcattagaaagacccctaaggtgtcattaatattcaaggcacttctatgggattaggggcagcagagtacagggagtggagagtgtatacccgggaggcaggcttcctggatttggtcatagttcccatctatttgtgatcaccttggaaaaatcacttagcctctgttgcctgtctcaktatccataaaatggggccaatacagtgtctgcctcattgcattattctaaagattaaaatgaatacacataaagtacttggaacagcactaagttagctatgtggctatggctgcaggaaggaggcaaagtagatggttatgcatttttttgtctatgcagagaaaagttttaacataccttcccactgaaggggaaatttggatggtaaaaattgctggtgtcttcaaaggtcattgatcccatttgtggagaaatgtagatattctgagtggcattggcctccacacctgcagagggaaaccagatgtataaagatctaggcacctgatattctcatcttcacgtttaatgtcaagtctctgagagaatggtggcagagggatgaagttgaatgtatttctggccaaagatccaaaccaacctcacctccccaatcttttggagaagtatgtagtatttcttcttttttttttttttttttttttaagatggagtctcgctctgttgcccaggctggagtgcagtggcacgatctcggctcactgcaagctccacctcctgggttcacgccattctcctgcctcagcctccccgagtagctgggactacaggcgcccccgtcaccatgcccggctaattttttgtatttttagtagagacagggtttcaccgtgttagccaggatggtctcgatctcctgacctcgtgatctgcccgtctcggcctcccaaagtgctggcattacaggcatgagccaccatgcccggcccgtagtatttcttatagatggcaagatgggatctggtatttccccttgactatgaactaggaacaaggtaccatccaaacactcaagagggtaggtcttgtatacttggagtaaatctgtccctgggaccagccctttttctttctcttttcttaatgagccaaggagcaccctacttacctgwcccttcctccacaacagtagccacaatattgatttgatggctgtacgcatatccaatgaggtcaaaggtggccatgtccacaggtgctgagaaacatcctgttttgtcagtctagtgaggtgatcagagacagagatagagagcagatgaggaatctaatctctacatccattttataatgttctgtagaaggaaataatttctcatctccacacttcagtttctaatayagaaaaactctcctacaacatgaagtatacacttgcacatagataatcatgaaatgactttgaagctccaagatttgggaaagggaaaaagaaatgccttcaaaactggaaaattgtaccttactggggtttaggtcaatttcttggttccaaggcagactctaaaacactccctgtttaggataaagatccctgctttgttctttggaactgggatgataattctgggaaatgctttctactttgggctgtttagctcttttctagattgttgcttccttacgctttaggacatgtggatacgttcttttttttttttttttcggtgggggagggggactgagtgttgctctgtcacccacgctggagtgcagtggcaccatctcggctcattgcaacctccgcctcccgrgttcaagtgattctcctgtctcagcctccaagtagctgggatttcaggtgcacaccaccatgcccagccaattttttgaatttttaatagagacggggtttccccatattggtcaggctggtctcaaactcctgacctcgtgatccgcccatctcggcctcccaaagtgctrggatgacaggcgtgagccaccgtgcctggccgataggttcctttttaacctgtcatttactcacctgtccagagaggttcctgcatttgtcaggaagctgttcccgttccacctctcgataccagtaagtatttgccttctgacacacagatacctgcactgcccctagcatgggctttccataggtgtacctaaccaagaaaagcataaggagtcagagttgggaaattccacttgagatccaactcttccctcaaacaccacttcttccctctcacactccagcctctgaaagaaagctctgacaatcygggccagtgcagtggctcacgcctgtaatcccagcactttgggaggccgagacaggtgtattacttgaggccaggggttcaagaccagcctaggcaacatggcaagatcctgtctctactaaaaatacaaaaatttgctgggcatggtggctcacacctgtaatcccagcttctccgggaggaagaggcaggagaatcgcttgaacctgggagacagaggttgcagtgagctgagatctccccactgcaccccagcctgcgtgacagagactctgtctcaaaaaaaagaagaaagcaagctctgacaatcctacctttctctagctctcttccccttccctactttactcagagtcttagagtagacccamttccacaattagcaccatactaaggacggaaacagyatctttctttctcctgatccatatttatctatgggattcaatattgtgtcttgtaaagactaaatcaataatactatctgagtgagcaatggaaaaaaacagcagaaacacaactataaaatatgttcttggctgggcgcggtggctcacgtctgtaatccaacactttgggaggccaaggtgggcggatcacctgaggtcaggagtccgagaccagcctggccaacacggcgaaaccccatctctactaaaaatacaaacattagccaggcatggtggcgcgcgcctgtgatcccagctactctagaggttgaggcaggagaatcgcttgaacccatgaggcggaggttgcagtgagccgagatcacgtgattgcactccagcctgggaaacaagagtgagactttgtctcaaaaaaaaaaaaaaaaaaaggtcttggataagccatgactctgaattacataaaatgccccaagttttggcccacccataatcccacatcccatgtcatcccctcatcatgtctctcgatgcatctttaatctccaccagatcccaagcttctgctcttacctacaacaaatttttactaagaaagattcctgcaccgttgataactccttgggttccaccacttccaccttaaacttcggcagcactgaagagagtaaaaggagaaatggagaaagcactggaggaggaatcagtcagacaggcagtgagcagaggggyataaacagtgagaattaaattaatggatctaatgaaggaggcattatttaggtagcatgttcctgaagtaattagctggttcagcatcgattcaaaaatgagtaaataatcctttcccagagtacattttactccacctttgctgattttttttttttttttttttttgagacggagtcttgctctgtcacccaggctggagtgcagtggcgtgatgtcagctcactgcaagctscacctcccaggttcacgccattctcctgcctcagcctcccgagtagctgagactacaggcacctgccaccaygcccggctaattttttgtwttgttagtggagacagggtttcactgtgttagccagggtggtctcgakctcctgacctcatgatctgcccgcctcggcctcccaaagtcctgggattacaggcgtgagccactgcgcccggctccacctttgctgattttaagatgagattatgcccaatactttggcctgtccatttccccmcctaccatattcctccacactgaaagtacsaaaggtcttgccctcagccactgccacartgtaggtgcccagcattgcctctggtgccagttggaaggacaggtctacaatgccttgctcaggtaccacttccagccactgtgcaatcctgttgctatttggatcctgtccaatagagaaactgcatgatgtgcctgcccgtttgcttcccactctgcattgcaaaaagcaggtaaagaagcaaaaggcaggtaaaaaaccccacccattgttcatgacccctgtggtctgtgtccaggaagagcagctccctgtgttatttataactttctttatggcggaatgaggtaaatatttctatagatccagcccccatttggtaggaaatcttgtggattttaatgatcagactgagccctctaaagtgttatctccagttttagaaagtaggacccaggatgtcatttacaaagaatgtttactctgtttctggtcactattaggggacaaggctgaggagattgattgtaagatacctaaaacatgggtgatttaatggaaaaatggagaagatattgtggagaaatcaccttctagagcctttcctttaaaatacttctcacaggtgtttatgttatcacgtacctgttgagaatgcctatggcaagggctattaccttacactaaggggagtatggaaccaagcctggttaagtcrtctgggcacagagaagttaggggaatgagagagcggtgtagtcattacagaggctggtgtccttgtctactgaaatgtaggtgtgagagactaggagggcagaggcaagaaagcaggcacagcttaggtggatgtgggcgctcggtgctgggcagagtcatggggctctgggccaagatctcagagttgcttctgtcttcaaggtgtaccaccaaattctcattcttcctcttccacaactgacagagaagagaaagaaacttccgcttacctgtagttccaccatggagtactgaaaagsaaaaccagataatgcgggttaaagaaggttgacagcaataagaataagtttgctgaaagcaaaagttcacaaagaattcttcctttccctcttgcccatttcttcatttcttcctttctaaatggctcttttgtgccctgaaaagaataacaatgggggcacagacttcttgggagggaaacaaggcaggaggagggtaagagtgggggcaggaatctcaaaggaattgccagtctccaaaagatttgaagaactggagcgtcagaccagtctcagtaccctgtgactgagctcttgcacaagaaacatgccctaaaagaagtattagcaccagggggttcctcaatgtttaaacctcttcttggtagccaaccatctcctggcttcttcctttaccatctgaatgcttgtgggcaggaagcttactttcaagcattgcaaataattatttttaaaattgtttgaaatagttccattggagaatcatgtatcactttcctcaagacagtagttgctaaatagatgtgaaaccattaagtttgtgaggaacaggtcattgtgcttgcaactagatgagattgaaagctggaattcagtgaatagcaggagaggggctcagagagactgcaaaggtattcaaaagagaagaccagtttggatctaacttggaaagaagaaaatgaaatcaagacagtgcttgatttttttattcttgggccaagtgtcatgtgatgccaaccagtgaagaagctgaaccactaaatacaaatatcagccttgatagtagggataatggcaattcttcaaaaaaagcaaaaaataaggagatctaaggatcacgatgagctaggacttccacaaacctgggcyatataaacatcaggaggagaatatcactaagattgctataaatttccataaagtcaaaacaaaacaaaacaaacaaacacttctttaggccagacacggtggctcacacctgtaatcccagcactttgggaggctgcggcggttggatcacctgaggttaggagttcaagaccagcctggccaacatggtgaaacccctctctactaaaaatacaaaaattagccggacatggtggcacatgcctgtaaccccagctactccggaggctgaggcagaagaatcacttgaacccggacagcggaggttgcttgagccgggatcatgccactgcactccagcctgggtgacaaagtaactcaaaaacaaaatacaaaacaacaacaacaaaaaacacttcgataacaaagtacttttctcacacagggatcaagaatcaggaaagacatcagttggccagaaataggctctggaagaaaataagtgtttcactaggaaagtagcattgctgaggccaggcatggtggctcacgcccataatcccagcactttgggaggctgaggtgggcagatcacctgaggtcaggagtttgagaccagcctgaccaacatggtaaaaccacatttctactaaaaatacaaaattagccagatgtggtggtacattcctgtaaacccaactactcgggaggctgaggcgggagaatcctttgaacccaggagggggaggttgcagtgagctgagatcccgctactgcactccaacctgggcaacgcagcgaaactccgtctcaaaaaaaaaaaaaaaaaaggaaagtagcatttccgactggaagttgcctggagtttctgaataactgagtatagcaatcaagttagacagggtcagttaatatcaggcttactttacttgtttggggattaaatattgtgctgtgtaaatgaaactgactttgcaaaattaaaactgaggaaacgatgacagtgaaagaaatcagacctaaccaacgctatcttgcttctaagcagttccactcctctcaccttaggtaccctcactacgccccctctcagcaggaagaagccagaacaatcgacagccttttcccatcttcctagcccacacctgaagattaaggtgttataaaacccaaagggagggactgaagccgcctttgcaaaattataactgaggaaactatgaaagtgaaagatgtcagacctaaccgactccatcttgcttctaacttgtaagctgtccttgtggattcctgggtgtaagccagactaactttgggaaggaattcagttcatggtttgactctgaaacaaaattgataacagccctttcccaaaaagacccccttcttgcccggggaccagtctgcctttgcaggactaacaaattagctacaagattagaaattacactttaggggtcatgcagcctctgactccaagagtctgaacctcttcaaattgctcctggggagaacatcactgttgtaaaacccaagatcagcgcctgagatgttctgcagaccctgcattcagtggatcagctgacaccacccagaccagtaatctggctcaaccagttctgccatcccacccaggaggaggaaaacagcaagaaaacctcactttgaccatctatgactccatctccaacctgaccaatcagcactccccacttcccaagcccctacctgccaaattatctttaaaaactcgatttcctggccaggcgcggtggctcacgcctgtaatcccagcactttgggaggccgaggcgggcggatcacttgaggtcgggagttcaagaacagcctgaccaacatgaagaaaccccgtctctactaaaagtaccaaaattagccgggcgtgttggcgcatgcctgtaatcccagctacttgggaggctgaggcaggagaatcacttgaacctgggaggcagaggttgcggcgagccgagatcgcgccattgcactccagcctgggcaacaagaatgaaactccgtctcaaaaaaaaacaaaaacaaaaacaaaaaaaaactcgatttccaaatgctcagggagactgatttgagtaacagtaaaactccagtctcccacacagccggctctgggtgagttactctttcttcattgcaattcccctgtctcgataaatcaaccctgtctaagcagcaggcaaggtgaacccattgggtggttacataaacacaatttttatcctagctttcttggtaaaattccttttgttaatctcagtgtttcaactgaatttggagggagagtttggctggagaaatagagtggggaggaaggagtaatttcacaagagaaagagcctaactgcagaaaacagaacacctggaagtaatcccgcttcatttgaatcgtaacaggggtagttaatgagatcaaccctgagggtaagtgagtctaaaatagtgctgctgcgggccacgctttgaacccagcacttccttgttgcagctctagagaaaacagtctgttaagaagtaagcactcaggccgggtgcagtggctcaggcctataatcccaacactttgggagaccaaagcgagagaggccaggatctcaagaccggcctgcgcaacaaggtgagacccccgccccccacaactctacaaaaaaataaaataattagccaggtgtggtagtgcacacctgtggtcccagctactggggagactgagatgggaagattacttgagcccggggcagggtcaaagctgcagtgagccatgactgccactgcactccagcctaggtgacagaatgagaccttgtcttaaaatgttaaaaaaaaaaaaaaaaagtaagaagtactcaacgttatacctaccaaagaaaagccataggtgatgggaaggaggaagtaaaaggaaatctatattgggaaagagagtagcgggtagggcattaccaatcataacaagctaataactcccctgcacatagggaaaggaaacagcagctctgagaacacggagatggaaaatggaaatcatgctttctctatgtttatctctaaaagtttcatttgaatacacaggctgggacagacggaagaggaagaaagcaggggtgtccgggaggtaagtgtctcagaagcatgtagaaatgacacatgctccaacttgaaatcaaacctgtggtaaggcttatgattctagggatggggagtccaaggaaaaatcaaatattcgcaaaatgttgctacattttaagctttggcatgtatttatttaatgttgccctaagagaattacctactttgtaaattattttgcctcatagaaacagagtggaagcggacattctcctttctgccttaaaaaaaaaatgcttttgtcagtcctgaagaaaaggtcttgaagtttgcgaaaactcttaaaatgaaagggggctgagcatggtggctcttgtctgtaatcccagcactttgggaggccgaggtgggtggaacacttgaggtcaggagtttgagaccagcttggccaacatgatgtaaccctgtttttactaaaaatacaaaaattagccaggcgtgatggtgcgcgcctgtaattccaactatttgggaggccgaggcaggagaattgcttaaacccaggaggcagaggttgtagtgagctgaggtcacaccattgcactccagcctgggccacagagcgagactctgtctctaaataaacaaataaataaaataaaatgacaaggagcataaccatctctcaagaacctgatgaatgtgtagatactgaagctgagaactggttacctctgcttgttcctaggctgatttaggctagctccctgaagctcgcccagcacttccagtcccacgcacacagcagtctccaacccagagggcctcgccttgccacgcccaggctgagaggacttccaccctagagaatctctcatccttttccctgttctccctgcgccactccttytcctcctcccaactcaccttgtcattcactggaacgaagttgctatccatggtgacaatgcggaaatacactggaaaggaacaggcatcattagcaaaggggatgtttcctggctcagaattttttttttttttttttttttgatacagggtctcactctgtcacccaggttggagtgcagtggcacaaccgtggctcacttcagcctcaaactcctgggctcaagtgattctcccaccccagcctccggagtagctgggaccacaggcaggtgccaccacacttggctaatttttgtagagacagggtttcaccatgttggccaggctggtctatgaactcctgacctcaggtgatccacctgccttgscctcccaaagtgctgggattataggcgtgagccaccgcgctcsgcctcctgctcagaatctttcctctatccctcctccttcctcacacatgckctgagtcagcaaaaccccaacaggttttacttttttacaaaacctgctctgagagtaaggtaaagtccaaacrcaggcctggagctcaggaggcagagcaagaggcagaatagaagcctccattgaccaccctcctcatcccccacagtaacaccaaactgaacaactgcccacgcaaaacagcactgtcataagaaccaaaaatcagaagagtgatcacagtgcctggttttaactttatatcactgaaagaggcactgaagagggtagaaaagacacacttsaattgctgattcaccccctccccgccatcccccagcagtgactgtggtacagagacagaatcgatgagcttgagggcgggagagcacagtgactgtgggacttggctttagaaygcartgctgcccaatcacaggggaaagcacacagggcagaactcagccagtgcccatggagggagcatttagaccagcgttagccaggggtgaactgcccatcccagcggttggaagctgagttccgattagcccctggggctctaaatactcagcagtgatagctgggcagtacttgtcgtgggccttgggtgagactcagagacatgctggcttccagtgattcagcacattcccagctgtggtgactatggggagagactccttctacttgagaaaaggagagggaagagtcaaggggactttgtcttgcagcttaggtaccagctcagccacagtggggtacagcaccaagcaggcccttggggtccccagttatgggctgtggctcttggatgccatttctggacctgctgtttgtcagaggagagctcactgccctgaaaagagagtcccaggccaggcaccattcaccacaagctggtgaaaggagactttgggcctcgagagaatactggaagtatccaggcagtactcctctgggcctggagtagtggtggccacagagagagactcctctgtgaaaaggggaaggaagagtgggaaggactttgtcttatggcttgggtgccaactcagctgcagtagaacagaacaccaggtagattcctaaggtttctgactccaggccctggctcgcagattacatctctggaccttccagggtcatggggaactcaccaccctgaaggggaggacacaagcctggctggctttgtcacctgctgactgtagagccctagggccttgagcaaacatgggcagtagccaggtactggttaccacaggccttgggtgagacacagtacggtgctggcttcagatctgacccagtgcagtcccaatgctggtggccacaggggtgcttgtgtcacccctctctccaggcagctcagcacaaagagagaaactctgtttgttttggagaaagtaagggaagagaacaggagtctcctcctggtaatctggaattcttccagatcttatccaagaccatcaaggaggtacctctatgaggcttcaagagccacagagatactgagcatggggtcctccctaatgcagatgaactgcagagtccaaacacttagattacgacacccaagtcccttcaaatacctggaaagtctgcccaaggaggacaggtacaaacaagtccagaatgccaagactacaataaatacctaactcttcaatgcccagacaccaatgaacatccacatcaagaccatgttggaaaaaattacctcaccagatgaactaaataaggcaccagcaaccaatctcccagaaacaaagatagtgatctttcagatcgagaattcaaaatagctgttttgaggaaactcaacaaaattttagataacacagagaaagaatkcagaatcttatcagataaatttaacaaagagaaaaaaaaagaggtattgactttaaagaggaggttgagagagaaaatgagatggaaagtttattcaaagtgaaaataacagagaactttccaaacctagagaaagatatcaatattattattatttgagacagtctcgctctgttgcccaggctggagtgcagtaatgtgatcttggctcatgtgacctccgcctccctggttcaagtgattctcctgcctcagcctccccagtagctgggattacaggcacaggccaccttgcttggctaatttggtatttttagtagagacagggttttgccatgttggccaggctggtctcgaaatactcatctcaggtgatttgcccacctcagcctcccaaagtgctgggattacaagcatgagccactgagcccagctgagaaagatatcaatattaattacaagattatagaacaccaagcagatttagcccaaatgagtctacctcaagacatttaataatcaaactcccaaacatcaaggaataaaaaacaaaaaagaatcctaaaagtgcaagaagacagacgtggtggcttacgcgtgtaaccccagcactttgggaggctgagtggggaggataacttgaggtcaggagttggagaccagcctggccaacatggcgaaactccatctctaccaaaaatacaaaaattagccaggggtggtggcgctcacctgtaaacccagctactcgggaggctgaggcaggagaatcacttgaacccaggaggcagaggctgcaatgagcaaccatttattgcattccagcctgcgcggcagaatgagactccatctcaaaaaacaaaaaaacaaaaacaaaaattagctgggcatggtggcgcatgcctgtactcccagctacttgggatgctgaagcacaagaatcacttgaacccaggaggcagaggttgcagtaagcagtgatcccgccactgcactccacagcctgggcaacagagggagactctgtctcaaaaacaaaaaaaattcagtaacatttctatatgccaacagggaacaatctgaaaaagaaattaagaaagataattccatttacaatagctataaataatataaaatacctaggaataaactttaccaaagaagtgaaagatctcaacaataaaaactataaaatactgatgaaagaaattgaagaggacacacaaaaacatgaaaagagatttcatgtttctggattggaagaattgatattgttaaaattccgtactacctaaggcaatctacaggttcattgcaatccctatcagaatactaatgacattcttcacagaaattctacatcctaaatcttaggacttttgtaaaaaaaatcataaaatttttatggaaccataaaagacctaaaatagccaaatctattctgaacaaaaagaacaaagctggaagaatcacattacatgacttcaaattatactgcaaagctatagtaaccaaaacagcatggtactgtcataaaaacaaatacatagaccaatggaacagaatagagaacccagaaacatgtctagggtgaactcatttttgacaaaggtgacaagtgtatacactggagaaagcacaggctcttcaataaatggttctgggaaaattggatatccatatgcagaagaatgaaactagaccctcatctctctccatatagaaaaatcaagtcaaaatggatgaaagatttaaatctaatacctcaatctatgaaactattatatataagaaaactttggggaaactctccagaacattggtctgggcaaagatttcttgagtaatacccaaggagcacaagaaaccaaagcaaaaatggacaaacaggatcacatcaagttaaaaagcttctgcacagcaaaggaaacaatcaacaaagagacaacccacagaatgaaagaaaatatttgcaaactacccatctgacaagggattaataaccagaatatataaggagctcagacagctgtataggaaaacatctagtaatcagattaaagaacgggcaaaaagatctgaatagacatttctcaaaagaagacatacaaatggcaaacaggtatataaaaaaggtgctcaaatcattgactgtcagagaaatgtaaatcaaaactacaatgagatattatctcaccccagttaaaatggcttttttccaaaagacaaacaataataaatgctggtgaggatgyggagaaaagagaaccctcatacactgttggtgggaatgtaaattagtacaaccactatggagaacagtttggaggtttctgaaaaaaactaaaaatagagcttccatataatcctgcaagcccactgctaagtatatatacaaaagaaaggaaatcagtatatcaaagactatctgtgctgccatgtttatggcatcagtattcacaatagccaagatatggaagcaacctaagtgtctatgaacagatgataaaaaatggattaaaaaatgtggtacacatacataatggagtactattcagccataaaaaagaatgagaccccatcctttgcaacagcctgaatggaacaggaggtcattatgttaagtaaaataaaccagacacagaaagacaaactttccatgttctcatttatttgtgggagctaaaaattaaaacaattgaagtcgtggagatagagaatagaataataatttttaagtgtgtggaaaaaaataaggtaaaaggaaaaaaatttttttgaaagagagagagagaacagaatgatggttaccagatgctgggaagggtaatggtgggcaggatgaggggtggggtgggaatggttaatgggtacaaaaatatatttagctagaatgaataagatctagggatcttgtagtttttagcacaaagagtgactacagtcaacaataatttattgcacatttaaaaattactaagagagtataattggattgtttgtaatacaaggaaatgataaatgcttgargtgatggatacacatgtaccctgatgtaatgattacacattgtgtgtgtgtataaaaatatctcatctaccccataaatatatatacaccagctatgtacccacaaaaattttaaataaaaaaataaaaaaaacccaaacatagtttcttttcagggtgcctgactttgaaatctcagaatgaagtgcccctgtaaggacgaatgaacaaatccaaaaaaaaaaaaaaaaaaaaaaaaaaccccagtagctcaagccaaatgccctcagtgctttcttagccatttacaagcagtttgttgtaaggcccagcaacccagttatacttgccaaattctattccagaagaaatgtgtacttttgttttagatacacaaactcagtagcaacccccacctacttctcttgcttgtgtagcgcagcatgtattcaacacttgcactacttaatccccccagattttcctctcctctgcactcctttttttccaaagcctactgtcaaaccacaaatcccctctttacccctgtgcacagcggtttccccaggttttagtcgaaccccaaatatgtgactcttaccttgctgccctggggtgtagagaggtttgtcagtctgtacaaaggtgccgttcccctgcctctgaattagaacctttttcttctcctcaaagctgatgttatttccaactcccgacacccggattgtggccacttcttctgtgccaccagcaggaggtggtacctgaccaagaaaggggacttctggggaggggtaagggattgggggaacagaatcaactggtctcaacccaacagtgagttaaaggaaagagctgagttagatgggggtagcaaggatagagacataaaacaaattaccacgaggaagaattaaggtcaggaactaaagggagaaatcctaggtcgaggaaaccgtgggtgagttatagccggggattgaggttaagttgagaaaaaataggtttagaggccgtggcaaaagataacagaaattatacttaaagtagattatagtgagcctagggaggagaataggcaagtaagggattcgagtgagggctgagtctgtgcttacaagaaaggagatacaatgtaagtgcctcttcttcagtccagagtattctagcaacttctgrgtcttgtccttggtctccagagtaaccgtgaatttaacatcactgtacccagggctcaggtccaaacaaaccttctgaacggaggggaaatttagccgggctggtaatgtcaccaggtagtttctattaaaggagcagaaggatttcagggcaataatgattcattcactcgaaaaatccagcactctcctaagcgctcagcaagtagcagtgaattagacagaccaagcccctgccttccttatgcacctcattttctacaagaagcagaggggcaacgactcagtgcacagtcytcaacttccgccatcaggaggccctcaccgagcacacatgcctagagcaccaaggaggaaattaggcctatttcagaaaacagggcacattttaatatttatcttttttaaagcttcctcttcatgcgtcagcctccctctctgggtaaaggatcagtggaaccaaagaagagaaaaaaggaggaggaaattaagataaaccaaagttgatctccccatctccatataaatgtttgagaaagttaggcgaagaagccgctgccctaataaaccaattctgacaccaagcactcacggaagttcttctgcaatggctggtgatagggccaacattcctagaaggagctgagcccacatctttgtgggtgagacagatttttccagggtcaggggcagagatcgctccgcgtagctttatatactaattccaggtagggtgtgcagtgatgactgatgctatagtcagtcacctcctggcacctggaacacaggaggactgtgttcctccttctgtaaccaccaggttaggtggtggaccagggtagggccactattcacttctttaaagttgtttctgcctggaacatccatactggttcagccagttttggrggaaaaccagagctgagtattcataatggtaaagctctcagaacatattttgaactcctccctttttttctggtctcattccaattcctgttctcatttaatgtccttattttcttttattattcaattaaggtgtagttgggaacacgggtatgagaacagtttcaatagaaaagcggtaaacttggccggtcacagtggctcacgcctgtaatcccagcactttggggggttgaggtgggcagatcaccaggtcaggagttcaagaccagcctggccaacatagtgaaaccctgtctctactaaaaatacaaagaaaaaaaaatcagctgggcatagtggtgggtgcctatagtcccagctacttgggaggctgaggcaggagaatcgcttgaacccgggaggtggaggttgcagtgagccgagatcatgccactttactccagcgtgggtgacacaacgagactctgtctcaaaaaaaaaaaaaaaattaatactactcagtattgttgtgactgtatggaaatagggacacacacagtcctagagaaaatagaatgtggataactttctcatggcaattttgtaatacacaccaaagcctttgagatttgcatattctttcactcagcaactcctactctggaaatgtttcttaatgaggaaaaaaaggacagcatgcatgtatgcacaagtgtaacactgagttttttcacactgttctttcttttttttcttttctttattttttatttttttgaagtagagtctcactttatcacccaggctggagtgcagtggcacaatctcagcccactgcagctttgacctcctgggctcaagcgatcctcccacctccacctcctgagtagctgggaccacaggtaggcaccaacactcctggctaattgttttgtatttttaatagagacagggtttcaccatgttgcccaggctagtctcgaactcctgagctccagggaccacctcagcctcccaaagtgctgggattacaggtatgagccaccgtgcccagcccacagtgttctttatgatggtaatacttagaagtcacctaaaatataaattagtctaagtgcagtggctcatgcctataatcccagcttttgggagtcagaagctggaggattgcttgagcccaagagtttgagaccagcctgggcaacatagtgagaccccgttttgtaaccacccaatggattcaccttgcttgctgcctagacagagccgatttatcaagacaggggaactgcaatggcaaaagagtaattcacgcagagccggctgtgygggagactggagttttattattacttaaatccttgagccttcgtggatcagagtttttaaagataatttggcaggtaggggcttgggaagtggggagtgctgattgctcaggttggagatggaatcatagagggtcgaagttagattttcttaatgtcttctgttcctgggtgagatggcagaactggttgggccagatgactggtctgtgtggtgtcagctgatcccatggagtgcagggcctgcaaaataactcaattactgatcttaggttttacagcagtgatgttatccccaggagcaatttggggaggttcagactcttggagccagaggctgcatgacctctaaactgtaatttctttttttttttttttgagacagagtctggctctaccgcccaggctgragtgcaatggcgcgatctcggctcactgcaagctccgcctcccgggttcacgccattctcctgcctcagcctcccgagtagctgggactacaggcgcccgccaccacgcccggctaattttttgtatttttagtagagacggggtttcaccgtgtcagccaggatggtctcgatctcctgacctcgtgatccgcccgccttggcctcccaaagtgctgggattacaggcgcgagccactgcacccggcctctaaactgtaatttctaatcttgtagctaatctgttagtcctacaaaggcagactggaccccgggcaagaagggggtctttttgggaaagggctgttatcaattttgtttcagagtcaaaccatgaactgaattccttcccaaagttacttcggcctatgcccaggaataaacaaggacagcttaagggttagaagcaagatagagtcggttaggtctgacttcttgcactgtcataatttcctgttacaattttgcaaaggcagtttcagtctgtataaaacatttctttaaaattagctgagtgtggtggtgcacgcctgtagtcccagctactctggaggctgagatggtaggatttgcttgagcccaggggttcaaggctgcaatgagccatgatagcaccactgcactccagcctgggcaacagtgagaacttgtctcataaaataaaataataaaatagattagccaggatgctctctgggaccaatgatcatcctatatcaaaccagcctaaacaaaaaagtgtttttggtaactggaatggatccaacaggaagaatgagcttatggaaccagagcaccttgaaaaacttgacagcccaggagtggagacgtggtgcagccagggccgactcctcccagtccttctctcttgtgtacttgtctctgattggttcattttctcctactgcacacaagcttttcttcaagtcgtagggaggacggcagctgggagccctcaagccatattcgttcagctccacgaccccaactgacaaaatttttcacctatgttatagaaattcccgaagaaggactgtgttcctccctctctcgctggctcacctctgaatcagtcactgtagtcaggagggtatgataggcagggcctgggtcattctcccacctaaaggccagggtgatggggtactgtgattggccacccctttagaaccacagggagttggggaggggaaattgttcaaagaaatcactacagtaggaaaagtgttggtgtaaagagctgcaaacataaaacattaagtctattrcaatgccccataaagagttcggttgaataaactgtcatgttaatataaagcaatactctgctgccattaaaaataatgttttcatgataaggggaattatttgcaatgctaattgaaaggggttggggctggtgcagcggctcacacctgtaatcccagcactttgggaggccgatccgtaggagctcgagaccagcctagtcaacatggcgaaaccctgtctctmccaaaaatacaaaaattagccaggcatggtggtgggcgcctataatctcagctactcgggaggctgaggcaggaaaatcacttgaactggggaggtggaggctgcagtgagctgagagcataacattgcactccagcctgggcaacaagagygaaattccgtctcaaaaaaaaaaaaaaaaaagaaaagaaaggggttggggaaagtgatacaaaacgacatgtggcaagttccactttaacttggaatttgaaaggctagaaagagtgtggcttggtggctcgagcctgtgatctcaacactttgggaaggcaaggtgggagggttgtttgaggccaggagttcgagatcaacctgggcagtatagtaagaccccatctctaccaaaaaaaaaaattaaaagttagctaggtgtggtgtcacatgcccagctacttgggaggctgaggcaggaagatcactagagcccaggacttcaagtctgcagtgagccatgattgtgccactgcactccagcctgggcaacagagcaagaccctgtctctaagaataaaaaataaaaataagctggaaagtgcattgccccctctctgacaatatgaaaaagccagacaaactgcaaaatcacttttcttaaaccaaaagttgaacctaaatgctgagctgggccgggggcggtggctcacgtctgtaatcccagcactttgggaggctgaggcaagcagatcacaaggtcaggagttcgagacccgcctggccaatatggtgaaaccctgtctttactaaaaatacaaaaaaattagccaggcatggtggtgcatgcctgtaatcccagctactcgggaggctgaggcaggagaattgcttgaacccaggaggtggaggttgcagtgagctgagatcacgccattgcactccagcctgagtgacagagcaagactccatcacaaaacaaaacaaaagaaaacaaaacagctgagctgaggttgcaggtaagctaagtagcctgaaattcaaggacatgcaatcctcatgagcagagaccagatgggtggagtgtctcatcagtgccagagtatgggaggtatttrggccatcatacaagcatgcaagaagaaagcagctacatttttcataaattgctagaggcctagtgcagactagagtgactataaggagcctctgggtgtcacagaagcaaggagggctttacttacccacaggctcctttccatgacctctaccaggtgttcacaggaaatactgggggccaagtgggagactacaaagagccccctcagtactatgggcatcaaggaccgtatttgctatcattgcagaaaaggccccagctgcccatgctcctctctcgaaagccttaagaccctggggaggactggcaaatactgttgctcccagggcacaggtgttaccaagggaagagcagggaggaccctagtccgagggagggacaaggagcaattgtgagcccagagttctaagctaatacttttagaggtctcctgaaactgaaggaggagcacaaaaaaatctttcccacccaagaccagccacaaattcaaagcagggtttggcagcctggcataaggagtggggcagaaatactcatcccccagggcccaggcatataaacctacctaagatagaagatgaagagggcaacagagaagcaccctgtcccctcaccattacccgagcaagagcaccaagtaactaagcagtccgccactggcagagggcatgaacgtgcagagagacgacctctgtggggtctgctgtgtggtgtacagaggagaacgagagctgagggtggggcacaaacactgagaaatagccagcactccagatgccaccctaagcataaggcatcacaaaaggaatttgaagcctatgatgtaccgaaagtaaacttggcaattacaaaacctgcacagttcaccttttaactagattaactcaatccaccaagctaactgcctgagaagaggtgtgtccatttctagtcacaaatactatttatttaaatctctcctgttctacacaagatgtttggcaatcaatgaaaaattacaagttgtatcaaaagaagaagaagatgacaacaacatcctgtgaagatacaaagtaatcaatggaaccaggctcagagctgccctccatgttataataaaagagagagactttaaaatgcccaggagtcatatgtcaaaggagctcatgaaaaaaaaaaaaaaggacaacagacatgaggagatggtgtcaggggtggatttcaaaagaaaggtggaagtgatcgacttcctgaaatactaaacatgacagactttatagaagtttcaaaaataagatatgcaatatcaggccaggaacagtagctgaagcctattaatcccagcactttgggaggccaaggcaaaaagatcacttgagcccaggagtgtgagaccagcctaggtaacatagtgaggagactttgtgtctatgtaagataaagacattagctaggtgtggtgacttatatctgtagtcccagctacttgggaggctgaggtgggagaattacttgagcccaggaggccaaggtcgcaagcaagctgagatcgcaccactacactccagcctgggcaacagaacaaaatcctgtctcaaaaaaaaaaaaaaaaaaaaaaagaaaatgctgtatcagagatgagcagctccttcttcaggctcattaataaccttgacaatacgaatatagctgaggaaataatcgattgccttgaagttaggtcaatagaaattacccaaacaaacacaacaagaaaaaagagtgaaaatcatttgaattcttttcaaataatttgaatttttatagcacttgaattatcttcaagtgctataaaacaatatcaaatggcttagcatacatattrtcagaatcttagaaggagaaacgagaaagaacaagcagaagacatgtttgaagagacaagaaatgagaattttccaaaaataatgaaacacatcaaagaatagattcaagaattataaacaatttctccatgtttcccctaattcacacacactaggcacatacatacatgcacgcaccgtctcttggttaggttgtaaaattgtgatggtctctggaggctctgtttgatttggacacagggaaaaccagtatattcaattgagttttgggtcactctaccactctacataaactccataaactttttttttttgagacaggatctcgctctgtcacccaccctggagtacggtggcgtgatctcagctcactgcaacttccacctcccaggttcaagagattctcctgcctcagcctcctgagtagcagggattacaggtgcgcgccaccaygctggggtaatttttgtatttttagtagagacagggtttcaccatggcctcccaaagtgttgggatgaccggcatgagccactgcggtcttgttttccttggttcccatcactcttcctgctaagagcaatcgcccaggtctgtgaacacccactcctccgtagatggtgagtgcccctccagctagagctgctgackccctttaccacttccatcagtcaaatcggcccaccagtgatttttatctcttctgatccattttaaaatctatttaaatgcagctatcagtctgataacctgtctggaatttggtgggaggaaatgtccagggtttaataatctcccaaagttaggctgcataaaaccctactgttgacatctcatgtggtgcatatgggcgaaacggagccgtgtggaaggctattctgtaaaggggttagcgtgcttggatttgctctgggtatcagaatcctgacttgagacttttagcttagatagacaccataatatgttacttcgmaggcttcttacacttggacctttattgtaaataatagaagtatttctggagtaagaattacatcamttatatattatcatgttatgctacatattaggcataayatatatatatatatatatatatatatatatatatatataktttttgtttgtttgttttttgagacagagtttcactcttgttgctcaggctggagttcaatggcacgatctcagctcacgacaacctccgcctcctgggttcaagtgattatcctgcctcagcctcccaagtagctgggattacaggcgcccccccaccacccccggctaattttttttgtatttttagtagagacagggtttcaccatgttggtcaggctggtctcgaattcctgacatcaggtaatcatccacctcggcctcccaaagtgctgggattacaggtgtgagacaccacgcccggcctataatatatattttttaattattatccaagggtgctgacataaatttccaatttattcrtgccaaaaaattagtgatgataactgccaatcagtacagctaaagaaaatgttttcattctggtgtatttggaagtcttctgtctttatattatcccagccttcctcactcatttctgtgtattttatactttgtttcacaccattctgctcaagggtattattttcgcatttccatattatttctatttttcacaggtagtctttggtcttacatctgtgaacatcttctttgactattttgcttttccacgaagggctttccaaaaactattagcccactttacttggtaacctcccaggagacagcttagtcctgtctgctaagggatgctattctcagcaagtcagttttctgctctcctcactgcaagggaggccagaggagaagagcctgtttctgttccacccaggactgttgatttgaggttctacctccagagagcatggggctaatcaaaccaagacacaacactaaggaaaagaaaagaaagaacaagcagaagctggggccactccttgcttgccactgtctcctccctccttcttactaattataggcttcactctgttcctttttcaaatgtattcaagtgaatatgcaatgtaccaaagtttgcatatgaatgcatcagggaaaataagggtgctacccaaccccacccatgcttagacagcacataaaccaacatttggcttcctaaagtcagaaatgacagaaaactgaaagttcaaagagggaaaaaagaaacatggagatcacatgctcagattatacctagggggaaaaaccttttttttccaacaaatatttattgaacactgctatgggataaattgtatccccctcaaaatttatatgttgaagtcctaactcctaggatctccaagtgtgacttaatttggaaatagggtccagcctgccctggagatattggacttgccagcctccacaatcatgtgagccaattataaatctctcagggtgtggggcaggccctgccccacaccctgagagatttaaaaaataatatatataaacaagccgggtgcagtagctcacacctgtaatcccagcacttttgggaggccgaggtgggcggatcacctgaggttgggagtttgagaccagcctgaccaacatggagaaaccccgtctctactaaaaaaatacaaaattagccgggtgtggtagcacatgcctgtaatcccagctactagggaggctgaggcaggagaatcgcttgaacctgggaggcagaggttgcagtgagccgagatcgtgccactactccagcctgggcaacaagagcaaaactccatctcaaaaaaaaataaacaagcaaagtatrtacatatatacaaactatatacatacacatatatagtttgtttcatgtgcgtccgtgtgaagagaccaccaaacgggatttgtgtaagcaataaagcttttaatcacctgggtgcaggtgggctgagtccgaaaagagagtcagtgaagggagatggggtggggtcgttttataggattcgggtaggtaaaggaaaattacagtcaaagaggggttgttctctggcgggcagagtgggggtcacaaggtgctcagtaggggagcttttgagccaggatgagccaggagaaggaatttcacaagacaatgtcatcagttaaggcaggaaccggccatctggatgtgtacgtgcaggccacaggggatatgatggcttagcttgggctcagaggcctgacagcttgtatatatatacatatatataatacataatatatgtattatataatttatataatacaaaatatgtgtattatataatgtattatataatacacatatatgtattatatatgtataatacatatatgtgtattatatatgtataatacacatcatatataatatatataatatatgacacatatatataatatatgtgtattatatatgtatatataacacatatataatgtattatataatacaatatataatgtattatacaatgtattatataatatatagtgtattatataatacatatataatgtattacataatacatatataatgtattatatatgtgtattatataatacattatatatgtattatgtaatgtattatataatacataatatatactacatatataatactatatacatataatattatacacatatatgtatatagtttgtatatgtgtatacagtttgcttgttttttattggaagaaacctgactgtgcaaaccttcagcatgttagacactataggaaccatatgtgaaggtgttttctttgacttcaagggaaacatttcagaacgtaagatattcacatatgaaaagtccagtaacaaaatactaaagaaatgctacttaataacatatgactgagtccctaatatgtgctactgatgataaatatgactcattttcaaagactataagctgggttacagttgtcagaaaaagtttaatggcatgtaaatcagcaagcaactgagaagtttcagggaccctctttcatccagatgtttcttatkctttatccttcttactcttctaactttaaatccttcttactcttgtaactttaaatctttcaaagaaacagaaatctctctttcttctttgaaggacagggtccttctcccttagtcctagccrtatcatttcctctctgagacactgccttgtctatactaagccatttttctgatttttctgaattagatggtattattttgggggatgggagagaggaggagaagtagtagaacagatggaagtgcttcctgtaaagtataaactgtttcagaaaaagaaatcttttttttttttaaatgagacagagtctcgctgtgtcgcccaggctggagtgcagtggcgggatctcagctcactgccagctccgcctcccgggttttcctgcctcagcctcctgagtagctgggactacaggcgcccgccactgcgcccggctaattttttgtattttttagtacagacggagtttcaccgtgttagccaggatggtcttgatctcctgaccttgtgatccgccctcctgggcctcccaaagtgctgggattacaggcgtgagccaccgcacccagccagaaaaagaaatctatgaaagggttgatgggagaaaggaacaaaaggtttccttaaaattcagcaatatctggcacatagtaagcattcaatacatttttgttgactgccttaaaagaataagtgggaaataaatttttcaaaactagatatttagataaagctacataatatcaccaatcactatctttttcctgtggtaataagatgttagatttactagacaaatattttattttatttttttctttcttttttttttttcttgagacagagtcttgccctgtcacccaggctggagtgcaatggcaagatctcagctcactgcaacctccacctcccaggttcaagcgattctcctgcctcagcctctcaagtacctgggattacaatggtttaatctcagctcactgcaacctctgcctcttgggttcaagcgattctcctgcctcagcttcctgagtagctgggattacaggcgcacaaccaccatgcctggctaattttgtatttttaatagagacagggtttctccatgttggtcaggctggtctcgaacacccgacctcaggtgatctgtctgcctcggccttccaaaatgctaggattacaggtgtgagccactgatcacgaggtcaggagtttgagaccagcctggccaagatggtgaaaccccgtctctactaaaaaatacaaaaattagctgggcacggtgcaggcgcctgtaatcccagctactcaggaggctgaggcaggagaatcatttgaacctgggaggcagagattgcagtgagccgagatggtgccactgccctctagtctgggcaacagagcaaggctccgtctcaagaaaaaaaaaaaagatagggatcaagcgacttgaactatgagaagcaggacctgatattaagtttagcttgaaatactccaaaaacatgatttcaaagggcaaacatgtcgaacagaagaatttcaggagtttagatgtgtacttggaaaatactattcctttcatgcgcgtccgtgtgaagagaccaccaaacaggctttgtgtgagcaataaagcttttaatcacctgggtgcaggtgggctgagtccgaagagagtcagcaaagggagataggggtggggccgttttataggatttgggtaggtaaaggaaaattacagtcaaagggcagttgttctctggcgggcagagtgggggtcacaaggtgctcagtaggggagcctttgagccaggatgagccaggagaaggaatttcacaagacaatgtcatcagttaaggcaggaacaggccattttcatttcttttgtggtggaatgtcatcagttaaagcaggaacccgtcatctggatgtgtacgtgcaggccacaggggatacggtggcttagcttgggctcagaggcctgacattcctgtcttatattaataagaaaaataaaacgaaatagtggtaaagtgttgggatgatgaaaattttggatgagggtatggagagataatgggcgatgtttctcagggctgcttcgtgcgggattggggcggcgtgggaacctaaagtgggagcgattaagctgaagggagattttgtggtaaggggtgatattgtgggattgttagaagaaacatttgtcatttagaattattggtgatggcctggatacagttttgtatgaattgaaaaactaaatggaataaaagaaggagaaaaacaggtattaaaggactaagaattgggaggacctaggacatctcattagagagtgcctaagaaggttcagcatagccttgccagcaaagattatttatttactttaagagttaagagtggcggtttggggatagcaccaggagatatcagctgtgatggcttggagaaacagtgtaaactggcagtgtaaacaagagcagggcatgtatgagtagttgagaacgctgaataagagtatgactagacagaagatagtagggatgacaggtttttgggggcacagtctaagttggtctggtgtctggaaggagactggggcctaataaaaaggagcgtctatacaggagcttaaatgggctgtaycttgtagcattctgaggacaggcctgaattctgagaagcgaaagtggtaaaagtattgtccagtcctttttgagttggtggctgagcttcgtgaggtgtgtttttaatagaccattagtctgtcactggatactaagagcctgaaaaaaggcttggctgatttgactaataaaggctcgtctgttatcagactgtatwgaggtgggaaggctaaactgaagaattatgtctgacagaagggaagaaatgactgtggtggccttctcagaccctgtaggaaaggactctgcttatccagtgaaagtgtctacctagactaagaggcattttagttatcttactcggggcatgttgagtaaagctaatttgccagtcctgggtgggggcaaatccttgagcttgatgtgtagggaagggagggggcctgaataatccctgaggagtagtagaatagcagatggaacactgagaagttatttctttgaggatagatttccacaatggaaaggaaatgagaggttctaagaggcgggctagtggcttgtactatagcatagcctgcctttgctggtgtgtggcgattaagcctggtggaaccgccatcaataaactaagtgtgatcagggtgagaaacagggaagaaggaaatgtggggaaatggggtgaacgtcaggtggatcagagagatgcagtcatgggggtcaggtgtggtatcaggaataatgtgggaggccggactgaagtccgggccaggaacaatggtaattgtgggacttaacaaagagtaagcacagctgaaggagcccgggagcagaaagtatatgcgtcaggtgtgggtcagaaaatagattttggaaattatgagagctgtagagagtgagttgagcatagtttgtgattttgagggcctctaaaagtattaaagcagcagcagccgctgcatgcagacatgagggctaggctaaaacagtaaggtcaagttgtttggacagaaaggctacagggtgtggtcctgtctcttgtgtaagaattctgactgcgctaaccatgcctaggaaggaaaggagttgttgttttgtaagggattgaggtttgggagattaatcggacatgatcagcagggagagcacgtgtgtttttatgagaattatgccgagataggtaacagatgaggatgaaatttgggcttgactgaagtaatgggggctgtctactaagccttgcagcagtacagcctaggtaatttgctgagcctaatgggtgtcagggtcagtctaagtgaaagcgaagagaggctgggacgagaggtgcaggggaatagtgaaaaaagcatctttaagatcaagcacggaacagtgagttgtggaggaaggtattgaggacaaaagagtgtacgggttgggcagcacagggtggataggcaaaacaatttggctgataaggcgcagatcctgaactaatctgtaagacttgtccagttttcggacaggtaaaatgggggaattgtaaggagagtttataggttttagaagcccatgctgtagcaggcgagtgataacaggctttaatccttttaaagcgtgctgtgggatgggatattggcgttgagcggggtaagggtgattaggttttaatgagatggtaacggccatgtgatcggttgccagggaagtagagatgtcccatacttgtgggttaaggtggggggatatgagaggaagacgcgaaggaggctttgggttggggagaggggcagcaatgagatgtggctgtagcccaggaatagtcagggaagcagataatttggttaaaatatcttggcctaataagggaactgggcaggtggggataactaaaaaagagtgcataagagtgttgtcctagttggcaccagagtgggggagttttcaggggtttagaagcctggccgtcaatacccacaacagttatggaggcaagggaaacaggcccttgaaaagaaggtaatgtggagtgggtagcctccgtattgactaaggggacagacttaacttccactgtgagagttacccgaagctcggcatccgtgatggtctacggagcttccgaggcaatcgggcagcgtcagtcttcagctgctaagccgagaaggagtcagtcagacagccttgggccagagttccaggggctctgggagcggctgccaggtgagttgaacagtctgatttccaatggggtcctgcacagatgggacacggcttaggaggaatcctgggctgcaggcattccttggcctggtggtcagatttctggcacttgtacaagctcctgccggaggaggttctggaggaatgcctggacactgtggttcaggcatttggaagttcttgtgtgctggagatgtggctggggtttgtctcacagtggaggcaaagaattgcaacttttttctattattgtacaccttgaaggcaaggttaattaaatcctgttgtggggtttgagggctggaatttaatttttggagttttatttaatgtcgggagcagattgggtaataaaatgtatattgagaataagacggccttttgaccttttagggtctagggctgtaaagcgtctcagggttgctgctgaacgagccatgaactgggctgagtttttatatttgatgaaaaagagcctaaacactatctgatttgggataaagaaaatggcgcattaaccttgactatatgcctttagctccagccacctttttaagagtaaatttctgggcaggtgggggagggctagtcatggaacgaaactgtaagccggaccaggtgtgaggaggggaggtgataaaaggattatagggtggaggagcagaggctgagcaagaattgggacctagctcggcctggcgaggagcagcctggggaggaagggagaggtcagatgggtctgtagaaaaggaagattagaaagactcagcgacacttgggattggtactgaggggacaggcaggagggaaagaaggaagatttgggacaagttgcactgggcacagagactagggagggactgatgtgtaaaacaatgcctggttgtcaggcacctcagaccgtttgcccattttatgacaagaattatttagatcttgcaggatggaaaaattgaaagtgccgttttccggctgtttggaactactattgagtttgtattggggtcaagcagcattgcagaagaaaataaggcatttaggttttaggtcaggtgtgagttgaagaggttttaagtctttgagaacacaggccaaggcagaagaaggaggaaaggagggtggaaggttgcccatagtgaaggaagcaagcctagagaaaagggagagtagagacatggagggaaggggttcgggggttcttaccttccagaaaagtgggaaaggggttggggcacagatataaggggttggggcacagagataagaggttggggcatggaaataaggggtggggcacagagataagaggtcggggcatggaaataaggggttggggcacagagataagaggtcggggcacggaaataagggattggggcgcagagatataagaggttgggccacggaaataagggattggggcgcagagatacaaggttggggtacttgcccctcctctacaaaagcgggacttgccactaagagtgaaggagaaggggttgggggtttcttgccccccagaaaggtggagaaggggtagagacacggagagaaatggttggggtacttgccccttccccagaaaagcgggacttgccgctaagggtgaaggaccaatgcaggcgtccctcctgcrttgacacctctgaaacgtgtgtaaataatcagagaggtgtccctgcaatgactaaacaccaagggaaggctgccttccctagtccgtgaccggcgccggagttttgtgtccatggataaaacgtgtctcctttgtctttaccagaaaatgaaaggaattgaaattaagagaagggagagattgaagagtggaaaggagaaagtggttgagggacagtgagagaggttggagaagagagtaagaagaggccgcttacccgatttaaaattggtgagatgttccttgggctgcttggtctgaggacctgaggtcgtaggtggatctttttcacagagcaaagagcaggaggacaggggattggtctcccaagggaagtccccggatctgagtcacggcaccaaatttcatgcacgtccatgtgaagagaccaccaaacaggctttgtgtgagcaataaagcttttaatcacctgggtgcaggtgggctgagtccgaaaagagagtcagtgaagggagataggggtggggccgttttataggatttgggtaggtaaaggaaaattactgtcaaaggggagttgttctctggcgggcataatgggggtcacaaggtgctcagtaggggagcttttgagccagggtgagccaggagaaggaatttcataagacaatgttatcagttaaggcaggaacaggccattttcacttcttttgtggtggaatgtcatcagttaaggcaggaacaagccacctggatgtgtaggtcacaggggatatgatagcttagcttgggctcagaggcctgacagtttgtatatatatacatatatataatatatataatactatatacatataatattatacacatatatgtatatagtttgtatatgtgtatatagtttgcttgtttttttatcagaagaaacctgactgtgcaaaccttcagcatgttagacactataggaaccatatgtgaaggtgttttctttgacttcaagggaaacatttcagaacgtaagatattcacatatgaaaagtccagtaacaaaatactaaagaaatgctacttaataacatatgactgagtccctaatatgtgctactgatgataaatatgactcattttcaaagactataagctgggttacagttgtcagaaaaagtttaatggcatgtaaatcagcaagcaactgagaagtttcagggaccctctttcatccagatgtttcttatgcttttattcttcttactcttctaactttaaatcctctgactcttctaactttaaatctttcaaagaaacagaaatctctctttcttctttgaaggacagggtccttctccyttagtcctagccatatcatttcytctmtgagacactgccttgtctatactaagccatttttctgatttttctgaattagatggtattattttgggggatgggagagaggaggagaagtagtagaacagatggaagtgcttcctgtaaagtataaagtgtttcagaaagagaaatcttttttttttttttaaatgagacagagtctcgctgtgtcgcccaggctggagtgcagtggcgcgatctcagctcactgaaagctccgcctcccgggttcacgccgttctcctgcctcagcctcctgagtagctgggactacaggcgcctgctgccacccccagctgatttttttttttttttgtagtagagatggggtttcaccgtgttacccaggatggtctcgatctcctgacctcgtgatctgcccgcttcggcctcccaaagtgctgggattacaggcatgagccactgagcccggcccacagtggctttttcagcaaaatgttctttttcttttctagaaatcaggatacatggacacatgttctgctatgcagctctgtacttttttaggaaaacaaataacttgtgctcttctgaaaataccaaaaatactaatttcatataatgtagggttcttttgcaggctacttgaaaatgtctatgaaagcacaggaaacagcatcacttgatactgacataatgatgtattattgttgtaggtgtgatctaagtcctgtgctccgttttttaggttttgctatatcctacaaatattctctcctgaatttatctttttgttttattatttagtttttatttcataatcataaacttaactctgcaatctgttgggaacaggccccaaaatctggccataaaatggccccaaaactggccataaacaaaatctctgcagcgtcgtgacatgcttgtgatggccttgacacccatgctggaaagtcatcagtttaccaggatgagggcaaggaacacctggcccacccagggtggaaaaccgtttaaggtattcttaaaccactaacaatagcatgagagatctgtgccttaagcatatgttcacgctgtggataactagccaggctcatccctttatttcggcccatcccttcattttccatgaggaatacttttagtaaatcttatgactggcttgctgtcaataaatatgtgggtaaatctccgtttaaggctcttggctctgaaggctgtgagatcccggatttcccactccacactctatatttctgtgtgtgtgtgtctttaattcctctagcaccgttgggttagggtctccacgaccaagctggtctcggcagcaatccagctaggcatggatgggaataaggaacatatggaacccaaagggaactgcagcgagagcacaaagattctaggatactgcgaccaaatgtggtggagggtgctttccagagcggcagaaggaatgctccggtgattaagataaaaaaaaaaagtcaaactttaattagagttgtccacagtcagtgatcttcttgctggtcttgccattcctggacccaaagtgctccatggcctagggttattaaagactattgtgcaaataatagacttggtgggtcttacttattgcttgacttcatggcaaatgcccttaactgggaaatctgctctggggataacataatatgtttatgttatcaagagttagttctgttcaacccagactaggagcattatatttcatgctttctggcagagatgctttacatgaagtgatctagaattactctgcttacacaaacactgaatttttttttttttttgagacagttttgctcttgttgcccaggctggagtgcaatggcatgatctcagctcacagcaacctccgcctcataggttcaagcgattctcctgcctcagcctccttagtagctgggattacaggtgcccaaccatgcccagctaattttttgtatttttagtagagacagggttttactatgttggccaggctggtctcgaactcctgacctcaggcgatccacctgcctcggcctcccaaagtgctgggattacaggcatgagccactgtgcctggcccacatacactgaatatataaatatttatgaaatatttatgatctgtgcccaataaatacatattgtttttgactggctgatcttggtgtgtattttcacttgaatgggttttcctgtagaattaggtataaagtggggaatataatgaaataaaaattgctttggaaatattgaattggcagactttatgcttccgttatgatctcatattctaattataccaaaaatggattttgattacagtccccaagtgtgtgttcaaatattcaattgatttttattgaactggtacaaatgacttttctttttgatacgttatactccctagacgttaattagatttggcaattctttaatcctactacatccctacgatggtgcaactatccttcactagatctagtgtcactcaggtcaatccataacttctactggtttgtgaaagcaaggcattattattattattattattattattattattattttattatactttaagttctagggtacatgtacacaatgtgcggatttgttacataggtatacatgtgccatgttggtttgctgcacccatcaactcktcatttacattaggtatttctcctaatgctatccctcccccagccaaccaccccacaacaggccccagtgtgtgatgttccccgccctgtatccatgtgttctcattgttcaattcccacctatgagtgagaacacatggtgtttggttttctgtccttgtgatagtttggttagaatgatggtttccagcttcatccatgtccctgcaagggacatgaactcatcctttttcatggctgcatagtagtccatggtatatatgtgccaaattttctttttttattattatactttcagttctagggcacatgtgcacaacgtgcaggtttgttacatgtgtacacatgtgccatgttggtgtgctgcacccattaactcgtcatttacattaggtatatctcctaatgctatccctccccccttccccaccccacgacaggccccggtgtgtgatgttccccaccctgtgcccaagtgttctcattgttcaattcccacctatgagtgagaacatgcagtgtttggttttctgtccttgcaatagtttgctgagaatgatggtttccagcttcatccatgtccctacaaaggacatgaactcatctttttatggctgcatagtattccatggtgtatatgtgccacattttcttaatccattctatcattgatggacatttggattggttccaagtctttgctattgtgaatagtgctgcaataaacatatgcgtgcatgtgtctttatagccacatgatttatagtcctttgggtacatgcccagtaatgggatggctgggtcaaatggtatttctagttctagatccttgaggaattgtcacactgtcttccacaattgttgaattagtttacagtcccaccaacagtgtaaaagtgttcctatttctccacatcctctccagcacctgttgtttcctgactttttaatgatcgccattctaactggtgtgagatggtatctcattgtggttttgatttgtatttctctgatgaccagtgatgatgagcattttttcatgtgtctgttggctgcataaatgtcttcctttgagaactgtctgttgatatcctttgcccactttttgatggggttgtttgattttttcttgtaaatttgtttaagttctttgtagattctggatattagccctttgtcagatgggctaatatctgacattattattgtaaacattttctctcattctgtaggatgcctgttcactctgatggtagtttcttttgctgtgcagaagctctttagtttaattagatcccattggttaattttggcttttgttgccattgtttttggtgttttagtcatgaagtccttgcccatgcctatggcctgcatgtattgcctaggttttcttcgagggtttttatggttttaggtctaatatttaagtctttaatccatcttgaattaatttttgtacaaggtgtaaggaaagggtccagtttcagctttctacgtatggctagccagttttcccagcaccatttattaaatagggaatcctttccccatttcttgtttttgtcaggtttgtcaaagatcagacagtcgtagatgtgtggtattatttctgaggactctattctgttccattggtctatatctctgttttggtgccagtaccatgctgttttggttactgtatccttgtagtatagttttaaatcacgtagtgtgatgcctccagctttgttctttcagcttaggattgacttggcgatgtgggctctttttttggttccatatgaactttaaagtagttttttccaattctgtgaagaaagtcactggtagcttgatggggatgacattgaatctataaattaccatgggcagtatggctgtgttgcacaggctagcctcaaactcctgaactcaagtgaccctcctgtctcagcctcgcaaatagctgggactatagaaataygccactgtgcctgtctcctattctcttttcttgtattagaattttgtggctgcatgttacaaatgtaagcaaaggagaaaaatccatcaggcatagtggctcacatctgtaatcccagtactttgggagactgaggtgggaggattgcttgaggccaggagtttgagatcagtctgggcaacatagcaagaccctacctctataaaaataaaattttcaaaattagccacgtgtggtggtgcatgcctatagtcccagctactcaggaaggtgaagcaggagaatctcttgagcccaggaggttgaggctgcagtgagctttgatcacatcattgcactctagcctgggtgacagagtgagaccctgtctcaaaaaatggtggcgggggaggggggagtgagaatttattggaagaatactgagttatttcatttaactaagccaaggaaataaattatygtagaaacaaataataaaattttatgttgctgtttaaaaaattgagacagcagtatacctgcttgtatggcaagacagtcaagatgtaatgttaagttagggaatactgcttatatcatgatcccactgggttaagaaatgtttataaatggatatacaaattttggaagtatatgcaagtaaatattaacaatgatttctgtagggagtaaggtcaccagaacgggaggggtgtcagtggattttaccttcatttattctcttcttgagaactatttgtacattgtgagctttgacagccatagaggtatgccacccagacctcccttaagaaaacctgctgtaaaatggtgcagctgctatggaaaacagcatggaagtttctccaaaaatacaactacgatatgattcagcaatactacttctgggtatttatcaaaaaacaaacaaacaaacaaacaaatacacacacaaaacttgaaatcgagatcttggatgtctgcccttccgtgttcatttgcagcactattcttagccaaggactggaaacaacctaaagtctattgaccaatgaatggatttaaaaaatgtagtatatacacacatggaatattattcagctttaaaaaaggaaatcctgcaatatgcaacaacataatgaacttgaggacattatgctaagagaataagccagtcccagaaggataaatactccatgactccacttatatgaggtctctaaaatactcaaacttatagaaacagagagtagaatggtggttgcaggaaatgggaagttgctaatcaatggatataacatttcaattatgcaaggtgaattctagagctctgctatacaatattgtgcctgtagatgacaatactgcattgtgcgcttaaaatgccattgagtagaactcatgttaggtgttcttgccacagtaaaacaatgttaatgcatacataatgaaaattattttttaattcatgtcaaagaaaaacagagaaggaaggaaagaaggaaggaaggaaggcaggcaggcaggcaggcctctatgagaaacatagttccctggccagcctctagctgctgttttttttrtgggggagtggggatggagtctcactctgttgcccaggttgaagtgcagtggtacaatctcagctcactgcaacctctgcctgccaggttcaagcgattctcctgcttcagcctcctgagtagctggggttacaagcatgaaccaccatgtttggctaattttttctttttctttctttctttctttctttcttttttttttgagacagattcttrctccgtagcccgagctagagtgcagtggtgcaatcttggctcattacaacctccgtctcccaggttcaagtgattctcctgcctcagcctcctgagtagctgggactacagtggcgagccaccatgcccagctagtttttgtatttttagtagagacggggtttcactgtgttggtcaggctggtctcgaactcctgacctcaggtgatctgcctgcatcggcctcccaaagtgctgggattacaggcatgagccactgtgcccggccacgcctggctaattttttgtatttttagtagagaaagggtttcaccatgttggctagtctggtttcaaactcctgacctcaagtgatttgcctgccttgggctctcaaagtgctaggattacaggtgtgagccatcatgcccagccagctgccatttttggatccacctcagttctcacactgaggccactttctggtttacttccactcaatgactgcacacagtaggggtactaagtgtgaggtacataatacacagccactgatttagtaaatgcattttttcccctacttctatcaggaaagagactagaaatagttcacatccatgtgggacgacaatatttactcagttttgccccaagaataatatttgctcctttgatgataaaatgtgaattataggctgttatagtttggatatttgtccccacccacatctcatgttgaattgtaatccccagtgctgaatgtggggcctgcccagaggtgtttggatcatgggggtggatccctcatagcttggtactgtcttttcagttctctcgagatctagtcatttaaaagtgtgtagcatctgccccctgaccttgttcctgctttcaccatgtgatgtgcctgcttcccctttgccttctgccacgattggaagtttcctgaggcctccccagaagcagatgctgctatgcttcctgtacagcctgtagaaccatgagccaattaaacctcttttcttataaattacccagtctcagctatttctgtatagcaatctaagagaaaattggcaccggggtggggaattactataaagatacctgaaaatgtggaagtcattttggaactatgtaacaggcagaggctgaaagagtttggaaggctcagaaaaagacaggaagatgagggaaggtttaaaacttcttagagactggttaaattgttgtgaccaaaatgctgatagtgatatggacagcgagatccaagctgctgagtctcagatggaaatgatgaagaaagttggagcttacatttaaaagggaagcagaatataaaagtttggaaattttgtagtctgcccatgtggcaaagaaagaaaaagctttctcaaaagagggatacaagcaggctgtggagcaaccacttgctagagatatttgcgtaattaaaaaggagtgaggccgggcgcggtggttcacccctgtaatcccagcactttgggaggccgaggctggcggatcatgaggtcaggagatagcgaccatcctggctaacacggtgaaaccccatctctactaaaaatacaaaaaattaaccaggttcagtggcgggtgcctgtagtcccagctactcgggagtctggggcaggagaatggcatgaacctgggaggcggagcttgcagtgagccgagatcgcgccactgcactccggcctgggcaaaagagcgagactccgtctaaaaaaaaaaggagccagtgctaatgtgtctggaattggtgggttcttggtcacactgacttcaagaatgaaactgcggacccttgcggtgagtgttacagctcttaaggtggtgtgtctggagtttgttccttctgatgttcggatgtgttcggagtttcttccttctggtgggttcgtggtctcgctggctcaggagtgaagctgcagacctttgcggtgagtgttacagctcttaaggcggcacatctggagttgttcgttcctcccggcgggctcgtggtctcgctggcttcaggagtgaagctgcaggccttcgtggtgagtgttacagctcataaaagcagcatggacccaaagagtgagcagtagcaagatttattgcaaagagcaaaagaacaaagcttccacagtgtggaaggggacccaagcgggttgccactgctggctggggcagcctggtttcattctcttatctggccccacccacgtccggctgattggtagagcccagtggtctgttttgacagggcgctgattggtgcgtttacaatccctgagctggatacaaaggttctccacgtccccatcagattagatacagagtatccacacaaaggttctccaaggccccaccagagcagatagatacagagtgtccattggtgcactcacaaaccctgagctagacacagggtgctgattggtgtgtttacaaaccttgagctagatacagagtgccgattggtgtatttacaatccctgagctagacataaaggttcttcacggccccaccagagcagctagatacagagtgtcaattggtgcactcacaaaccctgagctagacacagggtgctgactggtgtgtttacaaaccttgagctagatacagagtgccgattggtgtatttatgtctagctcagggattgtaaaggttctccaaagccccaccagattcaggagcccagctggcttcacccggtgaatcccgcaccggggctgcaggtggagctgcctgccagtcccctgcgtgcrcccgcactcctcagcccttgggtggtcgatgggactgggtgccgtggagcagggggtggcgctcgtcgaggaggctcgggccgcacaggagcccatggagggggtgtgggaggctcaggcatggcgggctgcaggtcccaagccctgccccatgggaaggcggctaaggcccggtgagaaatcgagtgcagcgccggtgggctggcactgctgggggacccagtacaccctccacagctgctggcccaggtactaagcccctcactgcccggggccggcagggccggctggctgctctgagtgcagggcccgccaagcccacgcccgcccggaactccagctggcccgcaagcgccgcacgcagccccagttcccgcttgagcctctccctccacacctccctggaagctgagggagccggctctggccttggccagcccagaaaggggctcccacagtgcagcggtgggctgaagcgctcctcaagtgccaccaaagtgggagcccgggcagaggaggtgccaagagtgagtgagggctgaggactgccagcaygctgtcacctctcaatcccccctctaaacaggacaccccaactgctgttgggaatttggccgatgaccgctctagctacttcctgctggatggggtgaagaaggggccttgcagttgtagtgtccttcagaggggaactctaggccaggggaagtgccagtgggtcggtccaggggcccttggtagaagttgttagttgaactcattttgggttccatttgtaagcccatctgtagcttgatggccttgattctagaggaaacaaatttgacaagaaggttaaaaatacagggcctaaaggcgagtaacagcaagatggctaccacgggacctagaaaggggagaagccatgttgcccaactccagaggttggtataagaatttgaaaggcgttgtctgatttcagaagccttttcctgtaaacgctgggcagcatcttgtactatccctgactggttagtgtaaaaacaacactcttcccctaagaaggtgcagagtcctcctttctcagcagtgaggaggtctaggcctcggtagttttggagagtcactgctgccaaagagtctatttgggattgtaaagtaaggatagatttcgttatttcttgcaaactgtytgagaggyagatatgggttgaagatccacataagtagaatatgccttggctgggtagatagamrtttacccyggcttttaaaggaatagggtacactgttttttctttactacttccatctctttttctctccttgactttgtctttctgtctctctttcactctgactgcttctctttgtttcttactctctgtctctttctttgacttcctgtctcttccttcctttctgctgcctctgccagctgcttatgttgctgttctyccctctccttcccattttgatggctttgtcagtgtaagattcccacctctttgtgtttttgcattgtgtgcaataactctataatttccttgtggtatttaatgggggtttccccagaggttaggaactccctatttccatattgcagcataggcatgtaggattagataagcatacttgctatctgtatacacatttattctttttccctttcccagttttaaggcttgggtaagtgccactagttctgctaactgggtactgatccctggggcaagaggcttactttcaagtatggttacatcactaactarggcgtaacctgcccttcgtgtcccattctccacaactgaacttccattggtatataggttaaggtcaggattagttaaggggacttctaagagatcatctcgggcggcataagtctggactataatttgttggcagtcatgctcaattggttccccatcctctgggagaaaagtggcagggttgagggccacacacatgtgtatttgaagcaccggtccctcaaggagtagtacctggtatctaagtaggtggttgtctgatagccataaacttcctttggcacctagtatgccatttacatcatgagtagtccagacagtgagatgctttccttgtattattttgatagyctctgacgctaagacggccactgctgcaactacccttaaacagtgaggccagccttttgctactacatcaatttccttacttaggtatgccactggttgtggggttgtcccacgagtctgagtaaggactccaagagctatcctggctctctctgtgacgtataaagagaagttctgtcctgtgggaaggcttaaagctggagcttgtactagggccggctttaaggttttgaaggctgtttctgcctctggttcccattctactagatgagtatttgctctctgggtttccttgattggagtatagaggggcctggctatctcactgtatccggggatccatagttggcaaagccggtaattccaaggaaccccctcaactgttttaaagtcttagggtgagaataagccagtataggctgtatttgttccttgctgagggccctggtccctctggctaagattaggcctagatatttgacctgctgtagggaaagctgggccttcgacctagacaccttgtacctttgattagctagaaagttcaagaggtctagagtygcctgctggcatgaggcttctgaactggtagcgaaaagtraatcatctgcatattgaaggaccagagtgcctcgacttgagaagtggcctagatcttgggccagtgcctgaccaaacagataagggctatccctaaacccttggggcaagaccatccacgtaatttgggacgtgtggtctgtgggatcctcaaaagcaaagaggaactgggagtcagagtgcaggggaatacagaagaaggcatccttgaggtccagaaccatgaaccattctgcttcctctggtgtttgagagagcagggtatagrggttgggtacaactggatatagtggaactactgcctcattaatgagtctaagatcttgcactagtctccactgaccgttcggtttttgtactcctagaattggggtgttgcagtgactgctgcatttccttactaagcctggagctttcaaatgtttaacaatattctgtaatcctttatgaacttcaggccttaagggatattgcctttgataaggaaaagtggtgggatcttttaacttgatttggactgggcaggcatttttttgcccttccaaactgtccttctaattcccagacttcagggttgattccctcctcatgtaggggacaacaaatgggtaacttgttccccatattcatgtagataatagctccagccttggctaatatatccctccctaataagggtgtgggactttcaggcataacaagaaaggcatgtgaaaagagccaagtctcccaattacaactgaggaggtgggagaaatacctggttacaggctgtcccaggattcctcggatggtaacggaccttgaggacagtcgtycaggacaggagattaacactgagaaggcggcgccagtgtccaggaggaagtcaatttcctggccctcaatagttgaacatacctggggatcagtgagggtgatgacatgagctggcacttgccctgggccccctcagtcctgttgttggatcatctggttgggggcttctgacccagggaaccttcgtcctctggggcagtgcaccttccagtgattgcctcagcatagtggacatggacaagggggcagcttgtttctcattggacaatcttttttaaagtgtcctagtaaaccacactgataacaagccctaccaggtgattggcctgctccattttctgtcctctctgaaccaccaaggtttgcttgtctgagggccatgactaaggctgcagcctttctctgatctcgcttttccttttgggcctgttcctcttggtccctattatagaacactgaggttgccaggtttaataatgactctaggttttgttcagggcccagggcttgcttttggagctttctcctgatatctgaggctgattgggtaataaacttasctttcagaatcaattgaccctcgagtgattcgggtgacaggggagtatattttcttaaggcctctcgtagccactcaaggaaggcaggaggattttcttcttttccctgagttatggtggatatcatggaataattcatgggctttttctaattctccttagtccttctagaacacaggtcaacagatgtttacaactccagtccccatgatctgagtcaaggtcccagtggggatccatactggggatggcttgctgaccggtagggaatttgtccctttcttcggctgtcattctatcatttacttgactaagataccaggtatctccaaactctcgggctgcagctaaagccacattcttttccttaaaggccagggttttatctaacagtagcatgacatctctccaaatgaggtaaaaggtttgccctagaccctgtaggaaatctatgtacctatcaggatcatctgaaaacttccccaggtctgccttgayctgctttaaatcagagagggagaaggggacatgtagctgggttgggccaaattcccctccccctacagcttaaggggacataaccgatagcctgggggtttttgtggacctttggagatttctttgcttatttccttctgggcaggggagattagaggaggattatcattcataggaaggggagctatagggaggctaggatatgggggtaagctgaaaggtcctcctgtgggatgtaaattgcaagctttgcatagttgtgrattcaccttcaatgaaaagaaagcttggacataaggtatttcactccatttgccttccctcttacagaaaaggtcaagctgcaggatagtattgtaatttgtacttccctcaggtggccatttttcctcatcagagagagaatattgggcccaagccatagtgcagaaaaaaatgagccgcctctytttcaaggtttgtggatcaaattggtcccaatggcttaggatgcatttcaagggtgagcctgttgatgcctgagtgtttcccatctgaaagacaaaaccgcccacagttttggtttgtttctccccctgcccaagaacccacaaaggtccctggaccctgctgatcggaatagttgcgctcaccgacgcagcagcagaaacaacccctgcccaagaaccagcaacagtcccaggaccctgctgatcggaatagttgcgctcaccgatgcagcaacagaaacactagttttcctcccagaccacatggaggaccaaggaacgttggatttagtggtccttactgatgcagtcttgaaaacctgcacccttgcctgtcctcctagaccacaaggaggactgaccgagaaaaatcggatttggtggcccttaccgacacattctcaaaaacctgtcagagtcctaagcattctcctgtcagtattggtactttacccctttcctataaagatgttatgccccaaaaatgaagtggagggccatgccctgagggagggaagggatcttcaggattggaagagtgacaccttttgtcctcgcttacatgaataggaaggatacaatttctgaggctccccatatcctagcttcaggaatagcttttgttaggcctgttagtctgaggagggatcctaaaattccaggtagtccccactacaatggggctttgggcaaaaattgtgtctttctgattggtgagcccgggtgcctacagaaagtagcagagacctggagtttatactagaaatcattcttataggagaaactagaaaagcaccagagacaggtagcaatttttagaagcaggactaacctcagagaagagaggcgagaggaagtttgtctggcaggcattaggacccagggggcaagggtcaggatagataggatagatgggcgagtctcacttgggcgacaggcctttgagagttccactcatggccgcagggtcaaccaacttgttgtcgggaccctggagctgcatggctttcctctctgtcgacccttggctcagcccagaagtacaggaaaagtggaagctggtgctaggcaaaccaatggtcccaactctgaagagttggggttgttagccctttcccagaaagcctgacacccatgtctttagtccggcagccgtgctagtcacttttaactggccgacaggtgcccggtatttagcccccgaattctaaggaaagataggacagaatagcaagtgaaaggggtccgtggtactcactgcttggtgataggtgatggtctcgccgctcagctataggtgatggtctcaccgcttggtgataggcgaaagtcccatctgggtcgccaaaatgtgtccggaattggtgggttcttggtctcactgacttcaagaatgaaactgcggacccttgcggtgagtgttacagctcttaaggtggtgcgtctggagtttgttccttctgatgttyggatgtgttcggagtttcttccttctggtgggttcgtggtctcgctggctcaggagtgaagctgcagacctttgcggtgagtgttacagctcttaaggcggcacatctggagttgttcgttcctcccggcgggctcatggtctcgctggcttcaggagtgaagctgcaggccttcgtggtgagtgttacagctcataaaagcagcatggacccaaagagtgagcagtagcaagatttattgcaaagagcaaaagaacaaagcttccacagtgtggaaggggacccaagcgggttgccactgctggctggggcagcctggtttcattctcttatctggccccacccacgtccggctgattggtagagcccagtggtctgttttgacagggcgctgattggtgcgtttacaatccctgagctggatacaaaggttctccacgtccccatcagattagatacagagtatccacacaaaggttctccaaggccccaccagagcagatagatacagagtgtccattggtgcactcacaaaccctgagctagacacagggtgctgattggtgtgtttacaaaccttgagctagatacagagtgccgattggtgtatttacaatccctgagctagacataaaggttcttcacggccccaccagagcagctagatacagagtgtcaattggtgcactcacaaaccctgagctagacacagggtgctgactggtgtgtttacaaaccttgagctagatacagagtgccgattggtgtatttatgtctagctcagggattgtaaaggttctccaaagccccaccagattcaggagcccagctggcttcacccggtgaatcccgcaccggggctgcaggtggagctgcctgccagtcccctgcgtgcgcccgcactcctcagcccttgggtggtcgatgggactgggtgccgtggagcagggggtggccctcgtcgaggagactcgggctgcacaggagcccatggagggggtgggaggctcaggcgtggcgggctgcaggtccggagccctgccccacgggaaggcagctaaggcccagcgagaaatcgagcacagtgccagagggctggcactgctgggggacctagtacaccctccgcagctgctggcccaggtgctaagcccctcattgcccagggcccgcagggccggccggctgctccgagtgcagggcccgccaagcccacgcccgcccggaactccagctggcccacaagcgccgcgcgtagccccggttcccgctcgcgcctctccctccacacctccctgcaagctgagggagccggctctggccttggccggcccagaaaggggctcccacagtgcagcggtgggttgaagggctcctcaagtgccaccaaattgggagcccaggcagaggaggcgccaagagggagcgagggctgtgaggaccaccaacatgctgtcacctctcactaacagtcaagacaatgaaaaaaggccttgaatacatttcagagacctatgcagcagccccttctattgcaggccctgagacctaggaggggagaatgatttcatgggccaggcccagagctccactgccctgcacagccttgggacactgctccctacctctcggaagctccagctccagccagggttcaaaggggccgaagtacagcttaagctaccactttggataatacaagttgtaaatggcttccacatggtgttaagcctgcaagtacaaagagtgcaagagtggtgggttcttggcagcctctgcctagatttcagaggatgtatggaaaagcctgggtgttcaggcagaaacctgctgcagcagtggagcccacataaagaacctctactagggtagtgcggaggggaaatgtgggattggaggccccacatggagtcccttctggggcattgccttgtggagctgtgagaagagggccaccatcctccagacccaagaatggtagatgcacctgcagcttgcaccctgagcctgaaaaggccacaggcactcaacaacctgtgagagcacctgagaggggtgaaccctgcaaagacacaggggcagaactgcccaaggccttgggagtccatccctgccagcagtgtgccctggatatggaatatggagtctaagatttaatgactgccctgctaggttttgaacttggatgggctctgtaacccttcttttggcctatttgtcccacttggaacaaaaatgtttagccaatacccaaacccccattgtatcttcaaagtaaataacttgttttgattttacaggctcataggtagaaggaactcatttccacataagaatttggatttgaaacttggaacttttgaatgaatgctggaatgagttaagactttgcggggactgttgggaaggcgtaattgtacttcgtaatgtgaggacgagatttgggaggggctgggatggaatgatatagtttgcatatttgtctctgcccaaatctcatgttgaactgtaatccccaatgctaaaggtggggcctcgtgggaggtgtttgggccgtaggcgcagatcctgcgtagcttgctgctgtcttcatgacagtgagttctctggagatctggtcatgtgtgtggcatcttcccccattggctcctgctttcaccatgtgatgtacctgctctgtctttggcttccgccatgaaatgcaagcttcctgaggcctcccctcaggaaggaagatgctgctatgcttcctgtaggaacatgagccaattcttttcttgtaaattaaccagtctcaggtatttctttatagcaatgcaagaatggcctaatacgtgggccatctgggcattccatagaacattacatcaatgacatcatgctaaataagcaaaatgaatgtaaggtagctagcacaccggaagccttgctatgtgtcccaggtgagagagaaactctacatagatttggggatctgcaattcctttttttttttttttattttaagatggagttttgctcttgtcgcccaggctggagtgcaatggtacgatctcggctcactgcaacctccgcctcctgggttcaagcaattctcctgcctcagcctcccaagtagctgggactacaggtgcgcgccaccacgcctggctaatttttgtatttttagtagagacagggtttcaccatcttggccaggctggtctcaaactcctgacctcatgatccacccgcctcggcctcccaaagtgctgggattacaggctttgtaatcccagagccaccgggtgagccaatgctcccggccaggatctgccattcctttaagggttctaggagaccaggggacatgggcatgctggaatactctacaaagtaaaaagacacactacattttgcatcacctgctacaaggaagcaagcactgtaactctggggttctctagattcagaaagcaagacattccacctagaaacactactccaacccatatagtaaatgacatgaaaaaaatgttaggcttgagtagggccttggagcaagaaagggctgttgaaaattaagattcaggctatgatgcaagcagccctacaaactggaccacatgatctgataaactttatagtataagagggtatcagtggcaggaaaagatgcaatgtgatgtggagtttatatcagaagctcatggaactgtggaggggctacccaaaggtgtaaagtggatctgtgcagtgttaaggagtggaattgtgccactcagttctcaagaaaactggatgcaagtaacaaatctgacagccaccagctgctagtcctcctgatctgttacagcactcacatgaaaaccatgtgttctccccaggctgctctggactagtagtcaggccatctctgcccaatctgggactgctcttaataggtaatctgctctgagattcctcatcaggctgggagactctcagagcagctgaggtttgagttctcttctctctcttctgtcacatgcacattgcattctgaaggccttccctgcctactgatccctctcccttgtatccctcacaggcatttccctcagtacagctctagtgtatctgactccaccttggtgtctgccttttggaggatccaaggtgacactaccatgcatgctttaacaataaacttgttaaatgatgataatcaaagtgtttttttttgagacagggtcttactctgttacccaggctgcagtgcaatggcatgatcatggctcactgcagcctcgatctcctgggctcaggtgatcctgccacctcagcctcctgagtagctgggacaagtgtgcaccaccacgctgggctcatttttttgtagacaccggattttaccatgttgcccaggctggtcttgaactcctgggctcaagtgagccgcccacctcaacctaccagtgttggcatcacaggcgtgaggcaccatgcccagctaaggcttttcaagcgattctcctgcctcagcctcctgagtagctgagattatgcgccaccatgcctggctgatttttatatatataatttttagtagagatagatagggtttcaccatgttggtcaggctggtctcgaactctttgacctcaagcaatctgctcacctgggcctcccaaagtgctggattacaggcgtaggccaccatgcccagcatcatgctttttttttttttttttttggtgacggagtctcactctgtcgcccaggctggagtgcagtggtgtgttcttggctcactgcaacctctgcctcccgggctcaagggattctgcctcagcttcccaagtagctggaattacaggtgcccgctaccatgccccactaattttttgtattcttagtagagacagggtttccaggccaggctggtcttgaactcctgacctcaaatgatctgcccgcctcagcctcccaaagtgttgggattgcaggcatgagctaccgtgtccggccattaaattttaataagatagttgccattgcgttgcaattgtctacagtattcacatgctctacaggatagtagcttacaagcagtaagctataccacatagcccaggtgtatagtaggctgtaccatataggtgtaagtacactctatgatgttcagggtgaaatttttaaaaagtttgcatttcttcagagattaaaaagtacagcaacaactattcagcatggacagataaaagtgtgattaaaaaggacaggggaaaatccattgaatagtgctcacctatgtgccaaaagaggagtaatcattttagaaggtatcatagaaatcagtctgttaagaaccaaaggactcaagagcaaaaggcgaagagtagaaaaaaagggaatgacatgtggagctagaaatcaagtctagatatctggaccaaagtgaactgatataaagaacaagtcacacggcatgctatgttatttccagcgcatagtgtctttatttagaaaacagacggaatcaaacaggttggagttattgctttcttgttctgtatattcatattctccacttgaaaaagcacacagtcaaatctatcttcatccattctgttgatgagggtaagcaaaaaagatcactggttacttcaaaagaacctaggggggaaaaacacaacttatttaaatcatagattttaaaagtctctataaccaggataagaaaaaatacaaataaagacagaaaatcaactaacatgacaataaaacattctaaattgattagactaccaaaaaccacagttttgtgttattatcactttgtcttggtgagctcagttaacaaagatatactctgattctgacttagaagacatttaatgttcttatcattaaaaaataaaagctaaatctattactgttttacaagagcaaccttatttcccaaatttatttgactctccttcaggaaaaactattctaactccctggaaattgttctctctagtgagtgaacagtcgcaagttcaatttataggtccataatattttctacttaattaagatgctgacaccaaaacagccaaaatgtgcttccttttctaatctgcaagttttgtgacttattttagacagcttatgttaaatatatatatgtgtgtgtgtataaaaccacaaagatgtctccgtactattactccttagcaatcctataataaagacaattatgctgcattttagtcagaaaaattgtaccaaaagaaaaaatctaacaaaaattccttgtagaacatacaaaa

SEQ ID NO: 97596 - DNA, 15455 bp, Homo sapiens; identical to SEQ ID NO: 97403

SEQ ID NO: 97597 - DNA, 23211 bp, Homo sapiens
ttgccaagacaatcctaagccaaaagaacacagctggaggcatcatgctacctgacttcaaactatactacaaggctacagtaaccaaaacagcatggtactggtaccaaaacagagatatagaacaatggaacagaacggagccctcagaaataataccacacatctacaaccatctgatctttgacaaacctgacaaaaacaagaaatgaggaaaggattccctatttaataaatggtgctgggaaaactggctagccatatgtagaaagctgaaactggatcccttccttacaccttatacaaaaattaattcaagatggattaaagacttaaatgttagacctaaaaccataaaaaccctagaagaaaacctaggcaataccattcaggacacaggcatgggcaaggacttcatgactaaaacaccaaaagcaatggcaacaaaagccaaaatagacaaatgggatctaagtaaactaaagagcttctgcacagcaaaagaaactaccatcagagtgaacaggcaacctacagaatgggagaaaatttttgtaatctacccatctgacagagggttaatatccagaatctacaatgaacttaaacaaatttacaagaaaaaacaaacaaccccatcaacaagtgggcaaaggatatgaacagacacttctcaaaaaaagacatttatgcagccaaaagacacatgaaaaaatgctcatcatcactggccatcagagaaatgcaaatcaaacccacaatgagataccatctcacaccacttagaatggcaatcattaaaaagtcaggaaacaacaggtgctggagatgatgtggagaaataggaacacttttacactgttggtgggactgtaaactagttcaaccattgtggaagacagtgtggcgattcctcaaatatctagaactagaaataccatttgacccagccatcccattactgggtatatactcaaaggattataaatcatgctactataaagacacatgcacacgtatgtttattgcagcactattcacaagagcaaagacttggaaccaacccaaatgcccatcaatgatagactggattaagaaaatgtggcacatatataccatggaatactatgcagccattaaaaaggatgagttcatgtcctttgcagggacatggatgaagctggaaaccatcattctgagcaaactatcacaaggacagaaaaccaaacactgcatgttctcattcataggtgggaattgaacaatgagatcacttggacacagggtggggaacatcacacaccggggccgtagggggtggggggctgggggagggatagcattaggagaaatacctaatgtaaatggtgagttgatgggtgcagcaaaccaacatggcacttgtatacctatgtatcaaacctgcacattgtgtacatgtaccctagaacttaagtataaaaaaaaaaaaaaaaggaggcaggattatcacttgttcctcgcagctctggactcccaggaagaggcagcctggtcagattctgggaaacaaaagaaaccttttgtttccgtcaagtttcaaacagaggaccttccgtgtgttaggccagcgtggtaactactacaccacagaaaccctttgcattgcaggctttttatgttttgcgatgagtattaaatacttgtttttacaattttttttagttgacaaataaaaattgtatatatttatgatgtaaaaaaaaagtttaactctcttttttttaaagggaacatctacaaatctatgaaatcttcccaattaaagtaacgatacttaaaaccctatctgaaaacaaatctgaaaaagaaaggtagacttgagaatcatcaaaataaagaataaaaaggaaacaagtaaaccacatggtttaaaaagaaagaaaggctgggcacagtggctcacgcctgtaatcccagcattttgtgaggccgatgtgggtggatcacttgaggtcaggagttcaagaccagcctggccaacatggtgaaatccatctctacgaaaaatacaaaaattagccaggcatggtggcacacacctgtagtcccagctacttgggaagctgaggcaggagaattgcttgagcccgggaggcgaaggttgcagtgagccgagatcactccactgcactccagcctgggcgacagagcaagattccgtctcaaaaaaaaaaaaaaataaaaataaaaaaaggacgatgagctataaagagtgcattataattcaaaacaaagctttacaaacatgaaaacctgccaaaggagatgtccaagagccaacatccagatgggaagtattgaacaaaaacttgttttatatactaaggtgagcatgtggaaatgtttttccattttataaaaacgttacggcctaatgttgcaacaaagtcgaactgcaaacatcacaaagaaacctcagagcaatgtctgagttctggaaggaaataaattggaacatacccttattatcctggcagcctccaaaaggattcggcaacgctccatgccagatttttgactccatattttaaaagcagcctttgcattttgaacagccaaatttacttccttttctcctgaacatgtgaaagtagctatcactcggcctataaagagcggaaacatcagttttaactcaaattgttgccacatatttaaataaaatattatctatcaatattctcttagtagtagtcttttttttttttttttttttttcttgagatggagtcttgctctgtcacccaggctggagtgcagtggcgcgatctcggctcactgcaacctctgcctcctgagttcaagcgattcccctgcctcagcctcctgagtagctgggactaccagtgcacgccactacgcccagctaattttttgtattttttagtagagaccgggtttcaccatgttgaccaggatggtcttgatctcctgaccttgtgacccacccgcctcagcctcccgaagtgccggaattacaggcgtgggctaccgtaacttcttgtttttatgtatggtttgatttagtgaccatctctatactagcaggtttttttgttttgtttttttgttttttaagacggagtctcgctcttgttacccaggctggagtgcaatggcacgatcttgactcactgcaacttttgcctcctgggttccagcaattctcctgcctcagcctcccgagtagctgggattacaggcgcctgccaccacacacagctaatttttgtatttttagtagagacgggatttcatcatgttggccaggctggtcttacattcctgacctcaagtgattcacccacctctgcctccccaagtgctgggattacagccatgagccaccacacccggcctagcagttcttaactgtattttgcggtcattgacattaggagtctgataaaagttgcagacctctctccagaaaaatctacttaaacatataacagaattacaggaatgtcatgtcccctgccctaaactcatcaaggatttagagttaagaacccctgccctctactattttacagttgagtttactaacattaacttctgattaagttttgcaacactcctaaacattatctcagaatctcaggggtcttgtaaaatgaaagtcaaaagtaatcagtctattgggttataaactctgactgtaaatcccttgtctatattctatgtaggttatatcatactacttgatacttgataaatatagttaataagcagtaatatcaggataaggcaaccctaaaggaacattttttttttctcaaaaattcccagatttccttttcttattccacctttattccctctccctattctggtgcaaattatgaaacaatcagtttttctaggcccatagcccaaggactgtactgcctctaccaacaagaattctttaagtttgccaactcagcaaatcctcttcacaagaactcctgggactctttccagggagatttcacaaatctgcaatttctgttacaaacttgaatagccagctggtaaaggcggtggctgaggatcacacacactgtaggcaattaaagcaaagagcaatttttctttcttttgtatcaggattaagtcggggtagagaagctgtttcctcctatataaagaagagatgtgataatgccttctggctctgccaagtcactgctctgtggtttagtgtggatggtcaaatactaaattctccagtcccctgcaaatcagttttattgctctggctacattttacacaaaatatttacatttttctccccacatatattccataaaacccagcaaaataaacacaacacaaaaccaaaacaaaaagccccttcttccttatctctgtgaccttcagagttcccagagtaaatccagtgcctagcacagtgcttagcacacattaagcattggattaaaaagttttatttcagcaagatgaataaattgtggagagctcatgtagaccatggtgactatggttaccaatactgcatcatatacttgaaatttgctaaaagaatagatcttaaatatttcactatccaaaaaaagccattaactatgcagaagcaatggataattagattgaccgtggtaaccattttgcaaggtatacatacattacaacacgttttacaccttaagtatatacaatttttatttgttaattatacttcaataaagctggggaagaaagtactgaataaaggtggggttttttcctttcccaattctgattaatgtgcagaaatattttaatattagaatgtggagacaaagtcctcattcgtagtcattagaaactatctgtgagcgttccttcattcccagcacaaatgattatcttccccacaaccccgccccgttcttttagaattcctctcctatgcacacatttgaagacaataatacatcagtcctggttttaaaagggggaacagttggctgggcttggtggctcacggctgtaatcccagcactttgggaggctgaggcgggaggatcacctaagctcaggagttcgagaccagcctgagtaacatgctgaaaacccgtctctactaaaaatacaaaaattagccggacatggtggtgggagcctgtaatcccagctaccagggaggctgaggcgggagaagcacttgagcccgtaaggtagagggcgcagtgagctctgagatggtgcccctgcactccagcctgggcgacagagtgagaccctgtctcaaaacaaacaaaaaacaaacaaacaaacaaaacaaacaaaaaaggaagttaacagaggcacgacttcccccaccagtactttgcgaactctgttctggcccgggtaaaacaactcacgatcctaccacgcaactcatcagctttgcttttcctccctacccatccctgcccggaggcactcgcgttgccccagaatcgctagttgcctacacacacaaccttagactctccactgtcactgtcttgtgctcaagtcaacgctgcagaacacaggaaacgggggctggccgggaaatccgcgcatccggccccagggcgccccagcctccccggctcgttgcagttaccggttgctggctcgaaagctttctcggtaccggaggcgtccgccggctccacgcgggccccgccgcggtaattgagcggctgcgacacgacgaaggtgccagtgctcatggcggcgacaggagagggccgaagactgcgaagaagcggggagagcgcggccaggcctgctcggagaaacatgagtggcggacgcagctccgcggcagaggctgacgggccgcgggaggggcggggccgcgggaggggcggggccgcgggatcggttctaggagattttaggggcagtcactcgattcctctgcggtccaggccaggccctcccctcgccaggagggtggagcaagacaccacattctccccaccaccccgccataccccacacagtctccaggcgggaagaggacttccttcttcgtgatcaatatttgcgtagcactttgcaagtgttttcgggttcatcattgcatgtaagcatcctaggatcccattcttaatcctatcgcctgaagaaggcagaggattggagtgccaagagtctttggtggttacttcactgctaaaccaccgtttctgtaattgtataatgctttttaaagggtgacagtaaaaagcaaggggactgtgaacgagatagatgatattgtgatctgaaactgctttttaaattcttaaagagakactgggcgctgtggctctcaccaaggctggaggatcgcttgagcccaggagtttgcgggcaacagagagagatcccgtgtctataaaaaaataaaataaaaataataaaaattgggccgggcgcggtggctcacgcctgtaatcctagcackttgggaggccaaggcgggcagatcacctgaggtcaggagttcgagaccagcctgaccaaaatggtaaaaccccgtctctactaaaaatacaaaaattagstgggtgtggtsgcrggcgcctrtaatcccagctacttgggaggctgaggkgggaaaatcgcttgaacccgggagacgggttgcagtgagccgagactatgccattgcactccagtctgggtgacaagagtgaaactcagaaaaaaaaaaaattatccaggtgtggtggcacacgcctgtggccccaggtacttgggcggctaaggtgggaggatcccctgagccccgggggtccaagcttgcagtgagctataatcgtgccactgcactcaggcctgggcaacagagcgagaccctgtctcaaaataaataaattctgaaggagcaatgtaaatgctattaatgacaaatattgatagaaacagaagcctaacatacagaatacgaagagcaaaggccacaggaaaaagtgtcaggaaacaaaatgccttctgtaagacaaagcagccacccagaggcactcacaggtctgtcagctgagggatcttgcacaaaggttcattcttctcaccaaacttccatgcacctccagtagagactttgacaaacagaaagtaattggcaatttggacatttcttttaggattgtttctcttctgggggctgctgtctttctcaatgttttttcctttacctgccagctcaccagcgcaatattagggagtgtggttttcaggtttagagtatatataatgtattctgatcaagttttctggcactctataccagtttgttcactttttcagtgctactgagatgtgtaggtcttggtcctcagatggaaacagcagtgcccaaactcagaatacctgaggccacactcacatattattttattattgtccattgcaaacagaattgaaacatatcaggagttggtgacragcarcactatagatttccaagatcactgaatggtcatttaggtacagaaactatacgtctcaaattttatgggacaatttctatttaaaagattctgtccccaaccaatgcattttgacttgtcacatcataattcctgatgtttgttttggaaatgtggtcgtgatgtctattgaattaattcatagatgataagactgacaaacctctggccaggcacaggactcacacctgtaatctcaacactttgggagaccgtggcaggaggatcgcttgaggccaggagttcaagaccagcctgggcaacatagtgagactctgtctctacaaaatatttttaaaaattagccgagcatggtggcacaagcgtgtagtcctgactactcaagagactgaggtggaggattgcttgaggccaggagttcaagactggagtgagcgatcatggcaccactgctccagcctgggcaacagagtaagacccttccccaaagaaaacagatctcctccaaaatatctaccttttaaatatctagctgttcctcttacctatctgtgcttttattattaaattattatttttaacttttaggttcaggggtacatgtaaagatttgttacataggtaaacttgtgtcatgggggtgtgttgtatagattatttcattacccaggtattaagcctagtacccatgarttatttttcctgatcctctccctccttccacccttattattagattattaatgtattatttttcattagcaaaatccaacatgtagaaagagctttataggttacagagccctttcacatttactttctcacatgaagctcataataaccctacaaaagaaaaggaaactaacagagattgagctaggaggtagtatgtggcactttgtcaaatatctcagtgacaatcatgcaagataggttttatcatccccattgtacagatgaggaaactaatagaaaggtcgtagagcttccccataaaggagctaaggctggagtccagctctgtgcaagtccaaagtaaatttcttcttactacaccaggtcgagatgttgaccccatgaaggttgctatcaaaattcactcttatgttggtggatatttatcagaaacccagaaatctggttctagggagatttaaaggacatgtaaacttcttaggatatttgtcagcactacccagtaagcagcccagaagkcacagaggatgctggccagtttacaagttcagggtgaaattcaaagggacaaagatgccacaaggagcagaaggaatgccaaaagagaaacacctcttagatgggtgtgtgttggagggcagatttgggggtaaaaagagatagaaaaggagtggaatcattgctaaaggggtagaagatccaaggagaaactgcctgcctcacaacttgcttaaagccaaacttgggtgccactaaagccccctccttttccacatttccttccccagacaaccagaggaggaaaagaaaagcaactggatccccttcygccacctccaggtctcctaaaggaagaagtccttgggaacccatactgtgtgatccagggtccttcactggcctctccctcaggtcatccagttgtcaatttgttgctttggcttagtttcaccattagcagtactcttcttggacacaacctccagagtaaaagcaaatgccggatgcggtggctcacacctgtaatcccagcactttgggaggcggaggtgggtggattgcctgagctcaggagttccagaccagcctggacaacatggtgagacccctgtctctactaaaaatacaaaaaaaaaaaaaaaaaaaagccaagtgtggtggcgcacacctctagtcccagctgctggggsgttgaagcgcgaggatygcttgaacctggaggcagaggctgcagtgagccaagattgcaacattgcactccagcctgggcgacagagcaagactcgctctccaaaaacaaaaaaaaaaaaaaaaaaagaaagaaaagatctttagggagtactagctcttagtctgtcctctagaactattaatacatcaaacacacacacaccacatttatttttatttcctgaacaatagtatgtttactactgttgcaactccttcagtggggagccagaaaaccatccacacaaaaagaaaggaaaaaattactcagaatcctgttcctgcccattttaacagggcctttcacttaacaataatttacagattgaattttattttaagcctgagtgtcctcacattcttcatatacagaatgtaattttctcactgaagacctaacaggtttcctaatctaggcagcctgacactaggattaggtccttaatgaatatttgttgaatgaacacatcagtcaggtgttacaaaccaggactttgaaatcactgcgctgatgaggatgtcccctaatgctacttaggcatctctgcttggataatctagtctttttcatttttaacagctttttaggctataatactcatattttcaaaaataggtttaatttataaacctgaggtaatatgaaacagtatgtgaaagtggtctaaaaattagaaagcactatacaattgctattataataacaatgttcatagtttgcagtgccttcgtgtttttctcaaatgaaattcagggtcattgactttggaatttgttcttggagttgataatcagctagaggctaaaggctactgagcttacagaaaaatttagaatctgtctgttatctaagacagtagcattatatagaaattattccaactcttccaaatgtataagatataaaaatgagagattcagaaggtttttttaaaaaaaggatatgatttttgttttctgggaaaggatctcactctgtcatccaggctggagtgcagtggtgtgatcacttctcactgcagcctcaatatcctgggatcaatcaatcctcccgcttcagcctcctgagtacctgggaagacaggtatgtaccaggatgcctaatttttcttattttattttatttttttagagacagggtctcatcatcttgcccaggttggtctcgaacttctgagcttaagcaatcctcctgcttcagcctcccaaagtgttgagattacaggtgtgagccatcacctgtatatactgatatgtatatcagtggttttttctgggcacacacctgtcagtgttttttctgggcacacacctgtagtcccagctactcaggaggctgaggtgagaggatctgagggggaaggattgcttgagcttaggaatttgagaccagcctgggcaacacaatgagaccccaattctaaaaaaaaacccaaaactttaaaaactcaaacaaagaggccaggtgcagtggcttacacccgtaatcccagcactttgggaggccaaggcgggaggctcacttgaggccaggagtttgaaatcagcctgggcaaaataacaaaactctgtctctacacaaagtaaacaataaaaaattacccaggtgtggtggtacataactggggttccagctactcaggaggctgagatggaaggatggtttgagcctgggaggtcaaggctgcagtgagtcatgatcacaccactgtactccagcttggatgacagagcaagacactggctcaaaaacaaacaaacgaaaaaccaagccattctggcataccatttaagttaaaggcatttgaaaaatagcagggatgctgaggtgagagtatcacttgagctcaggaggttgaggctacagtgagccatgatcgtgccactgcactccagcctgagcaatagagtgaggccctgactcaaaaaaaaaagaaaaaaaagaaaaacagcaggtgcaaaaagatcactgtaacctttgtgctgtttcttcttcttttttttttttttttttttttttttgagacaggatcttactcttttgcccaggctggagtgcagtggcactgtcatggctcactgcagcctcaaccttctggactcaagcgatcctcccacctcagcctcccaagtagctgggactacaggcatgtgccatcamacccagctaatttttgtattttttgtagagacaggatcttgccatgttgcctaggctggtcttgaacacctgggctcaaatcatctgcccacatcggcctcccaaagtgctgggattacaggcatgagccattgtgcccggccttgtgctgttcctttaaagctaaagatgaaattcccatgtgaaagaagcaatatccttatctttaaggacaagaaatcaagaccaagagaattctgtacagaccttgttaaaataactcttaccttttaagtccttccacataatttagttgcttcatcataacttaccactctttgtccaattcagtatataaggaactgactcaaactgcttcttttcttgtgtgccacctaaaacctgcattaaatatattcgtgctgggcacggtggctcatgcctgtaatcccagaactttgggaggcccaggctggtggatcacctgaggtcaggtgttcaagaccagcctggtcaacatggtgaaatcccgtctcyactaaaaatacaaaaattagccaggcgtggtggtgtgcacctgtaattgcagctacttgggaggctgaggcaggagaatcrcttgaacccaggaggcrgaggttgyagtgagccgagatcgagccactgcactccagcctgggtgacagagtaagactctgtaccaaaaaaaaaaaaaagaaaaaagaaaagaaaagaaacagcacacacagacacacacaaaatttggatgctttctcctgttaatctgttttatgtcattttaattctccagcccaatcaggagtctaagagaacagaggtggagttttgccgcccctacaagctgcatttgcccatatggcttgttttcttaggacagaatcctagaagtggaattgctaggtctaaagacataattgtttttaaactttttgataccaatttgcaagtagccttaaaaaaaaaaaaaagaccgggtgcggtggctcatgcctgtaatcccagcacactgggaagccgaagcgggtggatcacctgagattgggagttggagacaagcctggccaatatggtaaaaccccgtctctactaaaaatacaataaattagccgagcgtggtggtgggcgcctgtaatcccagcttcttgggaggctgaggcaggagaattgcttgaacccgggaggtggagtttgcagtgagctgaagtcgcgccactgcattccagcctgggcacgacagagtgagagactctatctctaaaaaaaaaaaaaaaaaaaaaaaagtcttgtccaacagagcaggcagcctttttttggctagaggtcttgaggtatagtttacaattaataaaatgcactcatatcaaggggacagtacaacaaattttgacagaggtatgtaattacttcattcatgatatgcagggagtttttttattatatgactgtaaatattaatcaccattaagccaagtagtctattttaattatattttcttttttgcataattttttatttttccagttcacaattgcttctaattttcttatgaatacttgactaagtctttccacaccctctgacagctctgtaaaacaaagtcaatatataatttctatatggtcaaacctatgagataatttgtgtggctttttgttttgttttccttggagatacctgtacgggagttttccaacctcctcatctactctggattgcttgttctctccacctgctcccccactcttgccctgggacttgtctttgctgtcatcccaagcattccctttgcccctgcctgccaatatcctctgtttccatgtcttcctctttcttcgtatactcccttattttaacagagacatcttctagtagtagcttcttgagaaagggcacaaggaaggtaaatcatttgagactgcccaaatgaaaaatattcattctctcacatatgattgatgatctagctgtgcatagataagtatagtattcaagttgaaaacaacattcttttagaattttaaatgtaaattccattatcttctagtttagaattgctattgagaaatctaatttgtaggcagtttttcatctgcctttccaatgttttttgagaacccattctgcaccaggcactgaattagatgttaggagtatacaaacctgaatacacaggcacatggtaagaacttaataagtagctgttgtattatgtagccagtttccttaggttccttattttttctttaccttgagtcatagaaaaacacaatagagaaatcagaagtttaatgaaagtgctttggacaatttctaacataaattacaattcagaacgtttaaaaaatcccaacctakccaatctctaaatgccacatatccaatccattatcaagtgttaacatttttgcctttaaaatatatcttgattcagctaagctatgaggatgcaaagacatacagagtgatataatggactttgaggacccagagggaaggttgggagagggatgagggataaaagactacatattgggtacagtgtacactgcttgggtaatgggtacactaaaatctcagaattcactgctacagacctcatccatgtaaccaaaaaccacttgtacctcaaaagatattgaaatttaaaaagagaaaaaaagaagaaagaccttatctttttaccttaaataggaagacatcacaacagagaaatccatgctttttaataaagaacagaacagagactattcaccatgattagtcagaacgtacgttctctttttatctctgaattaattagttttcagatcagctgcattatcgaaggcaaaaatagcaatggcaaatacaggaaataaatttatttctctattatataacggtccatgctaagcagtccagggataatatggtggcccccaaagtattagggaccaagggaccctctgtgttcttgttctgacatcctcacgttaacttctccatgttccttgaaaggctattctctttcagcttctggtagaagakcttctgacataacaagacgtggcgatgattttttgtatcaataatcagcatccacagygattctgatgcaagcgtccttggaccacattcaaaacaattaagcattgtttcccatgttatgactctcagaacactaattttgcaagatgctccatataaaaaggattctgttgataaataagtttggaaaactgtacttaacacattcccattttggaaatcacaatgattattascatattttgaacttaaataagtgctgcagtaaagaaatctgctcaatgttatacaatctgatgtttctcaatcttatttgagctcagcattgttttttcaggtgacttactaaactctgtaggaaatgctgtttaagaatcagattgggtaaaatggggaagagatcattaaagttagcaagtaagggatctttagtatctttaaatagagcaatttcagttgaagggcgagaagaagccaggctataataagttatggaatgaaccagaggtgcaatgtgtacattgaacatacaactacattttccaaaaggatagtgaaagaaagaaaggtgcaatacagtttcaggaagaaaaaaggagtcaggaagagggagaacttgcaaatccaagaggaataagaaataactgggtcatcaagtggaatggagactgccgaggaggtgaagagagagggctgagagaagcagcaagagatttgttctggggacccagaaacccacggtaccctactgaaaatcaaatcccttggaaacccacagagacagcagcaaaaaaagggataaagacactcaacaccaggaactcacctctctctctgcctctctccccgtctctctctctctgcctctctccccgtctctctctctctgcctctctccccgtctctctctctgcctgccctagtcatctagtctccaaactcccagtcccctgtgccccttcctgggataccatgttgttcttcatcctcctgctagaggtgatttggatcctggctgcagacgagggtcaacactggacatatgagtgcccacatagtcaggaccactgtggccagccttttaccctgagtgtggaaacaatacacagtcccccttcgatatccggacagacagtgtgacaattgacccttagatgactgctctacagccccatggatatgaccggcctggcactgagcctttagacctgcacaagaatagctacacagtacaactgtctctgccctctaccctgtatctaggtggactttccagaaaatatgtagctacccagctacacctgcactggggtcaggatgatccccagggggctcagaacaccagatcaacagtgaagccacagttgccgagctccacatcataygttatggctgtgattcctgtgatagcttgagtgaggccgctcagaggcctcagggcctgactgtcmtgggcatcctaattgaggtgagtgagactaagaatatagcttatgccagcctggccaacatggtgaaacccyrtctctaytaaaaatacaaaaattagcygggtgtggtagtgggcacctgtaatcccagcttacccgggagrctgaggtaggagaagaatcacttgaacsygggaggtggaggttgcagtgagctgagattgcaccactgtactccagcctgggcaacagagcgagacttaaaaaaaaaaaaaaaaaaaaaaaaagaatgtagcttatgaacacattctgggtcacttgcatgaaatcaagcataaagatcagaagacctcagtgagagagctgctcccccgacagctagggcagttcttcctttacaatagctcgctcacaacttccccttgttagtagagggtgccctggacagttttcagtccaagggcccagatttcaatggaacggctggaaaagcttcaggagacattgttctccacagaagaggggccctccaagtcctgatacagaactactgatcccctcagcctctcaaccagcaatgacctttgcttttttcatccagatgggatccttgtatcctacaggtgaaatgctgagccttggtgtaggaatcttggttggctctctctgacttctgctggccattttcttcatggctagaaggcttcagaacaagaggctggaaaatcagaagagcgtggtcrtcacctcagcatgagccaccactgaggcataaactccctcttagataccttggatatggatgccttcccctmgtgcctccagaggtgctttcccctcatgtctcaccacccctcagggaacctctaaaatggggtgcagggactggccggaattactgtaggagtagtaggcgcttctcctctggacatcccctgcagagaggtatggacccaggctctcaytcaaggaagaacagcagagccttcagcccctcaaaacatgtaggaggagatcagggcatccctgtgttgttagtgcagaggacaaactgtgtttagttttaggggaagtttgggatgtaccccaragtcctccaccatctcacctttatgtccctttccctagatatattgcaggatctccccttaggagaaagagttgctgttggggttatatatttttgctcaacatatttggaaactaaagtttctggaggaaaaaaaaggaaataagaaataattgatgcaaagtcccaaaggcagcaagaaagagtggagccaagaggacaagtaaaaatgtaaagagaagaaatactgtttttctttcctcaaaaaagagaaaaggtgaaaagatgagtacagatatatgtttggaagtgaaggagcatggctggaagagagctggttttctctgtgaagtaggaagaaaaatcacctgctgaaaataaggagaaaagaaaaaggaagataaagttttggaacagcacttctgggagataacaaacttcgctaactaagaattagtaaaacggttgttgagcagtactcagtgctgagttgaatattgaatagattttttttccatcctcactcagtggtccaggaggagaacaagcaggtgctcggattcatctagggttgaggattaatggggtaatgcggcagaaaaagaggaacaaaggacctgaaggcccttgtgacaatgaatgataacttctttttcaataaaagaaaaaaaggccgggggcggtgcctcatgcatgtaatcccagcactttgggaggcccaggtgggtggatcacctgaggtcaggagttcgagaccagtgtgaccaacgtggtgaaatcctgtctctactaaatacaaaaaattagccagatgtggtggcacatgcctgtaatcccagctacttgggaggctgaggcaggagaatcatttgaacccgggaggtggaggttgcagtgagccgagattgtgccactgcacgccagcctgggcaacaagagcaaaactccatctcaaaaagaaagaaaaagagaagaatggggaaaagttaaggttgtggaagcatctaagatatgtgtgttcaaagagatttctctgttcagtatttcagagctttaggtggtgattacattaattcatgggaatgaattgttggagtgaagtggaggggaagtctgctgcagtaaaggatgtctaggaattgcaaagctagttaacaaggtatatgatgagcaatggctacttttaaatcttggctctgtcccttaacaacaaatgaatttgaacaagttgcttaaccttctcagtgtctgttttcttatttttttttttaaaaggagaaaattataactaacggtaggagcaatgtaagaagacaacatatgtaggccgggcatggtggctcatgcttgttatccaagcactttgggaggctgaggcagatggatcacttgaggtcaggagtttgagaccagcctggccaacatggtgaaaccctggctctactaaaaatacaaaaattagctgggggtggtggcgggtgcctgtaatcccagctaccccagaggccgaggcaggagaattgattgaacctggaaggtggtggttgcagtgagccaagattgcctcactgtactccagcccaggtgacagagcaagactccatctcaaaaaaaaaaaaaaaaaaaaaaaagacaacataagtaaaatatctgccacagtgggctcaataagtagaagctgctactactggattggtcaactataaggatgtcatagacacctggaattatggcagaaaagagaatagaaaggagctgggcatggttacatgcaccagtaatcccagctgctcagggggctaaggcaggaggatcaccagagcccaggagtttgatgccagccttggcaacatagtgaggccctgtctcaaaaaaaaataaataatttttttaaaagaaaaaaggatataaaggaaaagattaagctgtgtgtttaagtcctcaacaaatctgagggtgtgacttgtaagttgctaaaggagagtatcgagatttgagaaaacccagatgatgttaagtccctggcagtgccttctgggaggtattctcttctctgtcctccatatgctcatcttaagtggatattgaaacttctgcttccaaccatgatgaaataactggaaccagactttccttcctgccttaaacaactagaaaactggacaaaatataggaaacaatgatttataaacattggacaacaggtagcataggcggtcatctctgagagaagggaaacaaagtcagctcttccaagtttcccagctctccacctaaaaacaggaaaaacaaatagaacacaggtgtttccctaaactgagaattcagagtttaggaagataaaagcagctagaatttgtggggcagtgccagaaagaagggaactattaaaaagagaattatggatatttgaagagattcctccctctatttccccccagctttattgaagtataactgacaagtaaaaactgtatgtatgtaaggtgtacattgtgatgttttgatatacatatatataatgtaaaatgattaccatgatcaagctaattaacatatcgattacctcacatggttaccattttcttgtgtgtgtggtaagaacatttaagatctactctcctagcaaatgtcaagtatacaatactgtattattaactatgggaaccatactatacaattagatctccagaatttattcatcctgcataactggaactttgttctttatgaccaacatctccccatttctctccctctcagctcctggaaacatcattctacttgcagagtccccttgatttgaaggctgagtactgatctgcagtattcagcaatgaggaaactacccagggccaggggaaaaaccaccagaaaggaggaggcaggaaaaatcccttgacctcatataggactgggaatagtttgggttcccagcagccagcgtggaaagatcttatagggcattgtgtagggtcctcagaaggctattgcctcaataatgggctcaaattagccctaggctagtggctgttctgggcctgccataacaaagcttaaaaggaagcctctcacgcctctgcgctccagcctgggcgacagaggggaactccgtctcaaaataaataaataaataaataaataaataaataaataaataaataaataaaagcctcggaagaatcaaaccaattccaaataacttatcttgtcccagaataaaactcttgaaatattcaaagtaatacaagaaagtctatcacctaataaagtaaaatccacaatgtccaggagccaataaaaaattatcaggcatgcaaagaagcaggaagagataactcatgatcaggaggaaaaccagtcaaaagaaacagacccagaaaacacacagatgatggaattattagacaaagatgttaaaacagttattacacatatacttcctatgcttaaaaagtaaagtataaacatgatgaataggaaaatggaagatatataaaagacccatatcgagatgggtctagagatgaaaaattcagtactggaaattaaaaataaactgaatgacatgaacaggtagatactacagaagaaaatatcagtggatttgaaggcacagcaatcattttttagaaactacgaatgaaacacagagaaaaagagactgagaaaaagtgaattagtgagctgtggggtaatatctagtgactgaacatgtatgtaattagagtctcaaaagatacagcaattgggaggtagaaagaaaaaatgctggaagaaataatgatcaaaaatttttccacattcggccaggcattgtggctgatgactataattccagcactttgtgaggccgaggcaagaagatcgcttgaacccaggagtttgttaccagcctgggtaacatagtgagaactcctgtctctaaaaataaaaacaaattaaaaaatttaaaataaattttccaaatttgattgaaactacaagcttactggcccaagaagttcaatgaacttcaagcaaaagaaatgttaaggaaatgacactgggccgggcacagtggctcacgcctgtaatcccagcactttgagaagccaaggcaggctgatcaccagaggtcaggggttcgagaccagcctggccaacatgttgaaaccccatctctaccaaaaagacaaaaattagtcaagtgtggtggcacgtgcttgtaatcccagatactactcgggagcctgagacaggagaatcgcttgaacctgggaggcggaggttgcagtgagccaaaactgtgccactgcactccagcttgggtgacagagtgagactacatctaaaaaaaaaaaaaaaaaaaaaagaacacatcctaatcaaaagacccaaaagctgtgcaaataaaaaattctaaaggaggtggtgaggaatatgccttcttcaaggattattcaacttttgcagcctgatttctgcaagtttgggagcacaagacttgctttattttaacaaaaactttttaggccaggcttcctgaggtttctccagcaatagttatgcttcaaaggcttacaagatggctgggcgccatggctcacgcctgtaatcccagcactttggaaggccgaggtgggtggatcacaaggtcaggagtttgagaccagcctggccaatatagtgaaaccccgtctccactaaaaatacaaaaagtagccgagcctgatggcaggcgcctgtaattccagctacttgggaggctgagacaggagaattgcttgaacccaggaggcggagattgcagtgagctgagactgtgccactgcactccagcctgggcaacagagtgaaattctgtctcaaaaaaaaaaagcttacaagacaggctgggtgcggtggctcacgcctataatcccagcactttgggaggctgaggtgggtggatcacctgaggtcaggagtttgagaccagcctggccaaaatggcaaaaccctgtctctactaaaaatacgaaaaaatagccgggtgtggtggcgggcacccgtagtcccagtcacttgggaggctgaggctggagaatggcttgaacctgggaggcggacgttgcagtgagctgagatagccccactgcactccagcttgggtgacagagcaagaatacatcttaaaaaaacaaaagcttacaagacatttaatctgtttgcttcttctattcagtaccatgtgccaatagccacagccaggattcttttctagacagagtccttaagcctattttatctcttttcttccctaccccaaaccctcttttctcaatttagtgtcagttgtcttgaaactatctgaaacaattgggcaagattgaaagaagatctttgtctgactgaaatgtctcaatgacagtcctctgagctacaagtcttgtctcggctattacggtattgaagcagttggcttttagaaatctttaagtcctcaagcttctggactctattcccttctttcacttgcaaaccagtagattctagtctgagctcatctcttttttgaacatacctagccaaaaacagccagcagcagccaactcacagttacattctggctcattccatctaccttccctagaagtaccagtaccataagagttgtgtctgcctgtcaagttatcacagcaacagttttaccaaatattttgccatggcataggaagaggctccgtctttcagtcagtgatatcagttcctaacctcctgctgtgcatctactaagccaatccctctgttttaggtgttggatttctaaattagggtatgttaagctagtttattaaacagatccaaaatgtaatagtttacacccaatataaatttttttgcaatttacctaacagtccagaggcatctaagtaaaatgttcaaaatctgtaggagcagggttggagaagaggtgactcagctccacatggtaactgaaggactcaggatgccatcttcaacacatggtttccaaggacactctcagcatgaacctcccagtcatccagagaagaaaacagcaagaagtcttcactggtaaggcatgaagtggttcacatcacttcttttcccatgcaagtggagagaacttagttgaatgaccacaatgaactgcaagggaaactaa

SEQ ID NO: 97598 - DNA, 13371 bp, Homo sapiens
atttcgacacacgcattcagtccataacagatgaggagccaacattgttgaatcataagtgatccatttttttttctttttatttctgattgatcaaggcttgcaaaagatttaactttcctgggttgggtagagtggctcatacctataatcccagcactttgggaggcttaggtaggaggatcacctgaggtcaggagtttgagaccagcctggtcaacataacaagaccccatctctacaaaaaaaaaaaattagccaagcatggtggtgcatgcctgtagtcccagctatgggaggctgaggcaggagaatcgcttgagcccaggagctcaaggttgcagtgagctgtgatcttgccattgcatcccaccttgggtgacagaccctgtctcaaaaaaaaaaaaaaaatttaaatttcccttttaagtttttcttagctagcataataagggatagtctgagcaactcagactgcctatttagaaagctctgggttttgcttcaatatggatggaaaaggggattgaaaaagttgacacagaagggcatgcagtctcagaaagggccattgcagcacctggcgatttttttttccaggatggagaaaagttttcttgtcaggctacttcctgataggttcctgcagctgctttgatctaacttcctcttttccccactggacaaaaccaaaacaaagcaaaacaagtccagaaacaaaagagaagtggggataggaccagccacgtgtgtacccttgggcggttggtacatgctcagggcatgagcccaaacttgctgtgacaagtatggtcccaggctgtgccttttagaacagtgtcctccaaagtactagtgaagtggtactgagatttccaaagactgtctttgcagtgcaggatttctgattctgacagaaaccaaggggagaactcactttttctatttaaaaaattatcagtaataaagcactcaggtcttcgaccactcttgcaaatactgttgtttttctctagctgagtctaggaaggaatacgagtttatagtgcagtgccagtaaggttggaattttctgtgataggggagtaattgagacaggtacaaatcgtaagatcttcccgaggactggatacaggagaaagaaatgcagccccagaaagggaggtgtgcagttgcaggcagatgggccaaggagatggtctgattgccaagtggattggagcccaagtcttcaggttttcaagtgggtaattagaacaggaaggagccaaacacaggcctgctggcgccaggagccgcaagattttccgttcaggttgtgtcgtctcagagctaagatgggtgcatgcgagtacttccccggccagttaacaaatgcgagcatccagtaccgtgcccatgactgtgggtgcagggagcagagtgtaggcagatgagcaaatggggtttccatgcctgaggaacaagaagtcttaggctaagtggtgagtacctgcaaaaatgagagaatagcacaagacggcatagctgagtaatacattgcatggttttgcttccaagtgccagcatctccgagtagtgtatctgacaccagcacactctggtgtcagaatcttgggtttatattctggctactcaaactgtgtggccctgggcaaattctttaatcttttttgggtttcaatttccatagctataaaatgagaatagttgtagtatctatctcgtgaatttattatgagaattaaattattttctctgtggattaaaaaaaaggacttttgcccctgattcttgtttttgaatacagtcttgatccccagaagtgtggcagctctcttgtacacatgatgaagagtgtgaaggggaaaagttgatatgcaaacaatggtggatgagggggtgaagctgttgggatccttgatgactgtggggtggccaaagctgacctcccaccttcagactttctgaaatcaaccactgatggctgggccttctgttacttgtaaccaaacgtatcttaattgatgcaggcttgttgccagactgtaaactcattgagggcagagccatgtcttattcacctttgggctgtcaaggacagcctaacctaatgcacggtggcacacagtaggtggtgcttagtggtttatgataggaagatgtgtggttagaaagcagggaaggaggcaaggaggcagggagaagtgatgtgctggtaaacagttaacaattagatctctggggaaaaattctgatttgtagcatttgccaatttccagggtgtaaatattcctatcatggctgatttcacgctaccagtgtgatgtgagtgagctcagtgttgggaagagatggtcacagtcagttcttgtgagttggtacaatccagccgtagctcaccactagaaggacagggaaaaagaaagggagagagaaaagggaagaaaatttattattaaaattaatagtaatcatggtaacgacactaacaatgtttaaactttattgagagcttactctgttccaggttcttccggtccctcctaatgatcttccctttgcatctcattgaccatagctgggttgcatgccctttcctagttgcaggagaggcaagaaaagtttggcaaaggaaagtggaagtgttatgtcttgcttgggccattcaggtgtcattccttagggcagggccccttgcctccctgaacgcaggcaggcaactgtcagccaaggaggaggactgtgggataagcaaccaagactatctgaaaagacaagacctttcaagtagaatggattatttttcagacaccaaagttgccttttcagcaaagtgaactaggctccttatcatcaaaattctaaaatttctcactgccttctttcatttctgtggataccactccaaatatcataaattgacctggtccttcatatagaatggttggttttctaaaccaaacagatcccaaccacggtgataaatgaggtggggagatgggaaatctatgcagcttgtcaaaatatgattgcggtaaagcgtccagaagtgaaaactggagcctcctgtgtgcagattcaccatgtttagtggggctgtgcagtcctgcatgggctggagtggggacagctgtggcagaaatgaggtggacagagtgaggtggtgggcatgtcaactgcaaagttccttcattacggatcgacatgctcctttacatatcctgctgggctagttgctcacagtggagagtctggagttattgcaattctgtggcaggcaaaatatatagaataaaagaaaatgccttaattgggaccattgttgggagaaagagggcaagaactgttctaagggatatttctgtagtcttagcatcctcttcttaatttttgcagattttatgtcctgttgtcagtttctttaaaaaacaaacaaacaaaagagattacaagtgatttatgggttccacctcctaagaggtccagtgtgggaaaacaaaggaagggaagaaatcgatgtaaggagattaataattctggtaggaggcaccacatgatgcacaggcctaaacttcctattgaagctggttggaaggccgaggcaggaggattgcttgagcccaggagtttgagactgctctgagcaacatagagagagccccgccactcaaaaaataacaaaaattagtcaggtgtggtggtgcgtgcctgtagtcccagctactcgggaggctgaggtgggagaatctcttgagcctgggaggtggaggctgcagtgagctgtgatctcactattgcattccagcctgggcgacagagtgagacctcatctccaaaaaaaagatgactaatttggaagacatggaccctgttttgaaacgatgactcacttcagctagaggagaagcctggtggcacccaggtgaaaagaggccactcattatttctcagctggctgtaaattgcaccgggagtcagaatcgatacctacctgacctctttgggctgttggtaaaactagaggcaccccttgtggctgtgccgagttgatgtccagaagaacactggttggaggcgaccgttctttttaggctttccagtctagagcttacgacccccagtgcaggagtagcttggttctttgttgtctgatagtgtttcctgggtcagctggcatttcccccatgtggtctgacctcctgtgttataaaggcaaaactactttaagttagagatcagcatctggatattcagtcatcagccaaatattttgatctttctctgagcagaatggaaaatgtcctgctttgaaaaccttgccttgttcctcgaaggcaggggttggcaaactttgtttttaaagagccaagcagtaaactttgggttttgcagaccatacagtctgtcacaacttttcagttgtgcagttgtagagtgaaagcatccataggcaataagtacacaaatgagtgtggctgtcacccaataacactgtttacaaaaacaagcagtgggaaggatttggcccacatgcctttgtttgccaaccatgattctaaggggtcttggatggaatggaaacctctgtcttgcccatatgggtcctaatgcattttaaaagtcagtgtgctgtttggctaagagacacttcctcacctgaaatcacagtgaagagcaaaaagggacagcgaactccttcttattccactggtgctcaaggggtaaaagaggaagaagatgtcgttgggccactttatgtaagtatatatactagggtggtgcaggctttgaacttctcactcagtgatgtccacgtcttttgtgttagccggctggctaaagtttaactttcccctaggacttcactaaatcctcacgtctgtaattttttttttcctctttctaatagcctggataaagaggaaaataaggtgagtgctgatggtccgtacttgagacacactacagcttatttcttagcacttttcaggctttgggctatttcaaaggcgacctactctgtcatgttgaagtgtgggttgggattcacttgcatatcctcccagactggggatggctctattaagaaaggaaagcagtttccaattttacaaatgtgacgatttccccagcagactttcgacaggaaaaattaataggcaactgcatgttgcctcaatctattttcacattaagacccagaaggaggtgtggggtcaagctgacacctcttagatcggcacaccagggtgagggcctccaaacgctgacagcatcattccaccaggtagtgtgcagggaagttggctggttttcaacgtatgtcccgtgactgcttgcttttgtaagcatgtgttggctatagatggttagaaaggtcagcttcaagtgacaaaagccctggctcaagttgctagaatcacccagtttcagtccctttgaggtcttgcaagaagaaatgagataatcgccctcctcctttccgacttgcgctgtgccagtgtaacttagaagggcatcctctctgtgaaaagactggatttacatattttgctaattacagctgtcagattcctcgaagtgatttaagggtggggaggcctaacaagtgtgaagagtatttttagccaagttgtgtgggtttgatagccatttggggactagtaattgaatctaaagcttcatgtgaggccgtacggaagtggtgcgaggtggaaggagaccgaggttgggcgacgtaggtgtggggcagctgtggggtgatttgatcctggtgcgggctggtggtctctttgcctgctgtgacagctgtcagtcagcctgctttatggggtgtgaaattgacaccttctctgctgtctgggtgctggaaggggtacagttggaactggaaacttgatctgcagagcattcatttgtttattcattcaacaagcattttttgagtaaattagagtttctgaaactttcttgtacatacaggatcaccaggctgtcttgttaacatgcggatcctgttagtagatctgggatgggttgagagtctgcctttctaacaggcttttgggtgatgtcgatgctgctggtccagggaccatacctctactcagaaggcctaacactgtatgccactttggtgtgacaagatgaaacactttgagcttcctcargatcttcctttcccatttgcccagatgttcttcctctggatcttttctgttttttgtattttttgttttttatttttctttgagacaggtcttactctgtcacccaggctgcagtgcagtggcatgatcacagctcactgtagccttgacctcctgggctcaagccatcctcccacctcagcctcctgagtagctgggactacaggcgcacaccaccacacctggctaatttttcatttttttgtagagatgaggtctcactatattgcccaggctggtctcaaactcctgggctcaagtgatcctyctaccttggcctaccacagtgctaggattacaggtgtgagccaccgcgcccagacttcctctagatctttactcggctgtcttcctttcattcctatctcagcaaaaacgtcaccacctagagaaactttgttttctcccatggcccaaatctaaagtagctcccaytgcctgttttagctcttagaagacagcctctgagatgatcttgttttgtatttctctctgtctctatgagaagaggagttctgcgagaacaaagcccttgcacttgtctgtctctgtccagtgctgtttcttcctcccacccttggccgagcctagcaggatgcctagcacatagtaggtactcaaattgtgttgagaagaaggtcgcaattcctatctccaagggtcccactgactagaatgagagatggaaaagtcagtaactagttataactgtggtgttgaaaagcagtgtgagaaggagtagaccccaggctgtctgggttctaatccatgtaactctaaaatcgcttgtgcctcagttttctcattaaaatgaggtgaagtaacagtacctttcttatacatctgttgtgaggattaaatctaataaatgtaaagcctgagcaaagtacctggtatagagtggaccatcaggaaatgttagttgtgatgaagaggatgatgaagatgatgaaatggtggtggtggggatggttatggtgatagttgcagggggagagcctaacttttcagggagggcttcacatacgaagtgcactttgagctgaatttccaaaggcaagtagtaatgccttagggcagtgtcttagttaccattgctgttttattagtctgatcttacactgctataaagaactacctgagactgggtaatttatgaaacaaagaggtttaattgacctacagttccacaagctgtataggaagcatggctgggaggcctcagggaacttacaatcatggcagaaggcgaaggggaagcaagcaaatcttcacatggtgtcagcgagagagagagagagagagagagtgagaactaggagggaagtgccacacccttaaaccatcagatcttgagagaactcactatcatgagaacagcatggggggaaatctgcccccatgatccaatcaccttccaatgttaggttcgtcccccagcattgcgaattacaattcagcatgagatttggatgggacacagagccaaaccatatcagctgcataacaaattgtcacaaatctggcagcttaaaacaacacacgtttattatatcacagtttttttgggtcaggaacatgagcacaacttagatgggccctttgccttagggtctctctctggcctcagtgaaggtatcagccagggctggggtctcatcagaaggcttgactggggaaggatccacttccaagctcacatgattgctggcaggatttgattcttgccatgttggtgtctctggtcagctcacaacaaggcagcttacttcatcaaagccatcgagagagtgatggcacaagggacgttataatcttatataatgtaatcatggaagcaatatgtcctcacctttgctgtattctattatttagaagcaagttaggctagcttatgctcaagggggaaggggcattacacaggctgtgaataccaggatttgggggttactggggttgtcttagaatctttccaccatagataacaagaggggaccgagggtttgacaggaggggcaatccaggcagagggaacagcatgtgcaagggccaagagacagggggcaccatgtcctagtgaggaaatgcccatcttgatgggcctggctgaccagtgactggcaaagtgtttgaaatgagggtaagacagggagcaaggatgcatgggctctggtgctggtattactgctcctggtgatgattcagggtatgttccttgctctgggcttccatttccccagctgcgtaaagcaagaggcatgtcctggatcaggcattttcaccctgggtaccagggaagctggggccccacagagaaatctcagggactgctggggaggatggaggaggagtgagcatcccctgcctctttgccagagcagctctgcttcgatctgtgcaatactgagatttctgtatatgattttctttctttcaacagaggcttccatgacttaaaaacaggtgaaaatgccagcactagctgccctcagagagccatcttatgctgaccgcatgtggttctcttatggttcctatgggcttgagccaggaccaaaacctaagaccctgagccagccaaccagtgatattgctttccccatccagaatgaggaaaaagggggacttgaggctgtaccggggttggtggggaggtatgttactgagttactggaaaatccagtttccgagcttgtgatctcaactatttcattcattcactcactcagttgttcatttgttcttttactcactcaatgctgtgttggcaaatggcagtcagtgttaacgtggggctttattaagtccacctccaaaatgttttgtcaatgccaagcttgtgaaataagaaactctgattctagccacatcagggaggcaggtagcagtcgaggttgtgcacaccttgtggcttgctctctagagaaagggcaccatgtcagaggccatgtctctattctctggtggaacccatggaaaagagtatctgtaggaatggtgggcagaatggggagtggagatgagtagggtaaggaagagttgacccatagaaggggaaatatatttttgtaatagggtttttactttttagatttgtgggttaaatttctgtaatctggagtgacctgagaagatacttcattcgtcttctagacaggaggcacacacctttccttttgcctctttccccatcatttcctgtcttctctgcatatttttaattttatagaagacactgttctgtgtaggactcagagaaacagctggttctctctggtttgggaactaattgccactccctagctgtgggatcttggacaagtggcccaaccaccctgaactcaggggtccaggatgggggttgggccccacaatttctaagctcctcatggccatgcctgggaggctgggttctgccagactgctgtgtccggaagcattaaaattcattgtcttccctggagccaactctaggctccattaaacagcttgtccctgaggcagctggagctggcaaggggcctgttcttaaaagcaacaggttgtgtgttggcagccgcacaaaggcagccctgggggcgtccagcccctgctgctctccgggcagggagtccaggtggatgagaaaggaaggtgtctgtcctccgggaaggaagggagagggattaccatcaggtggtgggaggggcagctctcctgaatcagaccctggaacacttgaccgaggcagctccacattttggggtctcagtggtacaggtgtggagcacatgcagggatgagctttggagggaccagaaagacccccctccgctggaaagacaaggcacaggaatagcagcagctgatgcttgtttatttttttattctgtataagttagttacatgtattatctctaacatctaagatggtgtggggccctgtgggaccccattttacagaggagaaactgaggctctgagacctcaggagacttattctaggtggttcagctggctccaaagccccccttttcccagctaagagattatatgagggctacaggaagaggatccctgtgatcctggagtttggcagggtgggtatattaggttcccagggctgccatacaaattctcattatcataaagtgggttgcttgaaacagacatttatcctctcatggttctggaggctcgaagtctgagatgaaggcttggttccttctggaggctctgaagaagaatctttcccatgtctctctcctggcttctgtggtcgttggcaatccttggtgttccctggcccgtagacacgtctctccaggctctgcctctatcctcacctgacattctgccctgtgtgttctgtcttcacactgtcttccttccatgtgtgtctctgtattcagatttccctcttcttgggctgggtgcggtggctcacgcctgtaatcccagcactttgggaggccaaggtgggcggatcacctgaggtcaggagttcgagaccagcctggccaacatggtgaaaccctgtctctaccaaaaatacaaaaattagccaggtgtggtgtcatgcacctgtagtcccagctactcaggaggctgaagcaggagaatcgcttgaacccaggaggtggaggctacagtgagctaagattgcaccattgcgctccagcctgggcaacagagcaagactctgtctcaaaaaaaaaaaaaaaaaaagatttccctcttcttgtaaggacaccagtcattggatattggattagggctcacactactccagtatgaccttatcttaacttgatgacatttgcagagaccctgtttccaaataaggtcacattcataggtactggttggttaggacctggacatttctttttcggggacaaaattcaacccacaacagtggggatgtctgtaaggcgggaatgtgcaggggcggagttgggctgaagggaagtgaactcacttctgcctctttctggttctctgggctgtgcacctgggaacagggctccttcaccgctcatcaccagctgggaacctggttgctggagaggccaggtcatgaggggcttataggccttggtaaaggctttggacctgatcctggactaggcagagccattgaaggagctgaagtggaggtgtgtatggtcagagtgcatggtgagcattgggagggggatgcaccgggcggggacaggagaaggggggcaccggcctgggtctcagataatgacggcccaggggagaggagcagggcctgaagcccagaggggagaggagggcggctggacaggaatccaggtggtcaggtgggcaggccttgctctcaaagggagagggcgggagaggagggaacatttgttgagtgaattgaaggagtctgtagcgaaggagggtggattgtccctaggaggagcaagagcatggtgggagggaaggaagtgggaagagaggcgaggaaaccagctcactccatctcactgaccgcggattcttctcccagggaaatgtgggaacgaaattaatcctgaagcttccccaggtttctgtgattctcaaccagtgtgggctggagcaatcagagaagccttcgtgggggtgtaggtctgacttgggggaaggaagtatagaggcaggaaagcaggggatgcatttcaggggtggggacaacctgtacagaggcccagggctgaagctgagtgcagttccacccagggccagagaggaccagctctgctgtgcggagaggaccttttccagccgcagcagcagcttctgtcctccagccgtggagatgtgcagttactccccctcatcaatatttcagccttgactttcacaaagcaccccctctgcctctttgcctcccccagcagcctgggtgaataaagggaagagctgacgctgtccctgctggtgggcatgccagggccagagcgggacctgtcgaagccttcgcacctgtctgtgacttgaggtagatgagacttcttgaaaccgagcccctagccctctgcctggctgtctcctaggccccttctctgtacctgtctttatgatttgttttaaggaaaagctggggagggagctcgaagtctccttattctctgaatgatgttcatctgaattgtaccaattcctgcaaattggaggcccccatttctgtaccctctccgcccctcccctcccaaagtgtacagaattaattctgttgactattgtcattctctctgttcagcagaaattcccccccccgcccccccgagacaggttctcactcttgtcccccaggctgcagtgcagtggcgcgatcttgggccactgcaacctccacctcctgggttcaagcaattctcctgccttagcctcccaagtaactgggacttcaggtgtgtgccaccacgcccagctaattttgtattttttggtagagacagggtttcaacatgttgccaaggctggtcttgaactcctgacctcaagtgatctgcccacgttggcctcccaaggtgctgggattacaggcttgagtcaccgcacctggcctagaaatttttaattctaagtcctcgggcaccaggagcatctctaatagagacttttcaaaaatgattttaggtttctatgtgggtgactgcttcctaagcaggtgagtaacaaacccatcttaatagcacagctgcattctccattggaggtgggtgcaatctgcttctggacggtaggcttctgaggcaggagtgtgtcttacaaggttgtgttcccaccgagagggaggagctgtggttccccagtatcaatcagtggggtgggaacagggacggtgttgtcttttctgtgcttccagaacaccatgggactctcctagcacttctgggcttggctacctctctaggtatcgcctctctaagctgtaaactcaaggacagggatagtattttgtttttgtttttcagttgctgtatccccagagcctagcacagtacttggcatgtagtaaatgttcaacaaattaattcatccattcacttctcaagtacttactgagcacctactatgtgccagccttcattccaggactaaggagatggcattaaagtaaacaaagtccctcccttcatggagcctccattctggtggggaagacagactgtcaaca

SEQ ID NO: 97599 - DNA, 12965 bp, Homo sapiens
tagtatattttaaatggtgtatgttttcttttatgatgaaatgttatggatggcccacatcttttatgaggtgaaaccattttgtaaaaatattagcgaaagaaagtaaaattgatttaaaaaaacagtaaagaagaaaaagtttttaaaaagaatgatagttgctttaaactttaaaacaacagcaattaaaagagacagagggacattatataatgataaaaggtcttgtccaacaggaaaatatcacagtcctaaacatatatgcacctaacactggagctcccaaatttataaaacaattactgatagacctaagaaatcagatagacagcaacacaacaataatggaggacttcagtactccactgtcagcactagacaggtcaacaagacagaaagtcaacaaagaaacaatggatttaaactataccctggaacaaatggacttaacagatatatgcagaacattccatccaataaccgcagaatacacattctattcaagagtgcatggaactttctccaagatagaccatatgataagccataaaacaagccttaataaatttaagaatattgaaattctgtcaagccctctctcagaccacagtggaataaaactggaaagcaactccaaaaggagccttcaaaaccatgcaaatacatagaaattaaataacctgttcctgaatgagcattgagtcaaaaacgaaatcaagatgaaaatttaaaaattctttgaattgaacagcagtagtgacacaacctatcaaaacctctgggatacagcaaaggcagtgctaagaggaaagttcacagccctaaatgcctacgtcagaaagaccgaaagagcactaactgacattctaagatcacacctcaaagaactagagaaacaagaacaaaccatactcaaacctagcagaagaaaggaaataaccaagatcagagcagaactaaatgaaattgaaacaaaaaaaatacaaaagatgaatgaaacaaaaagctggttctttgaaaagataaaattgatagaccattagcaagattaaccaagaaaagaaagaaaattcaattaacctcattaagaaacaaaacaggagatattacagctgacaccactgaaatacaaaagatcattcaaggctactgtgaacacctttacacacataaactagaaaacctagaagagatggataaattcatggaaaaatacagccctcctagcttaaatcagggagaaatagataccctgaacagaccaatagagaagcagcgaaattgaaatggtaatttaacaattaccaacaaaaaaaagcccaggaacagacggattcacagcagaattctatcagacattctaagaagaattggtaccaatccttttgacactattccgcaagacagagaaagaagtaaccctccctaattcattctatgaagccagcatcgccctaataccaaaaccaggaaaggacatacccaaaaaagaaaactacagactgatattcttgatgaaccagatgccaaaatcctttacaaaatactagctaaccgaatccaacaacatatcaaaaagataatccatcataatcaagtgggtttcatacaagggatgcagggatggtttaacatatgcaagtcaataaatgtgatatcccacataaacagaactaaaaatcacatgatcatctcaatagattcagaaaaagcatttggcaaaatccagcatccgttttatgattaaaactctcagcaaaatcggcatacaagggacatacctcaatgtaataaaaccaactgtgacaaacccacagcaaacataatagtgaatggggaacagttgaaagcattccctctgagaactggaacaagacaaggatgcccactctcaccactcctcttcaactagcactggaagtcctagccagagcaatcaggcaaaagaaagaaagggcatccaaattagtaaagaggaagtcaaactgtcagtgtttgctgatgatatgatcatttaccttgaaaaccctcaagactcctctagagagctcctagaactgataaaataattcagcaaagtttccagatacaaaattaatgtacacaaatcaatagctcttctatacaacaacagcaaccaagtggagaatcaaatcaagaactcagccgcttttacaataactgcaaaaaataaaaataaaacacttaggaatatacctaaccaaggaggcaaaagacctttacaaggaagactacaaaacatgctgagagaagtcatagatgacacaaacagatggaaacatcccatgctcatgaatgggtagaatgaatattgtgaaaatgaccatactgccaaaagcaatctacaaattcaatgcatttcctgtcaaaataccaccatcattcttcaccgaactagaaaaaacatcctaaaattcatatggaacaaaaaaagagcctacatagccaaggcaagactaagcaaaaagaacaaatctggaggcatcacacttcctgatttcagactatacctcaggccatagtcaccaaaacagcatgatacttgtataaaaataggcacacagaccaatggaacagaacagagaacccagaaataaagccaaatagttacagccaactgatcttcgacaaagcaaacaaacaaagtggggtaaagacacccttttcaacaaacggtgctgtgataattggctagccacatgtagaagaatgaaactggatcctcatctttcatcttacacgaaaatcaacataagatggattaaggactttcagacctgaaactataaaaattctagaagataacattggaaaaacccttctagacattggcttaggcaaggatttcatgaccaagaacccaaaagcaaatgcaacaaaaacaaagataaatagctgggacttaattaaaccaaagagcttttgcatggcaaaaggaagagtcagcagagtgaacagacaacccacagagtgggagaagaagatgtaaaagtggtccacaaacatgagaaaatgctcaacatcactaatgatcagggaaatgtaaatcaaaaccacattgcgacaccaccttacacctgcaagaatggccataatcaaaaaatcaaaaaacactatatgtgggcgtggatgcagtgatcagggaacacttctgcactgctagtgggaacgtaaacttacacaaccactatggaaaacagtgtggagattccttaaatcactaaaagtagaactaccatttgatccagcaatcccactagtgggtatctacccacaggaaaataagtcattatacaaaaacgattcgtgcacatgcatgtttatagcagcacagttcaccattgcaacccaaatgcgtggaaccaacccaaatgcccattaatcaatgagtggataaagaaactgtggtatatttatacgatggactactactcagctataaaaaggaaccaattaacagcatttgcagtgacctggatgagattggaaactattattctaggtgaagtaaatcaggaatggaaaaaccaagcatcgtatgttctcactgatatgtgggagctaagctatgaggacacaaaggtgtgagaatgatacagtggactttggggagtttgggggaagagtgggagggtggcgagggataaaacactacaaatatgaggcagtatgtactgcttaggttatgggtgcaccaaaatctctcaaatcactgctaaagaacttacttatgtaaccaaataccacctgtaccccagtaacttatggaaaaaaatgaatgacagcagagtcctcatcagaaccaatattcctcctgaacatagatagaactaaacaagattttgacaaatcaactctaacaacaaattacatagataatatgttatgactaaatgggtttatcccaggtgtggagggttgatttaatgtttgaaaatcaatgaactaaaatagaccacctcagtagacagaaaaattatttggcaaaatccaacacccatttctgataaaaactctcagcaaactgggaatagaaggaaacttcttaccctgataagggcatatatgaaaaacctacagctaacatcatattgaaaaactgaatgtgttgctcttaagattaggaacaagacaaaggtgtctgctctcttcaccacacctggccggatttttttttaaactgttttatttcagtaggtctagttgttcatcttactggatttcttatacactattctgaaacctcttgtctttgtgtttagatcatttgggtgtctgaggtttatttctttgatgtttttcatcaaagctgctcaaaatacgttattggttttctgtgccattaaaagtgagctcacttcatgttcttgttgaattctaactgaagctcatttctcccctttttattttcagatatttgtatctgctgttctccggtgatgaccttttacctttagaccactgggtgtttaatacagaggctcaccctctgcctgtgttacatttagccaacaccacactttcaggtaatcctgctgttcgatgaaagcagttccagaaggaccattctcacctgtgttttgtttacatggaccactacagaaattagtttgaaggggcggcttttgaaaacctggacctctatgtcaacatgacagggtgaaactattccccctaagactgttcaacttgtagatacatcaactttgaaattattccattttatacctgaccaaaacatgttctgatatgtgtaggacagagacctggatgtgctttgatcgttaatgaggtggtcacatgagaagtgatacctgttactactgtattgtttttagagtcctgaagtctggaggctagacttcctgaaagcaagtcaagaatatagagcaccttgcaggagttcaagatggcctttggaaccaattatgtatttgtttcctcctacagtggagcagcattcaaatcaaatatttacatattgcttatcactttttctccattttaataatggaatgaactaaaataaacaagaacaaaagaatagtataattatatcagtaacaagaagactcaaaaaagaaacaggagtacctatccctatctgaattttcaagttccccattggatgaccagactggcaaccatttcaaatcccagtctatttcattgaaatttcttggttaagtttaattttctctgggggcatgatctcacaaagaatactcaagtctttttcttcttatggaatcatcgaaactgctatttatcataatcaccacttatgagcctgggtttgggattttgtgcatgtagttcagtctagtgttggtagcatgacagaaagtggggaaaatgccgcagtttgttgccttgaaacctaagagcaatccttggttttgttgctacattatttttccagaccaacacatctaccaagtaaattttattcactttaatttcataataaagttagtagagtcactcaacttacaactttatttatgtggcttggcaaaaatcactataaggcagctctaaatttgccttgataagctaaataaattacttttataacttactaaagcagaacaaacagtgaaactttctaaaatattctatctggaatagggacaggggatcttttatttataatctcatcagatgagtgagttgttcacagatattttatgtttttttaattttctccaagaatatttatagaattccaaagaatcagaatagtttcaaaataattttcagtgataaaagagtgttgtaattaatcatattacactaaaattgggatacatctaaggaactttatcttactatcagtaggttttgcattgatatttctttttaaataaactactagttctttatattttgacaaaaagaacttaaattttatcaggaactgtaagataaatatctagtgcttataaattttctgtccttaaatttatgtgacagtgcaagatacttttgctcttttcatttaatataggcatcttccattgacattaataaaacttagaaacagtataattagtataacatttactctgaatttgaagatttcctgaaacaaagtttgtacaagaagcccaccttggaattctgaaggcttattttcttgtttgataagcttttcttttaaacttaggttttaagttggggaaagacttaattaactaatatagtattttctaaggttgatcatcttataccacgaatcgttaattttgacagttctactgatccgtaaawgataaccactgcaaattttttcagtataaaatttttcactgcaaaaaaatttcagtagaaaataaggatgcagggccagttacaatagtccttaagagagttaaattatagcacatgttttgacattgtaatatcttttactacttgaacatttaaatttctaaatgagaaaggtatatatattactgtaactgtagaagggaaaagggaaagtatttggttctaaaaaatgttagccttcctcgtaaaagtagcacaagcccacttatgaatcactgagaaaaagtgaaaaacttgagttggcaaagatgcagagcagcagtgcagatggcaatgaactctctgaattctcttttaccttatttagaagaatgcagagtaaagggaccttcttggttctgcaggaacttctcaagggatgaggagacagaacccctacttccaagtgctctatttgtattacccagatgactgaagcttaagagaaggcagggaagtatacaagcagagccagttctggtacaaacaaagaatttgacagggacaatggaagggtcttcttcaccactccttaccttctatgtgatggaaagactagagcttataaaagtacttccatttttttattctcctgaataccaaaggcaattaaagtcagctacaaatgacttgccagtgtcatgttttatttttgttatagatttttaaattatttccttcaagatcaattcttatcccatataatgcttagcttccaagaatattctttactttcttctgtcttttacagctctttgcattttgtagaccttaatactcaggttaaatattcattgcatttataagatcttctgcaaaaagcccagaaatggtccttttcaggtgcctcttcaaagagctgacaccttaccttgtgcctttggcacaaatgtgcagaatagatacatcagttggtgcataatcgaaaaaaataggaattttgaacactgttcttccttctacatttatttctcttcattttagaatcacactttttatgttaaaccagattattattattattattattcaaccagtattaagttgttaaaaccaagggaatggggccctaaccaaaaagaagtctcaactcagaaaaataagtccccagtcaggtggttcttactttcttgtgggttgcacattttgtatctctctaacatcagcgtattcctgactttaagcaggtgtttatatgtaaaataaaacctgggtatcgaagggaaatgcattctttttatggagtattgaccctgatcctctatgatgtcatatagagcaactcagggctatacttgctagattttaaccaagcagtttgaaatattaatcatcatcctctcatcttctccagtctccattgccaaagtctttgtcaaaactccaaatttgttgataaaagattgtgtttgccattctcatttataatgcagtttctccttaagcctggagttttttgaatgagtgcatgagtaaatgagagaatgtgtgaacgaacatttatgaagtatctaacatgtgccaagcattgtgcctggcactttcaatcattagaatgttttatgtgattccacagcattttctgtataagagtagctcacaacattttaaatgtttccaatatgaatcgtgttacaaaattcttaattttatatttcatataaattaaagaggaaaaagaaaaggtttataatatattttaaaacaatgtgttactatataatacaactataattgtagttaataactaaaacctcttgaaaatgtcaaagaaatacttgatttctgatgcaactttgactaaaatatttactttagaaataaaaacgttcttattttgctatatcactttaattgcataattaaaaagcagtgttttatagaaatgctggttattttatattcaaaaagattttgtcacataattcatgggtaaaacttgcagttgtaaattgtgtctgctctggtatgggccctattaatagtcccatgctgttaaatataaagaaaaatatactaaaatattcaaagttccaaataacagttcctagtaatagtattttgagttatttttctttaggtttccttatactcaaattggctaggtcctatcttttcctctctctctctctctctctctctctctctctctctctctctctctctatatatatatatatatatatatatatatatatatatatatatatatatatgagagatatatgagatatatgagagatcaagatctatatatgtatataaatacaattatacacagataatttttaatactctttgttaacaaacacagttgaaaactggtttcggctgcacaaataagcagaatatttgagtaactatatatgatatggagatactttaatccatttatcctggctcaagaacactgataaagatgattttctgttactttagctcattcagatcaggatggacatgctctttttgatctataactgttcagccagcttccagataatattttaggctatgagagctatacagtctctcttattactcatttctgctgttgaagtatcgaaaacagatagagatactatgtaaagaatgggcgtagctatgttccaggaaaactttatttacaaaagcagatggagggctggatttggtccatgggtcatagttagtgaccctgatcccaagtttattttgtgttagaccctctaacctttgatctgcgtcttttctgttttgatttacataattcatttttaaatcaaaaagatgtgcgtatatatggttgtgtgtatctgtataacctaaagctataatattttgttgtcttgaaagcagatacactcttcctggagtctgttcaggtttcaggacgattgactataatgaaagagacagaatagggtaagggaagatgggtatgctatcagccattttctttgccttgtcatttaatgccataatttcagattctctatgtaaaaagaaggtctgtgtattgtcaaaataatatactctccaagttctcctgctcattgacccttgaaccaggattctggattgctagagctgcagaaattcacccacttgggtactcttagagctctacagcaagaatatgatagaatgtctgatctttgtgctgcagaaagcaaacttttgaagaattctaagcaacagaaaatgggttatgtgactcatctgctatttggcagccactattccttttttagactgcagaacggtactgcccctgttacctctagaatagcctgagtctgaggagtgcagagaaaagatatatccaaaaggagaatccctttctcttgcataactctcaatcctttacaagtaagtagcattatttcagaatgtctatatgcatcattttcaactaaagcatacctcatccttaaacttccactatttaacagctaatccatttcaaacttggtttgagcctagcaattgcagaactcataaaattgcttgtgaaattacacaccatattactagcatatacattgcagtgctccaatcatgctaacagataatagatttttctttaagaattttatcaaatatttcactatttggggaaattttagaggaggggaagcctgtattcaggatgatagagggagcagagacttactgtctctcttccacattataaatgaactgcctttccaggtccaacatgctgtcaggttgcttcagctcggtgtgaatgtaagtgtggggatcaaacacacacacctatacacatacatattaatatgcagaggattttaaataattgcaaatgtcttgtggctgttttatttctacaaaattctgtaagatgtataccagaaaacataataaagataagctcagttcttcattgggaaaaaatatttttaaagaaaatttagaagtttttgctgaattaaagtatcttcaattttaattactggatttggaagttgaaatgccatccttcaatatcactggtctcaaattcattgatagaattttttcttaaactaataagtggggtaagtataatctcctaaattggtacccactggctgctcctaaactggtttccagtcatgtcctccagtatgtgatttttataaattaaaggtaatattgtatattaaagttcaaataaagatgttctttaagtgaaaattctttgtttagccttcatttttacccgctgatgacagttcagtttcttcctatgtacagaagagcaacgttggcttttacagtaactggtggtcttcagtctctcattcagagagtatttcttttggatcagctaatctttacattcttgatgttatagaaagatgaagagcttgcttagagagtcgtattttattccaactgattttgagaaaacaaaccatagacttatgtgacaaccttatagtattactgtgatgttatctctaagacctagtccagttcagcctctgagatcattaagcttaaagactgcctcagtcactggacctcattctgtcacactaaaatctgacctgacccttcttaagtgatttttgggcaaatataggcccaaaagccttcagcaatagtatcagctggactatagatagtggtttagtctgtcaatactgtaaaagtaaaggatatttaaaaccccttacccggggagcatcaaataaggtagtggtaaaaaccttctgaaataacagctagtttacatccttgatttcttaattcttcctggcacagtggatttcaacttgatcaaaattttagacttaagaaattacattgtggatgtatcaaaattaattgcagacatattttctggaacaactaaaacaggaccagaaaaaattaaaaaaataaggagctctaagtgactataatttgataaaatctgggcttctctttgtttgccagataactgaaatatccatctttatttcattggattgcaaaggaactgtcattatgcaaataatgctcagaatggttcagatagtgagtgagcctgcacccttacttcttggttgacctaacaagtttcttttatttttattgtaaaatatatctaacataaaatttgctattttaaccatttaaatgtacaatttgatgtcattaataattacatcagcaatgttgtgcaacatattgccactacctatttctagatttttcaccattccaaacagaaactctgtaaccattaagcaataactccccagtgctccctttcctcccccaacttctggtgtattagtcggttctcacactgctaataaagacatactcgagaatgggtaatttataaagaaaaagaagtttaatggactcacagttccacatggatgggaaggcctcacatggtagaaggcgaaggagcaaaggcatgtcttacatggcagcaggcaagagagcttgtgtaggggaactgccctttataaaaccatcagatttcatgagacttattcactatcacaagaacagcaggggaaaaagcccacccccatgattcaattacctcccaccaagtccctcccacagcatgtggggattatgggagctacagttcaagatgagattcaggtggggacacagcaaaccatattacctggtaaccttgaatctactttctaagacaaatttcttaaccctactaaatctcaattttcttgcctctaaaagaaggataatacaggatttctaggataattaaatgagaaaaatccaggcacctagcccaaatttagcttaaagctttagttgtttttacgtatttttgttagcagattgcagtaatcatttctaaaggaacagaaaaaaaataataagggcaattaaaacagggcagtgaagagccaatgaaacatctaattataccttctcattttaggcacaaggaaagtgaaacccaaaagggagggtaaaatgaaggcaagtcttccagtgttatccttcatggttctatgaaataagacgtgtatttttgttgtggttataaaaaaaagtttaatatgcaaatacatcaataatgcatgtgaaccaagcactttaaaaactatagcagaagtcactttttgttggatacacagcaaaaatatatacaaaaagttaatagcagttatctttatatcataaggacataacaatttcttgcaatttccttaacttttaaaagaaacttttactgaggtatgatttacataaaatattcccactcttaagtgtatgatttaatgattttttagtaagtttataaaactgtacaaccatcccacaatacacaaagatcccatgtattgatttgcagtcaatctccatttccatcccagccactggtaaccactggtctactttctgtctctgtagatctgccttttaactggacattttatattatgaaatcatacagtatgtggtcttttgcatctggcttctttaacctagcataatgttttgcatttaaggtttgtcaatgctatagcaactgtcaagagttattcctttttactgctaaatgaatttcattgtatggatataccatatttatccattcactaattgatagacatttgaattgtttccagtttttggttattatgaatgatgctgttaagaat

SEQ ID NO: 97600 - DNA, 17343 bp, Homo sapiens
aaaagaatgcaatacaggtgttaacagtagactgataagtcaatgaaacaaaacagagaataattagatacaagtgtatgtgagaacgcaatgtattacgaaaggaacctgtcaaatcagtgggggaaagttggatcatttgggacaaccgaccagttatttgagttaggggaattgggtctctgcctcgtttattattttaaaattaagcctaaaaggatcaaatatttaaatataaaaaacgaaagcacagaagtactgaaagaaaacatgatcaaatgtgtttataaacttgagggaaaaggcttttattagcgtcacaccaagacagaaactataaaagactgacagatttgacgtaaaattaagatacacacacatacacacacaaatacaaagatacatgtatatttctgtgtatataaagagcagggcgaggctgagtatggtggctcatgcctataatcccaacactttgggaggctgaggtgggtagatcacttgagatcaggagttcgagaccagcccagccaacacagtgaaaccccgttctctactaaaaatacaaaaattagccaggcgtggtggcaggtgcctgtaatcccagctactcgggaggttgaggtatgagaatcgcttgaacccaggaggcagaggttgcagtgagctgagattgcacactgcactctagcctgggtgacagagcgagattccacctcaaaacaacaacaacaacaacaacaacaacagacgagtggggggagtatgcgtgtgaaaaatgagtgataaattgggaaaaatatttgtaaaataaatgccaaagtcatttgtttcacagtgatctcttataaattaatgcgaaaggcaaagatgatttacaaaagaacaaagagccaataaacaaaggggaaaaaaagttcaacctgacaaatagtggaagaagtatgaattaaaacccctttatatattttcggcttattatagtaacaaagcttgcctgagtgcatgagctgacgctgcctggtgtggtagaggacatggggaaacacatattccccttcattgtcttgatataaaaaattggtagggtctttttgtaggacagcttgataatatttattaaatctttaaaaagtacatattctttgttttcttttctttttttctatttttcccacagtctctataacctaagggaagtacatattctttgatctaagaattccactgctgcaacaaataagggattagagaaataaatgatcatacatcctcccaatagaatacgtacaagtattaaaaagaatgagagatatttacatgaaaaatctgaaagaatatatgccaggctattaatagtagctatatatcaggcaagagagcaagggatggcactgaggggaataagattatactggtcttcagattttttccatatttaaaaaaagtaacacacacataacttggtaaccagaataaatttcttttgcatagggaaagaattaggaccttccaaatgaaaacaagtagagttatagttttaaaggaaagtgcagcccaaggtaatacagaggaaaggcagtaaatgcgcatggggaatgggtgggcaggaggtgctggggggctgtcaggggctcatcaaggggcctttaccttggataattcatcagggcccaaggtcgagggtctgggcctctgccttgaatctctgcttcagggtcaaaaccctggccagcaagagatgagggtgtggaaggcacctctctttggaggctatggtcatgaacactggccaatttccagctcttaacgtgtccctttcttgcctttggcctcaccatcctcctctgtcctaatgatcttccttccactttggaaatcacaattgcattctaatcctgcttccttgggattgttaccagagtaccaaaattggagcggtgggtgttcttacatgctttagtcacagatttgccgattatctcgtggttactcccacaggtgactgatcacatccatcaggcatgacttgattatatgagagtgtaacatcattccaacagtaacagaggcataactggtgtgcattatgctaggcgaattctaaatgctgtgtttcatctcactcctgggctaaatgaccctgtgtgacccagtgatgtacctgctctcccaactctgacccggcagtgcccttgcctgtgggtgtggagtgaggatgtggagactaaacagcattggtgttcgctccttcttcttaagcttctcccagtctaaaataaaacaatttctccctctaaccattttgaaagtatagactacaggctgtgcgcattactgagaggaggaggcttcctcccttctgggtcttgcatttggatgggcagagagtgagacaggagagaggccaagggcttgttccaatgaaaattactgacagagttgacattctcaggtacagactcacctggatggaacttctccagaggtaagtgggacaaatggaatggaagggagaagaaagagatgggggaggccagagggaaaaggagagggcatgtaaggaaaggcctggccgtcgagttggctaagtgagtgagagaacatgggtcctggcagtggagcacccacctgagtccgacgttgttgatatcatcccacatggaggcaggggtttcccagaatgccttattcctggtgttcaggatcgtctggaaggcacagggagggtgatgaatgatctgaaggtagggaggtgtgaggggctgggtaatggaagggacaatgagtggggatgaagatgcaggggtctgagggggaggtcagaaatgtggagttgggaacaaagttcaaagggtacctggacccctgcataagcattgttgaccagcacatctagacgcccttgctgttcccgatccacttgctcaaacaggcttcgcacttcactctcctggcttgaatcgcacaccacaggcacacattggcccccgagggattgtgcctggagtaggacaggggatatgagctcacattcacacatgggtgtgagtcatgacaaaactccccaaccaaagtgggcttgagaactgagaagacaatcaatcctaggagagcctgctgcagaggcaacatggcaggcaacgctgccctctggtgtctgtttgagtagtttcaggaatgataggcctccccaccacagagcaaggtgaattgcaatgtaagttttaataatctacaaacatttactgaggcccaccatgtgcacagcattgtactttgcaagtagagggtaagaacaagtgaggcatggagtctgctcttgagaaatgagtaagcatccttttccttgttgtggtcatttccatctctcatgcccttagctcccaccctacactactcacctaaaacctctactcagtcccagctgtcttaccctcactccaccaatgctcctggttggtaattgaaaaaaccaaagctatcagccatgaatgatttctacttcctgttctgtctcactctctacaaatgcccacaaacctccaacttcagaggaagaagagtcctttatctaagaacaatcctcctattctccaaatttatgctctgggtccccgcctattaccctccttgcctgaactactgcaatgcctcccaacgactcacctgacctccagtctgtctgccttaaattaattcttcataatccagccagtacgacctatctaaaacacaaaccctgttcaaaatctcctaactggatctccatctcttagaggatgaagcctgagttctctattagggtcttccaagacccactctttcctctccagcctctcactcactactcttcccttgcattatctcacacatctactctttcacacagcgtccctatgcttatggagctccctctgctggaatgcttttcctaacttcctttacctaattcttacctttcaaaactcagttcaagaaccacctacctcctccaggacgctttcccaaaccactttccctagccactctcctatgtcatctggatgctccccaactcccctagagtattctgtgcatatctccctcttataatttaccatattcacattacattgaagtgactgctttctgtacctgacttcctgttggaatctatcttcatttttaattaaaatttttttttttagagacagggtctcactgtcaccaggctggagtgcagtggtgcaatcatagctcactgcaacctcgaactcctgggctcaaacgatcctcctgcctcagcctcccaagtagatggtactacaggtgcaggccactgtgcctagctaattatttaaaaaatattttttgtagagactgggtctagctatgttgcccagactggtctccaactgctggcctcaagtgatcttgctgccttggccacccaaagtgctgggactacaggcatgagccactgtactccaccatggactgaatctttgaagagcagaaattagattttattagtcttggtaacttcagtggtttaccaatgcctagcaaatcatggatactcaaatatttatttaactgaagtctagtaaataagtaaaaaatgtgcagttcaataaagtcttgcctgaaatagaggaaagcacaggtccacaaccctttagttgcaattccaaaatctctactctcaaacaaaaagttttttacttttctttcttttcttttttttaatacagtgtctcgctgtgtcgtctagactggagtgcagtggtgtgatcatggctcaactcctaggctcaagcgatcctcctgcctcagcctccggagtagctgctgggactgcaggaacgtgccaccatgcctggctcaaacacaaagttttttcataaaactcacttggcggcaaaattctaccttacctgaagttatttacggggtttttaatttccactttgaataaatattcacatcttgttgagtagtattatagtttcaggtaagggattaggaaaggagctgttaagtggaagggctctctcgggtggtttctgcaactgtggtcccagaggaagcactcacctcctgagcaacaacgcgaagggtgtccagatggcggccagtgatgtaaactgtggcgcctgctttgcagagctgcaaggcaatgccacggccaatacccctggaggcaccagtcaccacacacacttggccattcatgggagctgccatgactcacaggcaaaggaggcaggtctgtggaagcaaagacttactctgagggaagcctggagactgtgtgtgtgttggggcgaggttggggggtaggggagaacctcactagggctaagaggaggagccaaggtaagaatcctttgaggggagaggagtcagaggctgacaactgggtgcgggcctgaggacaaggctgactgtcttttgggaggcccagatagtgaagaaggggctgagtgggactgtccagaggtggacaactactacaaccctctgagtgtggctgcctggatatgggaatctggcgcggcagcccctcggggcgcgtccacgcagagtcctgggctatctgaagctccggtccctggcctgacccagtccggctgagccagaggcgcagcttccgggccggggatgagcgcgaagcctggagatcctaagccctaagtgggacgagcgtgcgccgcttacctgccacctgcgctgccgctgaggtctgcagattgcggggctgcggtggaagtctgggttctcgcccagattgagccggcgacgtggaggcagtgttcaaggattgattctgtagtaggacccggggcgattctgtgctgaggtagaggggcagagtcccaggccaaagttagaacctgcggatgggggcggagcgatctgggtgacacacccaccccgcccggctggggcggcgcggaactatgacgtagtagctgcgtcaggagcgcgcccgcgtttctaaactttgtctggataaggcgcacgcttggcgacgtcgaaggtccgtccgcagttaaggaagcttttgcagccggacaggtcgcgaagcacacatggggcagggtccgcgctctccacacaaggtggggcgccggttcccagctggtggcaaacgggggcgcggggccaaggggtcggggcgccccttaccaggccgtaagcggcaaccctggccgcctccggatgggcgctcggagccggctycagattcgcacccgcacctgagcccggaagctctgggatatttccgccgggcgctgtcagcattgaaagaggctcccgagactggggaagaacgaggtaggcagcaacttcggggtttagaccaagagcatcaaatccagggcaggcaaggaaactttctagggtcggcagggcgtggggacttagtttcatttcccatgtcctcttcctcggcctccgacccacgacccttggttaagcgagggtacataactgtattctctactaagtctcttcaaagtgtgtctttcttcccttttcagatctgatggtgcacaatataatgaaggaagtagagactcaggccctagckttgtccacgaacaggactggcagtgagatgctgcaggaactgttgggattcagtcccttgaaaccgctttgtcgcgtgtgggctgctctgcgctctaacttgcgcactgtggcctgtcaccgatgcggggtccatgtattacaaagtgctttgctacagctccctcgattgctggggagtgctgcagaggaggaggaggaggaggaggaggaggaggatggaaaggatggtcccacggagaccctggaggagctggtcctgggactagccgctgaggtgtgtgatgattttcttgtctactgtgragacacacatggcagcttcgtggtcagaactctgcttcaggtgttaggagggactattctggagtctgagagagccwggccccgtggttcccaatcatctggtaagtattacaagaggaaagtggacctagggggaagaagaatttagaaagttcagaatgagacagtaaacagaagagtaagtcttcatgggggagcttgaccgggaagaattagcttgacctgtcctaatctgaacagggcttagcaagccaaagattagtgtgtgcggaggcccagaggtagggatgtacagttgtgtttggggaaggctattagaatggacgcaggaggagaattttttttaagcatgacttaatatacaaatggacttaagcaaaagtaacatacacactggactcaagcagaagttcaggaaactatacccttactacatgcagcccactctgttatttttttttccttttcaaaactattctgctctatttcatttaaaaaaaatgctagttgagaccactaacttgatttcatggtacagtcttgagctgtgatccacattttgaaaaactaggaaataaagttagcgagtttaaatgaggctttattttggaatggcttgaatacctggctgaggaggttgaactgtcttctgtggaccatggggaagctggttgaagtttcttagaaaaattaagacagaaatgtagtctcagttcagtcatccagaagagacatttagttgtactacatctgttctgcatctccaagcggaatccttgttcatctgtgaaatttttctctcctggatggcagtttgtgatctccccactgcacatgttcttaatcttccttcagaagcacagaagaccccagctcaggaatgtaagccagctgattttgaagtccctgaaacctttttgaatcgccttcaggacctgagctcctcctttctgaaggacattgcaggtaaggagggaagtaggaggatggtctcgtatctacttgtctggaggtcatcttaccaccaagcaaggcccttacctcaggttattcctcttcttttcaaacctggtctggtttgacrtycagagcactttgtatagtccctttgtgtccayagtgccctgtatcttgttgcytaaagtttgaggttacgcaggttgtctggattttgrgaaagccgctttatttctgccctctctccacagtgtttatcactgataagatctccagcttctgtcttcaagtggctttacaggttttacaccgcaaacttccccagttttgcgctcayctctgcaatgctgtgattggctacctgartactcgcrgttcctcagtagatggcaggtatggtcagggcctcaggatcgacccaasttggcggggctgtgtgaaatgaatgaggtgatgtagtgcaactgtattttgcatgaaatggagttaagactgcctgatgcccttcttgtccctagtcccctactgctatttctccgagatcagacgagttccagactcctggagcaggtcctgctggtgttggagcccccaagactccagagcctctttgaggagcacttgcaggggcagctgcagaccctggctgcacatcccattgccaacttccctttgcagcgcttactggatgcagtcactacccctgagctggtgagttggaaacctgagctggatctgtttctgctaattcttgatcactggaccttattttatggtctgtctgcctctatatacctttgacattgtgctggccattgcccttgaaaagctattctttgaggttttccagagcttaggataaaggtgcccaccttctagtgaggatttgttttgacttctctcaggtatgaggaccagcaagaractggctttattcaggtttacagcttgaggttccatggcccacccagactctggtacttggctataagcccacatgagtgctagagctgttgccatagcttctcttttcctttgctgcttaggactaaggtgggcttccctgtggtctcatgcattgggtgttagagtggaagtgcagtttaattttagtctccccttgctcctagtgctcccttacacatagggaagagccacttaaagttccttcctgtgaggtggcacctctaagactgcccccttatcctgggccttatctagccaaacaaaagtcctgatactggcaatgctttttatgttttatctagcatttttagttgttttcgttgggaagatttctctgaataatgtggtccgccattaccagaatgccagagttacattccatgtttcccatcagctgtcccctgtgtttgaggagctgagccctgtcttggaagctgtattggcccagggccacccaggggtagtcattgccctggtgggggcctgtcgcagagttggggcctaccaagccaaggtcctacagctcttgttggaggtgagtggatattacccacaatctgtttatgccctcagttcaacttctaccttttaggacttatctratcttaagtttttgtacctctggactcaggaagtctaatgcccaaggagttcacaggaatgggggaaaatgaggcctataggtgcccgccaccatacccagctaattttttttttttttttgagacggagttttgctcttgttgcccaggctggagtgcagtggcgcaatctcagctcaccgtgcccggctgaggccaaatgttatttcacagtcctggaacaaaaattgtctcccagaactaagagagaagtttatttaagggataaacatttattaacccctgtatgtgatagaggctggggatacagcaaggcatgacatctgctttcatrgagctawcattcttgtggagttgggccttctttcctttcctgaaggtgttcccttaaagttgaggtaagggacggagaagttctcaggttcatcatattytgtcttctcctttaggcattccactgtgcagagccctcatcccggcaagtggcctgtgtgcctctctttgccactttgatggcttatgaggtgtactatggactgacggaggaggagggggcagtgcctgcagagcaccaggtgaggtaggggagaggccaagccagtgactaattgggagtcaggcctcccagggtttagcaagcgtctgacttctgaggtgagagtggtgacttcatccaggtggaggtggcagtgttctggggatgggctcatccacctggcttgttggtgcctcctaatttcttatctctgcgctgccaggtggcaatggccgcagccagagccttgggggatgtgacagtccttgggtctctactgctccagcatctgctgcacttctccactcctggtcttgtacttcgaagtctgggtgccttgacgggaccacagcttctgtccctygcccaaagtcccgctggctctcatgtgctcgatgccatcctgaccagcccctctgtgacgcgcaagctgcgccgccgtgtgctgcagaacctaaaggttagatttctggcttttgccttgattccccaccatcatccatttagagaatatgagctttccctggactgtaccttcagactcaaaaaggctatgtaattcctagactattttaattcagcccttaaactcttcagaaaattcactctccacaagcctccaaaatacttttgtggattttgctagggagacctactttgcttgtctccatacagggacaatatgtggctctggcctgtagtcgccatggcagccgtgtgctagatgccatctggagtggagcagccttgagggcccggaaggaaattgctgctgagcttggtgagtaccagcccctctctttgatgtttccagactctcccctctcttactccagatcactgggtagctgggaagtctactgaaattcaacagtctttagttccaaagggtggtcttgctcatgggttcttagcagtctgctttccccttccctcccgctgactgattgtgtagtcctctgccctcaccctgccctctgacttctgttctttggaaagtgaagtgttcactttatcccagtggcagtcccagggtctgggggaaatggagggatctttacgtcaagtagagtctgtctttgagcatggtagtactaaacatgagtggttccctttgcaggggagcagaaccaggagctgataagagaccctttcggccaccatgtggctcgaaatgtggccttgactaccttcctaaagcggcgagaggcttgggaacagcagcagggtgcggtggccaagcggaggcgggcattgaactccatacttgaagactgaggctttggatctgggactgggtgttgatgggggagggcaaaatggggtatccaccccatccctttcctggtttaaattggagtcagaagtcttagtggtaaatatttgatatttttattggaaatgtttttgttagtttgaggggaagggtatgaagacagatctcaaggtaaagtcagagagggctgtcatcagtatgctggggagtttagggacaggaggcattggtaggggattagatgtagcagcagtcaggctgggatcaagatgcctgggggacatcttgatcttggcctttcagggcaagtgggaggctagaaaggtggctaggaaagaacagcattcttcaggtaagggtatagacttgggatgtgaggcgttatgctgaaaggttctgtcacgaggggatcagaggacagtggggaaattgggtgggttatctagcctgtactgtctgcaggtcctgaaatttgatgctgtcatagtctttgcagtgggtcggttggaatgattctgggggcagaagctcagagccccttagtaggaatggaggcggcccttctgctgccactgctcagccccctccactgcatgacgaagggtggaggaaattcccagcaacatatggcccaggccttgcagcagtgtggaggtccaacgaaggagctccctgaatggcagagacaagaggaaatcagatgatttggaaaacttgggaggaagccatcaagctgggagatgaggactttccacaagcaagagctaactaggggtaggtgggtgcaagaggacgaattatggggactatccaactgtaggggatggggcagtatgacatgttgatttctgacctgagtactttctttgggccaagtccttgaaagtcacaactcatagagtagagcccgtagaatgtggctttgacattcaggctgccaaagaggtctcgagggttttgcttgtacacgtcaaaggtgaatcgggcgatgtccttgctgtgcttgggcctctcccgtcccaggccatatgacagcactccactctgtaggacacccttgtcagtgcagtagatcctcataccagacacccaccactaatctccatcagcactgggtcagaccctccctcgcttggactttctgtccactgtgtgacatccttgacaattccacaactcctcctgcacctggtccccaggatcagggttaagctagagaggaagcccgggaaagctctaaaggacaggcattggaagcagccccagtataggcctcttacccttgtagggctccagctctgaccagactgcaacaccatcaggcacgtgtcatcctccagcagctggaagaagtcctcactgtccactgcagttccatcctcctctagcaccagggttagcactccattcagcagtagggtctccaatgcctgcccaatggcaagaagcaagaagggcaggtcttatcccatgccccttccctctttagctgcccaacatccatcagttggctctagacattggtcgatgtcccactttgactttctggcactttgatacctcctaaaggttgcagctctccgtgttcttcagtttttgggggatcctagctagaggctgacctttttcctctttgctcctaccatgtcattggcatctccccttgctcccctccaagtcacttctggtttggaattggaaagcaagccaggttctcacgaagtccacccttctgtcttatctacaatgctgcacctcacttcccacaccctcaagagttctccagaagtgttttcagtaatagtgtttaacctttttgagtccttactctgtgccaggtatgaggactttacctacattatcctcttactcctttcaacaaccctaggaggtgatgtattattattgcctttttatagttgaagaaactgaggttttggtaggttgaacaacttcccaaggtttgacaggcaggaagtggcagaatcagaatttgaacttgatttgtcacacaaatcacctttccatactagcttctgaattccgtccctcgaactctccctatctcctgctaacccctgctcccatagaaaagctcactaggtggaaaatgaacaaattgaccagagctcattaggcccactccgctgcttttagccctcagagggaggggcagctgtgtgacttcagccctctgctccatcatcacaagttgccactgttgtggagccccttggctacccctgctataggaaccgaggaacttggcctacttactttggctagcagctcctggcgggtggcagctgtcaggcctttccggatggtccgcttgtgatcacagacacggaaaggtcgctggggtggtggagctgaggtccagaccctccgtccaaactccgagcttatattagatactgacctggtagttgagaagaaaagtcaagaaggggcgaggaggggcttggtgagtgtaaagggcatgatgagggtagagtggctagagggctagggagggagagatctaggtttatcgattagggatgagggagagaccatggagtgcaggtgggggcgggtggctcaggagcttgacaagcccactgtggagtggggagcaggagaggaaggggtactggttagtctcctaggggctgagtggagtattgttgccctgcctatatcccctaaaggtggagggtagagcggagggttagcagtcacctgagtaagtcactggggttcagagctgagaggtactccatggtggaccggagagttccttccctggaacttctgggctgggtggttctctcctgtgctggggctttagtggtgttttctgttacaaacctgggatctcagcccaggacaaggtgggaatgagtcaagcctggactctggcccccctgcctggccagtaagaagggcaaagtccaaggggagggatgagggaggggccagatggggtcctggaggaagaattgcctggcaaaagccattggagcttgtatgtgtgtctttggtgatgacatgtgttgtgagggtagatgggaaccatgtaaaaggatgaaatgtgacttctggtgtttttttatttctatggagggactttctggggacggtttctggctctcaggctctgagaagctgcagtttatgagtggctctgtgtgtgctgccacctactggagaagccataagctgcagctttaggaaaagggaacccggggcagagtgtggggaagtgggatggcagcatggcagggctttggaaaatgagaggtgagagtgtgtccaggaagggtgtaaggagaggatggatcctgatacatggattcaggatcattagggtcctgtctgggacactggccttcctgcttacctgctctttccttcctccttggtcggaggaggggctggctcactgctctggcttcattttccagagctgcctgctgcagtcacacttaggtcatcttctctcacttttctccttttgccgattagtggacgtgacagagatgtgaatggggcagggatgtcctttgatggcatcaagactttagcttctggtgcgctgtgtcccagctctgatttcagttgcagccgtgatggacagttgcatggaagctgagactctcactgacagtgaaaccctcaaatgaacacaatccctgctttcctgccaaggatccttgtagggtcccccagcttccccactttttttctgtgtcctgacaaagaaacacagagtaacttgattgccctgtgacctggccagttgcatttcccctgcaggcttgagcccaagccagagccttgaaaaggtattcaggttgttgcccaaaacactgaaaaaaactggccctggccctgaaccaaataccttgaaccctcgtaaactccataccctgacccccttgttttggatatacccaggtagaacaactctctctcactgtctgttgtgaggatacgctgtagcccactcattaagtacattctcctaataaatgctttggactgatcaccctgccagtcttttgtcttgggcaatctatacttttctcagaggttcccaaggcctactgaagggacttaacatactcttaatggctttcctctctcttgttttaccttatgccctcacttcctgagttaacctcccaaatacaggatcacctgtacccaagcccttagctcaagaatacaggatcacctgtacccaagcccttagctcaagctctgctttggaagaacccaaactaagacagtgctcctggtgccctccccaagcaacctcaagttctggctgttacttgagcagaggcctttcttttcccttcccccagctctatccatctgccaggcccccctcaaatctcttcatttccaagttttgcttgacttttccaagaggagagggctgcttcttagtatgtccctactcatcctttcctttcttgtcttgtatcctggtgcagcctggtaatggggcctcttcatggttgtgtgtcatgactccctaaccattatgcctccatgcatcccctgttcctcctggaacctagcaccatgccttacatggaaaagctgtcattgacagcccggtgagagccctgagggtggagtgactggggcagggcctgaggcaagaggtgggaggaggtaggaggccaggggctcagccggaccaggagactggaaacaggcaaggataaggcaggtgggggactgagttgtttgggtcacctctgcaggccagagagaccaggcaacatacacactgcagaaggtgggctgggaggattggggccagagctgggggagggatgagaacagaagcaggaccaggattcagcagagtcctcctatttccttccaccaccagggaatcttactgccccacttcagcttgtgctgtttcctggcaaggcaggctctcacatgcctggacgcctgggtgcgttggtgatgggaaggagcagggtgagggaggggccccaggagaggcccaggatgagcctcatcttgtccctccccattcttgtcttaccctctgcaaatgtgataggcacaggacaggagtaggcacctcgcctactgctgcttaacctttcagcttctccaggcccccaatcctgcttgctcccagcttggtaagtagatctgtgcacgtccctttacaccccaccatccagttttgcccagatgtgctagaatggggctggacaaagaaggaggggccagactagaggagtggtggtagagatagtgacagcctggggtgaggactttatgcctgtttaccactgagctctgggaaggaggccaggagtggggcaggtcaactgactgggagcaggggatctgggttccaagaaggagttgtgtttgaggtggggtctgggtcctcgtggaagtcaggactcccaggcagaaaagaggcaggctgcagggaagtaaggaggaggcatggcaccttctcatcgggcatcacaggtggggttttgccccacccctgaacgccctctgtggcgccttccacccacctgtaggcccagaaggatgtcggtctgctaccgtcccccagggaacgagacactgctgagctggaagacttcgcgggccacaggcacagccttcctgctgctggcggcgctgctggggctgcctggcaacggcttcgtggtgtggagcttggcgggctggcggcctgcacgggggcgaccgctggcggccacgcttgtgctgcacctggcgctggccgacggcgcggtgctgctgctcacgccgctctttgtggccttcctgacccggcaggcctggccgctgggccaggcgggctgcaaggcggtgtactacgtgtgcgcgctcagcatgtacgccagcgtgctgctcaccggcctgctcagcctgcagcgctgcctcgcagtcacccgccccttcctggcgcctcggctgcgcagcccggccctggcccgccgcctgctgctggcggtctggctggccgccctgttgctcgccgtcccggccgccgtctaccgccacctgtggagggaccgcgtatgccagctgtgccacccgtcgccggtccacgccgccgcccacctgagcct

SEQ ID NO: 97601 - DNA, 29527 bp, Homo sapiens
tctgtttctttaacttttggtgcctggtgaaaggcctggagcttccaataggcccaactcccagatagctttctaaggaaaataattgtctgctcaggtagtgtttattgagcacctattatgtgctagccactattctagaacctggggatagctcagtgaacattgaccgtgtttcaatgcatcagttagaggtgtggggctgactgcatgttggtctttccatttcctccccacccctccagaccccattgaccccagagcagctccgggcagtggagaacactgtgcaggaggccgtggggcaggatgaggctgtgtacatggaggaggtgcccctggcgctcactgcccaggtccctggcctgcgctctctggatgaggtgagttggggaagcccttttgctggagatcgggggcctccttcaggcatacctggaggctttatccttctcctttggcagttaacgggcctgtcccctcttgacctcaggtttacccagaccctgtgcgggtggtatcagtgggggtgcccgtggcccatgcattggacccagcctcccaagccgcactgcagacctctgtggagctatgctgtgggacgtgagtcactcctttgtgctgcctggcccaggggccccggatccttgcccttcccttggtctttggagccatcagcccttaatgggagatgcacgctggcttctcccttctctactgtcatgccccgactttctgttcactccttcctcccacaggcacctgttacgtactggggctgtaggggacctggttatcatcggggaccgccagctttccaagggcactacccgcctgctggccgtcactggggagcaggcccagcaggtcagcatgccagtaggcctgggacttctgggttgagtgggtgcatgggacacacgcaggtgacatgctcaggctcaggggtgcccagcagcagagccagtgttcatacttggacaccaatgtggccatatcagctattggcagctggcatgtgttttgattatttggtgctgctgccttgattggtcctgattgttaaatcttatttgtccctgaccagtaatgagttgagaggccttgtcctggggagatgaatgtaatcctgaccctcctgtcccctccctgcaggcccgagagctaggccagagcctggcccaggaagtgaaagcggccactgagcggctgagtctggggagccgggatgtggcggaggcactgaggctgtccaaggacataggacgactcattgaagtgagggccacgcctaccaccccaccctctcctagccctattacctcccctattcctccctggactccttcagactctccctagcactccaattgggttgggctccagctggcccagatatttgtctgcagggtgggtgtcttccctggccctgctggtccctacctcagagactatggctcagggaagggcaggggtgatgtactgcttctggccataggctgtggaaactgctgtgatgccccagtggcagcggcgggagctgctggccacagtgaagatgctgcagcggcgtgccaacactgccatccgtaagctgcaaatgggacaggtgagaggaggtttggctgcacccatgtgcccagagacactccagcagatacactgagaagtctcaagggctggggcatgggggtgagtcagaggctgtgcaaggacggggtggtggcagcttccttctcctgccagctgagaaccatcacccaggccattcccccacttctgtctctttcaaactgtgtttctcccccaactcccaagtctggctcagaacccccggaagcctactgacttgattagtgccattcagccctgattgcacctccactgtggatccccctttctcccgcccactcctggtccatctgtgctctgaccttcctcctttcaccttcagcgacctatttgtaggggcctgaagctatgatgaaagggaagtggtgagggaagtgaggaaggacacatgtgggacccaaaaaggaggccaccctaggcagagtccctgccacctctgcctagagctaatgacttttggggtgggtgggggaagcaggggattgctcagctggggcttagttcagaagttggggctaattggaaacctgcctctcagcctgacccctctgcttgtccttcctgccccataggctgcaaagaaaactcaggagctgctggagcggcactcgaaggggcctctgattgtggacacagtctctgctgagtctctctcagtgagtgctagccaagccgggctgccccagggtctggggagggcaaagtcctgaccaggagacagctaggggtctgggaagcgatgggctcaccgtctgtctttcgtggtccaggtgctggtgaaggtggtacggcagctgtgtgagcaggcccccagcacgtctgtgctcctactcagcccccagcccatggggaaggtgctgtgtgcctgtcaggtggcccaggtgagggaagtgggagagcagcccaccgcccccattaatacccatcctggtccagctctctgattttacacctttaattcctcccagacaaaggggccaaggctgggtggaagtatctatgaggatactccaggacagggatggggaatctccttgttcctgaaaacagcccctccccaccccagaaggcaccaagagattccttaattcctaacccctcccaggcctcacatcccttgtaaacaagtagcagatgttcacgttcatacacctccccacacacatttccagcccaaaccttctccggctcatcacctgactgccccaccatgtgcccagctgggaagggggcactgatgaccttcagctccactcttgagggtaccttgagtggatgctggcagggagggccactctgcatcgcttcctcttctgattctgttcctagggtgccatgcccaccttcacagcagaggcctgggcactggcagtgtgcagccacatggggggcaaggcgtggggctcgcgagtggtggcccaaggcaccggaagcactactgacctggaagctgccctcagtatagcccaaacctatgccctcagccagctctgacccaggtccgcccagggacccacatggactaaaggcaatgccaggagccctgaaggagccagcagaaccttcccacatgctgaagcgaggactagaggctggaggccaagcagctgagccaaagaagatcacctgggccagggcctacgtgacacaaggagacatgggctagggaaggcagaactgggcccaaagacacacacccccttggtgaaagagaagacatggacaattatggctgtgactgcacattagaaattatttcactggccgggtgtggtggttcacacctgtaatccaagcactttgggaggccgaggcaggtagatcatgaggtcaggagatcaaaaccatcctggctaacatggtgaaaccccatctctactaaaaatacaaaaaattagccgggtgtggtggcacacacctgtagtcccagctactcgggaggctgaggcagaagaatcgcttgaacctgggaggtggaggttgcagtgggccaagatcgcaccactgcactccagcctgggtgacagagcgagactctgtctcaaataaataaattatttcacagaggatagcaagctccagaaggttctattacctttaaaaaagagtagttttgcccctcccagcaacctggtatgggtgccctaagaccagtctgaactcacactgtctgaaaggccacccaggatccaaatcgggccatcttcattgccatgagtgttcggacaggctctgcgtgccaggcaacagtgggcagacaaagggctccctggctactgggaagatacagaaccatcctgtgaaaatcatttcagcactggagaccttctttgctattacttctttcattaacaatgacctctaatttaaattgggccctgctggtttgttgatgaattgagcaactgagaacgtggcgggcactaaactgacagttccttccttcatggagcctgcttcatgtggaggaaacaggaaataaagcaaaagaagagggtcaggcttggtggctcatgcctataatcctggcattttaggaggctgaggttggagaatcgcttgaggccagaagtgcaagaccagcctgcgcaaacagcaagaccctgtctacaaaaaaaaaaaaaagtaatctttatgcctcagcctcccaggtagctgagactacccacaccttggtcccagctacttgggaggctgaggtgggaaaatcactttgcccaggaattcaaggccgcagtgagctatgattgcaccactgcactccaggcaacagagtgagaccctgtcttaaaaaaaagaagggagaaagtgtcagatggtgatgaggtctgggggggaaatagagaatggggatcaggagtgtggatggtggtattccctcaccaagaggtgacatgtgagcagggagctgggaggtgagggtgtgacccgtgtggaaatcagggaaaagcattccagcctgagggaacagccaatgcagaggccgtgaggtggccagtgccactgagcagtgagctgggataggggcaggtgaggaggctggagagcggggtcagacaaacaatatgcttattaaaacaagttgtacagcacctgcctcaagcctgagctgaagctgaaaattggcacttcaaagcaggaggaagcaaagagatggaggaaagccctccttccctaccagaatgagtccacctcagacagccagactttggacctctgcctttgttcctagatctctgttgctagatgaaggaaagggcctcaggggatccatcttcaaatcaagggctccctggctaccaaattctgtctagtaaaaattattcgagcagcgtgggcccgcctggcatcattttctgcagtttctcattctaattaaggcactgatgatttgctggtaaggcactgctgagggcttgaagggacccaatcccgggtgcctggcccctcactgcttgcaaagcagcatcctggccactggggcagtagcctgtttagcagtgctcaccacaggcccaggttcaagctcctctgcgagcgccaagatgagttttggcacccctgatttattgatgagttaacagagcttcgagatgttcatccagggtaaccaactagtagtcctcggcagagctgaagtcaaagctaccctttgaaagccccgccaccctggctgcctctcccttcctgaaggccaatttcttttttttactagccgtccctctggtctgtccctctcgccctccaggagatctggggccccaaccacatcttgtcgcgccagggctggaagagagtttggcacagggcatggactgtgtgaaggagcgctgtgttggcctggaaccttcctgcgtctggtaccagaccttcagctgggggaaaggtggaaggtgccctccctcccgcagggcctaaggtcaacaggaggcctcacgggagttccagtgacttctacaggtgccttggagaaggtgcgtccaccctcctcttcttccacagacgcttttcctggaccagctccctatccattgccacacaaaagctaccaagagagcacaagcactccagaccagcagccctgcccgacccccgcctcccgcagaaagcccacccgttcctagacacgtcccacggaagcacagggcatagcgcaaggccacagtcccactacccgcaaagcggccgcttccacggaaccgtcccgaggccgggcctggccaccctgcgcgcgagtaagccgcgtgcctggcgcgcagcggcagcggcagcggaggaagcagcggcgcgctcgtcctccccgcccggcccgctcctagcaacgcggggcgtccccaacgacaaagacctgcgccggcgcgcgggactctgcgtgaggcgagcgccggggctcccggagcgggtgaggcgacctccgggagtggggacacccagccccggtctcccttatcggggccccctctggccggctgggcccgggagcccctctagcgtcctctgcccacaccggcccgaagcccacgggcggccattgcctgggttgcgttttccgtggcggggaagcgccggtccgtacccacgggagaccccacgccctccacgcgaggacgccccgcgcctcctccccaccacagtcactgtctgcaaaccgtctggcccggggctggggatccgagtgaggcgaggggagggactgggaagaagagggggaaagtggggcatccgtagggcgtggaggagagcggtcccaagccctggggccctaggcttctccgaaaggccgtccgttcccatcacccgagggctgtaatccctcccgcgggtgcggaagcttcctcatctccctacctcccactgcactgccggtttccctgggttaccaaggagaagccagcgcctctacaccccaggtaggatgggggagggactcctggcctttggagctgagcttctctgctggggtgtctgagctgaaggtagggaggaggggtgggagactccagagccgctggagtcacttttgagacaacagacctgagtggtcaggagttgggaggaggccagcccaggggctgtggtaagtgaactggcggtttcacccagcccaagtccaagcacacgggccgaggctcagttggagaaagttttttgcccttccacaagtggaattcccaacttgggagtgacttaccccaaagtaagacatggtgggcatgaaggatatggaggtggctgtagacaaaagcccagagccctgagaacagaggagggctctcctgaggggatctggggtgggagcggctgagaaggcagagaaggcagtcagagcagtgggtgcaaagccagctcctggggaagtgtcccgggcacagaggcgctgtctgcccaaagagggccgggtgtctccacttctccactaagaggaagggaggaggggacagttgaggaccagaactgtgatgcacaagaaggtgagaatgcaaacctacagcatcttcctcgtgttcccattagggcaggtggaaggagctcctacccagaatggttagatttagctggggacctgaggaaggatggagaagacctgagacttcctgtggagggaatatgccaggggcaggagagcaccactctgcagcactctgttgggctccttgcaccctccaaaggatgcaggcagtggtccagccttgcggaagtctcctatacccagcagtgaactggaagagggagcctggactatttaggtcagcaccaagggtataaccctgggctccatattggtgaacaagagagctcatgagctggagaaagtgggagacccactggaaaagtgctatgaatgactgagttgggagcaatttataagcaaccccagcatctcatggaagtaagagcattagacagacacaaactaaaacctcagcttctccacttactagctagtgacatttagtaagttacttaagctttctaagtttcagtttcctcatttgtgaaatggggacaatagtgttaaataataatcctcaataattaatttgagattttaataaaattatgtagtaaggtatctagcatcttcactacaatatctaacacacatcttgagtgctggctctgggcccagcactatatgaaatgtctcacacacattagctccttaatcttctgagtaatcctatgaaatagatactattaagtactgtccccacgttatagatgaagaaactgaggcaagtggggacctgcccaaggttgcacagatagtggggggcaccgtggagatttgacttgaggcagcagcacaactcctgagtacttagccagctgctgtcctgcctcctgctatgtacatgttattgaaggcctagagctctcaataaatcatagctatatatagccaagggtatggttcccagaacacctgtccaccagattcaagccatcagaaatgaggacaaccctggccaaactggaacatcttgtcactttctattacctgtgcttgggcatggaaagagcagtccacacccaatcctttgagttaatgtcctggtatagacgttgttccctgtgtgtgatttcaggaccctggaccctggtcctgaggatgcagagtaggggcccaggggaggaggattggcctttccctggggactgtggtcccaggttagagacacaaccatgtgaagccaaacaagctggtgaggcaggccccagagaagtgaaagtccactgcacgtgtccccactctcccactttccccctctgagagcgcagcacatccttggatggagacaccaggtggtggcacaagacgtacccactcctggtggccctgacctctctggaatgtcaggattcctgccctgcccatgttcaagactggagtcttgaacrtgctcctagtcttcaaactctggsattctctgactggcccaacaggttcccagggaaagaaagctccggagaggaaggtgacccttcagccacctccaggactgccctctgtgggtccttggggactgtccatgtgcccggggcccccagctattgggtatccacccatccctgcaggctcccagggaagatagtgccacctacttgcaccctcagctgcaggctgatgactgccaggccagactaagaccaacctgtgaaacaggcagagctctctcagactcctgtcttctcctttacccactccccacctcctctcctttctgtggttattctccttgcctcctttctttttctttctttcttttttttttttttttttttttgagacagagttgtgctctcattgcccaggctggagtgtagtggcgcaatctcagctcactgcaacctctgcctcctgggttcaaccttcatttttttcccctaattatcttataaaccacctctttcagcctctcaagtagctgggattacaggcatgtgccaccatgcctggctaatttttgtatttttagtagagacggggtttcaccatgttgatcaggctggtcttgaactcttgacctcaggtaatccaccctcctcgacctcccaaagtgctaagactacaggcatgagccaccatatcccgcctcccttgccccttttctaactttgctttttgtatctgaaactcattcacactaaggtgtggaatacatatatcctgatatcttatatgtagtcatgtgtattatatatgtaatttctgcacacttaaactgtcagaaacaatatattacaacttctactttttaaaaagtttgctacattaggctgggtgcagtggctcacgcctgtaatctcagcgctttgggaggccaaggcgggcagatcacctgaggtcgagagttcaagaccagcctgaccaatatggagaaaccccgtctctactaaaaatacaaaattagccagccgtggtggtgcatgcctgtaatcccagctattcgggaggctgagacaggagaatcacttgaacccaggatgcagaggttgcggtgagctgagattgcgccatggcactccagcctgggcaacaagagcgaaactctgtctcaaaaaaaaaaaaagtttgctacattagtgtcagtatacattttatgatttactatgcttttgtttgacctaaaatgatgagatatgtttttaaaaagcagttcaaggttaacatatggatataggcatacaagtattgatattaaattttgtttcatttagggggaaaatgcatttaccctaacagggatgaagactgtacattagggccgtgaaattcccctagtggagtgccaaaggcctgggagcgcacttagcccggggaggccctccccacttcccaaggagcaagaatatgctttcttcttgcctagtggagggcaggaacagtgaggggagggggacatactgagtgactgtggaggggtagtgtattgtggctagaggtaggagacctgccctcagacgctggccccagctctcataggtgttttagggccagtcatttcctgtttccttgtttcttcatctgtaaaatggggataagaaagcccatcctagctccattatagggtggttgaagagtcacatgagaagattttttttattttttagagacggcatctcactatgttggccaggttggtcttgaattcttagcctcaagcaatcctcccaccttggcctcccaaagttctaggattacaggtgtgagccaccacacccagacttttttttttttttttttttttttgagaggatagttctgaaaggaccttgaaaggaccttgtaactgttaagtgctggacagttgtaaggtgctgatactgtcccagccctggagagatgggatgtgagactagaggctcaatgtagtcaagagaggaagaggccacaggagtgaatcaggtcctgtgagtaataacctgggggcctttggccattctcagctatcccattgaactctttcatctactgattgaggatttttcccatattttcactcaccaaactgtgagccttttggtcaaaatggggcaggaccttttggtcaaaaggagtagaaacccaactcttagctttggcaaagggacttattagaaggctgccaagttagctctcagagctgaaggcactgccaaagagccagacagctctgggagcctccagaactaggcatggggattgaagataccaggatgctgtctctgtctatctatcgtttctgctggtctcccccaggcttgattccctcccrccgcaaacagaccttgtacgtgtggagagaaatgacttccagcagcaggagatccagatccttcaaggacatatgtccttctgtctccctccacttggacaaatctcaagaaggactccgattggcttatatcagatagccaccccccaacaagttgccctgaccaatagacactccttttggccagaatctattatcagaagccagtggagccrccccaaacaccagctacctcgcctaaagcagacctaccactgggctagaaattggagacaaaaatgaggaggagacagcccctacacctcaagaagctcacagtctagtgtgggtgtggggaacgggtgggcagtcaggttactggagtgatgcaggtactggaaagatggggtctgacaacgggaggggttgttttggggtatcagggacaaagaagcaccttgccttcagagaggaagtggtgcttgagctcagactcagaagaccagtgattgtccctttccctggctgaggtggtgggaaaggcatttcagagggaacaacttgagcaagggctgggcagcatgaactgggctgcaatgtcccagatgcaaagaggagcttatttccaacaaggtgtccagccacggagggccttacacaccaaggtgaggaggctggattttacccagtgagcagtggtgagctgctagagggcttacatggagcctgccacagcggctgtgtgaaggctagatgtgagagaaccagactggatgccasagaccacatgcctaacagctgaagctgtgatccagacagacactggggccctgagctaaggcagcagcaggaaaggagaggctgcctgggtgggagacaaaactgaatcagtaactagatggtggggtggggcgggagggctgaaagagagagaggtgactccctggtttctggtgccggcatctggatggattgagtttgagggacctaggcagcatcccagtggacttgagtctggaatgcagatgtaggagagtctggcattacaccaccaccccctagcctcaccatcctggtaacagtaccctctgcttctcctgggatgtcacagctgggaaaccccacctggaagaggtgaaagctagaacccatcagaaggaatgagtggacgaccatggcggaattctgagggaccttggcacgtgagagatgggcagagggagagaagtctgtggtgaagacttttggaaaaagaatggtcggaaagtaggaggagagccaagagagtggcacgccaaagggtgtcccccaagggcaggggtcagaaggcracctgccaagggaggagccatactccacatcctcataacagtgacagcggggcagcaaggagttagttttgctcgttatccttttaaatatactttgttttctatgttgttagtttaaaaagtagatttttttaaacacttagaactaaaatcctccttagaagaatcttgtgtgtctggtaataatttgcctgccaaaatatttttgtgatatccatttttaaaaaatcaagagatgattaactgaaaattatcaactctgatcttatgcaattaattttttcaacatttgccttaaaatgacatcaggccttatggtatggatgttcctataaaggctgaaggtagtaggggctcatttttataccagccatgcacacggcagccatgtgatatggagcgaggccctgccccttccttctgagaagttggttcagggccctggaacatgccccgatgggtcctgctgtgtcatgcccagaggcaggctgcaggcacaaaacagcagcaagaccaattaggaccagatcgtaggaagaactccaggtcctgaaagtgaggtgctagacggtgggactagagtcacctgattgcagaggcatcccacctggccccaggtggggtttcccaggtgtggctccccaggagaagaaggagaagggactgcctgccagtatggtgaagctggatggtgctgtgaggaatgactaaagagtcaactccagggcaatgcacaccagcaacctggggctccccctgccaagcctggtcctgctccctgggtgtggcccatgggtgtccagggacatatctgggaccaagggaaattatagaatgttttaggccaaaaccaagcaggagttgggctggcctgttgcctctgaccttcctcctttgcctctgtygtactgtctatgagcccccaacaccaccctgcctccttgcccttcacatcrctcctggaaatagggaagggcctcagaaactttgcactcacccaaagataccatctcaggtcagcactcaagaagcaggtctcctggatgtggtctctgcagcctcagacccctgcccctcatagtaccttcactctccacacaccctgtatgctttacaatgatcaatattaaccgaccattatctcagggggatctccactacagcccatgtaggaagatattattatccagtttcwcagataaggaaactgaagctcagataggttaagtaacttggccaaggtcacaaagcacataactgacaaagccagaaatgcaaagtcagccggtaccactaagcagcaaccccctccagccctacactctgagatgccattagtcaaaaagcactatctggttattccacaattctggacacaatctgtgtgtgaatttgcatttgatttgcataggggatgtcacaatacctagatatctttcccgcactatctctctccctgccacccgcctctcaaccaggcttttcctccttgagatgcctggcaggctgggaagcaccatctggtccctccctctgccaaggacgcctttgctggttcagagtgttccctcccaccggccactacccagtgcactgagtcgtgagggtgcacatctgatgggaaactgcctggaggaggaactaggtgccagcagccccatttgggctttcctccagcagatctcagggcaggagtgcaagggtgcaggaatgggcaaatgggggagggtccccggaccaagacacatcctctatcttctgtcttcagccccagatttagctgtcttctcgcctcccacgcttgcccactgctgtctggaatgctgggaggctgggagagctagaggaagactggatggggagatggaagggaagggacctggagtttgagctctcagtgggaaggaggagagaagggtgctggcaccttgggcagggcatgggtcttgttcccctctcctttctctctcaacctgcactctctgaaacagtagccacattgaaacggtaggctcaatgtgcccattgagccatcaaattttgaagacctcatatgaaaacatagtatataaaatgtcgcattaataattttatattgattatatgtttaaataacattttagacatactgggctaaatataaaattaatttcatggtcaggcacagtggttcacgcctgtaatcccagcactttggaaggctgaggtgggtggatcacctgaggtcaggagttcaagaccagcctggccaacatggtgaaaccccgtctctactaaaaatacaaaaattagctgggggtggtggcaggcgcctgtaatccctgtaatcgggaggctgagacaggagaatcacttgaaccctggaggtggaggttgcagtgacccaaaatcgcgccattgcactccagcctgggcaacaagagcaagacaaaaaaaaaaaaaaaaaaaagctaatttcacctgtttttctttttttttttttttttttttttttttttgagacagagtcttgctctatcacccaggctggagggcagtagcacagtcttggctcactgcaacctctgcatcccaggtttaactgattgtcatgcctcagccttccgagtagctgggactacaggtgcctgccaccctgcccagctaatctgtgtatttttagtagagacaggatttcaccatgttggccaggctggtctcaaactcctgacctcaagggacccacccacgttggcctcccaaagtgctgggattacaggcatgagccaccacgcccagccttgtttctctttactttttaaaatgtgggcactaaagaagttaaaatagcatatgtggcttgcattttggcttgcattatatttctgttggccagagctgttctcaaccccatcctacggatcaggcagttgctgttctatgaaatacttagtgcagggtcctgttatgagctgaatggctctttattatatctgtgtcttttggcaatatacacccctcaccctcagagggccggtccaatgtagggttcagagcatgaatttgacagactgmatttaaacccacccgtgatacttctaagctgcatgacattgggcaagtcaattagcctctctgcttcagtttcccagcagaaaaatgggaataatacaagcacctatctgaaaaagccttttctgaaaaaggcttttctgaggacacatgaattrataggcataaagaactaaaaagattgtctggcacagagcaattactgtaattgctgtagagctattatctaaaatttggggctgctccttgctagtttcatgtgtcagatactatattatgccctttggatgcattattttatccactcctccaaataatcctactggaactgcgaccttcatttctcaraggcaacatctgaaattcagagaggttcagtaacttgcccaaggccacacakrtaacttggatctgcttcactccagggactgatcgttaagcactattctgtaccacctctcttagtaaatgcccaccaagacccaccaaagtaacacctctaccctcttccttttgctccagatccctacctgtttcaaggacctgccagtctgagaagcttcttgtcataaggccatccaggggccacgcacccctaccttgccagcctccagcatgcaggatacygtaacgacatcagcattgttggaccccagccactcctcagtctccacccaggacaattcctccactggaggacacacttcaagcacaagccyacagctctcaaagccttcaatcacaccagtccctgcaaagtccaggaacccacatcccagggccaatatccrtcggatgcgccggatcattgctgaggatcctgagtggtcactggccatcgtgcccctcctcacagagctctgcattcagcacattatcaggaacttccagagtgagtctgtccctgctttaggtgggcaggagaaggccaagaggggggctaggtgggtggggactgtccggagccaagactgcagaagctgggtcctggggcagcccctgctctcccgtatggcatcctcatacccactcaacacttcccttccacccagggccaagacagtttctccttctgttcccactggcaggtcccaccagactcccacccacactgcaccctccatgcctctgccctctccttgccttttctactctctccagcaaaacccagcctgagccatatctacttcctcctccagaaagccttcccaagtgaaccgccctctactctgatggagtcttccatgccatgtaagggctcttggtttgttccatattttgtgctctgtaatattgatcctttccaaagatggactgccagcctctcctaccagatggggcgctgtctgaggacagggccattatttcatctacagcaactatcrtcacccagtctcactcattttacttgtttattgtcagcctcccctcactggaatgtaaactccaaaagggagagccctgtttgcttactcttctatctccagcacrtgggacatagtagtctctcatagtgctacctccagtgtctggcacatagtaggtgctcaaaaaatttcttgttttgaaatggatgaatcaaataagattggaagcctctgacctcagggattgtatcccccatcagaccaggtgataattgagagttggacctgagagtcttcctcagtctgggaactccctgagaacagatgctgagatgtccaccttcaggcagggaacatcccaaagctaaaggctgtgtcccaccctctgcttgagcccccctgagagcagaggctgtctatcccctaagcagggaagggtctctcctttgcctggtgctcccaggcaggcccagcctgaggcatcatgttgaggtgtcccccaacactgtgaccccctgcgctccttcctctgttcccaaagaaaaccctatcctgaagcagatgctcccggaacaccagcagaaggtcctgaaccacctgtcccctgacctaccactggctgtgaccgccaacctgatagacagtgagaactactggctccgctgctgcatgcatcgctggcccgtgtgccacgtggcccaccatggcggcagctggaaacgcatgttcttcgagcggcacctggagaacctgctaaagcactttatcccaggcaccacagaccctgcggtgatcctcgacctgctgccgctctgccggaattacgtgcgcagggtccacgtcgatcagttccttccgccggtgcagctcccggcccagctccggccgggcgaccagtccgactcaggcagcgagggagagatggaggagcccaccgttgaccactaccaactgggcgatctggtagctggcctgagccacctggaggagctggacctggtgtacgatgtcaaggactgcggcatgaatttcgagtggaatctctycctcttcacctaccgygactgcctctccttggcagccgccatcaaggcatgccacaccctcaaggtactgtctgctcccagccttccccccaccccttctcagcatctctcagaytccctctcccctcctcttcctcctctattattrccttcttcctatttccttctctttcattggccaagtgttttttaatgcaccctgcaccaagatacacggttctgggggtgtagagatgaacaaggcgctgctctcccagttcaccagttggtttcattgaacaaacagctgcgctccaggccctgtcctaggtgctgaagattcaaggatgagcaagattatcatttgtgccctctgtagctaacagtctgatggrataaaggcactaatcagcaatcatataaacataaaattgatactagaatagggttgccagatktagcaaatagaaatacaggacatccagttaaatgtgaatttcaggtccaggcacgcttgtagtcttccagagactgaggaggctgaggtaggagaatcccttgagcctcggagttcaagcctgcagtgagctgcaatcacaccactgcactccagcctgggttacaaaatgagaccctgtctccaaaaattttgaatttcagataaacagcaaagaatttttataagtatgtcccgaatattccatggggcgttcttatttatctgaaatttatttttaactgggcatcctgtacttttttctggtacccctgaattgggatgaatgctataaagaagagatactcttatgagagattgtaaaggagcatttgaccttgcaagggaaggcttccctgaacaaatgtcacttacatagagattagaaggaggaggacgagttacagtctcagagggaggagcgttccagacagagggagcagtgcatacaggctctatgggcagagtgaacatggccagctcaaagagaaagagaagactgtgtggctggcgcagagtgtgaggtggtcagccttgctgggtgaaggaggctttgtccaggaggctatctttatccttaggagctctgggacaccatccaagggttttaggcaaaaaagtaggtaccattactggatttcacatgtgaaaatgtcactccrtctgtgagggaggatggcctgggcagggcagcagtggacatgcagattacctaggagatcactgccaaatccaggtgagggtgagggtcatttcagcgagggtagtgtctgtggagactcaaaggagtggagagagtcaacacatatttaggcagacatgtgtctggcatgcacctggccacactggcacagggaggatctgaaggagaaggaaggagaaggaggtgaggtgcaagacctctggcttgtgaggctggatggctggagggaccatgtgcagagacagggaatgtgggaagaggatcagttttgagggggaagagtgtaagtttcagtttgaggcatctcaaagaaggggtcatttcgttagttggrtagagggtccgaagctcagatgagaggtctgaattgaatgtgggaatgtgtgccrtcttcatgaaggtggcagttgcagccctgggtttggatggagtctcacaggggagagccaaaagcaagacaacaagaggcctggcatgtggtctcagtggaagaagaagagcttgccaggaagccagagggaggaggaaatggggaaacatggcattgtgtcacagagcaagggaggggtatgtttcaagtagagggagtgagcaacggggtggaatagagctgaggactggatttagtgaacatggaggtcactgagggggagctatttcagtggagtggcaggagcagaggccagatagcagtggtttctggggagagtgggaagtgaggaatgggtggctgtgatcagctttttcaagaacttggctgcgaaggggaaaaggtacagccataaccgatgagagctttgggttccttcagaataactcacatatgtttaaaaccagtgtaaggctccatccagttgcaagaaaggggatgaatgtagaagagaggcacgggttcatagaccaataagtcagtgcttggtatcaggaaaatgacaggttcccattcaatgactgagaaggcaagaggagagttcacctgctgaaagagggggctcagcaaggaggcccctgaattctgaggaggctgcaaaaagctgaaatagttgttgtagattataagagggtattttggccagagaaatatagttagattggcatgcagcgttacaagcctattggtgtttccggtgatagcaaccagtcccatcagctgatgttttctattttgtcagttgcttgcgcacaggcatgcagaaaatagagagtggggctgatccagggttagggctttgccagagagacgcaatgaaaagagaagagacacaaaggactcagctgggtaagaggggtataaaaaggagtgaaccgaagggtagagagagagaggccagacactcagaggtctcaagggagagagaggagtgggacaagccagcgggaaggtgagggggagaggttcccatggacaatattcatactgccagccccatcccctttccttcattcctttatctcatccttttcctgcttctccacctccccactgtctccctggttcttgccctggcaacctccttcaaagaggtcctctccttgccctgktggatcttggctgggagaggaggatgcagtgaggggctgaggcctcaggcaggcttggattccaaacctgtctcaactgcttcaatcactgcattactctggggaaataatgtaagcctccattttctgtctgtaaaatggagagaactttctcttcttcatcgagatgctgaaggttagagataatggttrtgaaagacccaagcrgccgggcgcggtggctcacgcctgtattcccagcactttgggaggctgaggcgggtggatcacgaggtcaggagatcaagaccatcctggctaacacggtaaaaccctgtctctactaaaaatacaaaaaattagcagggcgtggtggcgggcacttgtagtctcagctactcaggaggctgaggcaggagaatggtgtgaatccggaaggtggaccttgcagtgagccaagatcacgccactgcactccagcctgggtgacagagcgagactccgtctcaaaaaaaaaaaaaaaaaaaaagataaaaaaggaagacccaagcagcatacccagcatgtagtaattgctcaataaacagtgatctttcctccctgctacctgccaccaattctacactactctgccatgctggtaggcctggccccctccaagacccagccaggtggccaacactaggtgagccaagtttgccaaagatctaggtgggcaggctgattatccctggctggcagttgctgtagaccctctgcctgcccacagatcttcaagctgacccgaagcaaggtggatgatgacaaggcacgcatcataattcgaagccttctggaccacccagtcctcgaggagctggacttgtcacaaaacctcattggagaccgtggtgcacgaggygctgccaagctgctgagccacagccgcctgcgtgtgctcaacctggctaacaaccaggtgcgtgcacccggtgcccagtccctggctcacgctctggcacacaacaccaacctcatttccctcaacctacgtctcaactgcatcgaggatgagggtggccaggctcttgcccwtgccttgcagaccaacaagtgcctcaccacgctgcacctcggtggcaatgagytgtctgagcccaccgccacactcctgtcacaggtgctcgccatcaacaccacactcaccagcatcaacctgtcctgcaaccacatcgggctggtgagccacctattctgggcttgtgagggtgggtgtggaatccaactgccaggggtacttgtgggataattgtgaagatcacagagtttacatactacatactgcatcaagtatgcacacatactgtgtatcccartgattatttttcctttaatccttacagttacctaagtaactgtatattaaccctaagcatatttaaccctaaatatatttaagtatataactaagtatatttaacsctactttctagatggaaaactaagtttcagagaggatagtgagttgcccaagggcatcaagtcagtagcaagtggcaaggctaygattcaaacccaagattgattgaaagcctgagtcctttctaatagactgtgtctctaaaactttcttaaccaagtctgagagtaagaaatgcaatttacgaccaggcacagtggctcacgcctgtaatcccagcactttgggaggctgaggtgggtagatcacctgaggccaggagttcgagaccagtctggccaacatggtgaaaccccatatctactaaaaatacaaaaatcagcccaatgtggtggcatgcacctgtaaccccagctacttgggagcctgaggcaggagaattgcttgaacccaggaggcggagattgcagtgagctgagatcgtgcccctgcactccagcctgggtgacagtgcgagactccgtctcaaaaaaaaaatgcaatttacatgaacactgacataaacataatattgaaatttatgacgtgatatatgctgatattttcctttacattccattctattgtattttttaaaatgcttctgtgacccattaaattgactttgcaacacactactgggtcacaaccacagaatggtagcattctgcctcccaacgtgaaattctttcacattggggctagcccacccagcccagcaggggttggagctgtgatgaccattgagcagggccctccattaggtcactgaaccctctactaaacctccccatgagaacagccttgctcacctacacaggcacatacacgcacacacacgtgcatgcgcgcacacacacacacacacagtttctagagggggtgctgttgactgcaagtaataaaaagcttaatcagaaatggcttaagcaggaggaatattcagtgtctcccacaaccagaattagagggttgtagggtyggtaaacccctgggttcagtgcyaccctctgctctgcccaccccagtctcatggccaatgcctcgctagtgcttctstcagtcccaagatggctgccacagttctgacatctcatacagggacawgcccagaggcagaaaccgggagaacacctgctcccttttcttctctttttggaatgaggagaagcttcccagaagccaccctctctcagcttccccctcacatctcattagatttgtcccacatgcccatrgctgaaccaaaggaatggaattatcwtcattgccagagattcatgtttttcaaactagtagggttgagatgtcaatttagtgggtattggctaccatttttcaaatggaaaagaacagaatatgtcawcatgygtcacaaataggttaagtattgttttgtgaaacttttgttttagtcacatctacctgaaaatgtgtagtatgtgtgtcagatcctgggtagtgatgtaaatgaccccttcctttgcacccttctcccaggacggtgggaagcagctcctggaaggcatgtcagacaacaagaccctcctggaatttgacttgcgcctgtcagatgtggcccaggaaagcgagtacctcattggccaggccctctacgcaaaccgagaagcagcccgccagcgggccctgaatcccagccacttcatgtcaaccatmactgccaatggccctgagaactctgtgggataaaatgacctgacttggatcatggccccagccccatccctcatttcatacccctgccatgcctgctgcagagtatcacactggttcagagggagcggggagggggactgtgaataaccttggagtgatcaagggttgtatggatggagacatgaggcagggaagggagcctggcatgggggaagaaagggtatgcagtagggacccagcctttgtgcccagggaaaggatattactggacacccacaaatgaccaacttctttcaggaacagggaagtcagagaggtgtctgagggactgtgcctgccagattctcccgttggggctgcctgcctccctgactccccaccattttcttctctaccaaacagatccttgatcttcaaacacacacacacacacacacacacacacacacacacacacacaccctctggctacagcagggctatgcctggctctctctgccaccctcatccctgtagatgcatttccctgttgcttgactctgctttaagtgatccagttctacaggccacgccatcccctagttccccaactcccaacctgggaaggggacaatgagctgacaccaggggctcagacccagtggactcctctggggaggcaactgtagatgacaacttccagggaaggatgacacaatccctgccacccaccccagagagcttccctgggagggagggaaagaagtgccacactgggacaggaagtcagtgagtcatccacgactttattatccaccagtttgatttgtacaatctttgcgcttaaatccacgacaaaaaggccacagtgtgatgcacccaattgacagagacctgtcttctccccagccaggcccagcccaccccacaagcccttgtccccaggacacatggagccttccaggtgccctacatgagtcccccatcactctgtagctgtccaccctggggccacacctacaggaatcacatcagcccccagggccacaagagacctagctgactgattcaggctgagcgccattgcccatcctccttgggctgattcattggcccagagcctccagaactgtgtccccaaagggcaggtcatgggctacaaccccagtccaggagtgcctgctctccagggactccttccactaagcaggcgctgagcagagcaccaaagggggcttgggagtgactgcatgtgtgtgcctgtctaggcaacctagagtctgtctgtgcctgacaccctctgacagttccggagtgcaaacgtgtaggtgtgagggtgtgtgtgtgtgtgtgtgtgtgtatagccacagctgctagcagaagttctaattagagaaacaagaacattcagtgtaaagtttaattttagagattaattaattttctggttttcattttccctggcaatcagtaaagctaccaagaaaatagaccaaagaattggtttctctctaagtctgtgcatgtgtgggagatgaggctgtctgagacgacctaggcagaaatggtcaatacaggcaaaaataataatagaggtcccccttcccctcttgtgagaccaggctctgtctcaggaacaggcctgagggaggaggagccacgttcctccttccttggagccctgaggtggccaggctgtccccacacaaagcatgacatccaggtgccagctggctaagaaatggagcctgaggctgcagctcaccacctgtacctcacagatgtccattcagaggaaagaagggtgctccaaacgccaggcccccaaggagcacagactcagggtccaggcaggttcagtgctagtaggcaggtgggcactgctgtccaggaaaacctggtgggcagctgtttcccctgcccaagcctccctctctctagcctcttctccctcctcactcagccatctctacctgaaagtaaagctaaaccctttagaagccatgggccatggtatccccacaatttgggcccctcacactccccgctaggaagaagggaaggggagccagaggcgatgttgcataggtggaggccacacagttggtggtgcaggcctggctgggctgaaggaagatgagaggggctgaaggagggtaaggaggagttctgatggctcaggcgaagtaagaagcatcaggggtgagagatgtgggtggcccaagggttatcctctctagcctgaaatgtgagctcaatccctgggtgctaaatctgctggggagactttagccaggggagttggcagggcaggagggctgttcacagacatgcacactgaagcacatcagggtggaggtggtggggggagcacacggagagaaggcggtgtcagagctttaggggaacaggacgtggggccagcgccctggggtggtggcaggatgcccctttgaagaccctgcgacacacagcagggcttcagctcataggatagggaaggatggaagggttgggcaagatttagagaatgcttgcctctgaccctgccattggaattatttctccagttggggcttgtgacaacgtcctcagtcccccagagatgtgtttgagcgacaagcacactccactcctccgcacaggtttagggaggcaaaggccgcccccacagacaccccacctctggaggtccttttcctctaccctccactgccctctcctctcttactcccacctgcttccagaggtccccgttgccacccaggtctatgtcatgctctctccccttagtcactcgtgctggccagctttaacgagtgctgcccgggtggcatctcactctctaaaaggggtacacactcagaacccaggtgaggaggcccctgttgggaggctgaggagtttagagagaggactgaggtacacagtcctccacatttcactcccctccccactgcaccctggcaacagctctgcaggactggggagcggaaggtgagtgatgtctgtgcagtgagcacagtccctctggacctggagtgggggcccagttagataaacaacagtggagggagcggcagaaaggaaaccccaatcttggggtcagcgccaagaagagggcagcaacatttccacggtgttggatggaggcctagggctgacacctggccccagcctcagacctgctgaatgcattagctagttggaatccagcctgctggtcaccaaaccattgccccctccatagagagaggccccaggggagtgaggccacgaaggaaggaaagccccaagttcccttctccacagcctctaaatctcccatccgcatgccagggcctctcccttcagacaaggcccaaggcggggcccacggcacggttgtcatctaacagaagatctgttgaagggctggacaggagggaggtgtccctttaggaactcagggttggggctggaagaatgactctgccagggggatctcggggagcagccgaccccctcccacccatcggtctctttatgtacagggacagcgggggtctcggccccatccgggcctgtcttgcggccctcacctccctttccctgccccccgcgcggcctcagtcaccgtggtgactcgccctgcgtcgcagagggagcacagtccggcgaggggcaggcgggaggacggcgcgggccactccggggccggaggtcacagtgaggtctctacgcaggagccgtggcggtgcagcggccggtggctgtggcccagacacccctcctgccggtggacgatgaggaccggaaagtagagggcgtcgtggtagggcggcggcggcccggcctcctcctcgtcgtcgtcctcgtcgtcccccatgctggcctggctggacagccgcgtctgctccgtggggcagctggcctcgttgacgctcccgctgcggctgcgccacaggcagctgcgccgggagccgtagagacggcccagcgagaagcggctgcccccgcagcccgcgcccccaccgggccccgggccggcccgcgggctggcgcagatgcttagggcgctgcgcgagaagatagacgagctgctgacggcgcgctggcagtgctcgcagctgcgccggtagggagccacgcccgccgcgcccgggccgcctaccccaccgtagcggcacgagggcgcgtagccgccgcctgccccgccgcagcgcgtcccgagccccgccaggtccatgagcaccgcctcagagtagctgggcaccagctgctggttggagcggatgtgccactcgagctccgtgctgtctactgtgttgacccgcggcaggcggtgggtgagcgggggcagcagctcatcgctggggctgaggccaccgcctgcgctgctggccgagcccgggccctccaggccaaatagcttctccacgtggtagtgcgcgtaggccgtgcggtactcggccagcactcgcagcggccacgacagcgtgagcagcgccgcggcccagaaggccgacgagcaggcgtaccagggcggccgggccgggtccgggaaggccaccatgaactcacggaagtccacgttcttgaggtgcatgccctcgcgtgcctccatgtagtcgtctaggccctcgttctctgcgaagaagcgcgcgcgctggcacaggtacgcgttctcggcctccacgctggcgaaactgaagcacttggtgaagcgcagccgcgtggccggcgcgccctccagccccaccagcgtcttggacacgtcgcgaacgccgcagcgcgcgtagtcgaactcagcctccgccacgtgcgtgttgacgcgttcgtggtagacctgcggcgcggggggcaggcggcggggtcgcggggagcccgtcattggtgcccgcttctgcccactcaccctttcccgccccatctgtgctctggttgcctggtcggaccctaagtctgtcttggtttaggtgccggctggagctggttaggatctttccgtctgacttacagggcaactgacgccctctgtgtaatcagacgtgatgaccggactagaaccagccctacctgtgcgcatttaaattttttttctttttctttttctttttttttttttttttttgagatggagtctggctctgtcgcccaggctggagtgcagtggcgccatctcggctcactgcaagctccgcctcccgggttcatgccatgctcccgcctcagcctcccgagtagctgggactacaggcgcccactaccacgccaggctaattttttgtgtttttagtagagacggggtttcactatgttggccagaatggtctcgatctcttgacctcgtgatccacccgcctcggcctcccaaagtgctgggactacaggcatgagccaccgcccccggccgcgcatttaaattttaactaagccctgcttcctctaggggtcaggccctggccatgaactgcccctctggcctgcctgatccatttgccactgcctctgttttccaaagtgcccccacatcaccacaaacagcctcctcttcttctttcttcccttttacaattgtgtttcccaatgggttccccagaagcactccctaaagaacccctctatctctagtctgcctgttcacgctgtagctatcatcagcctccttcctgcttctcacccgccccaggcttctgtctattgatccttatactgagacagatggcctgcatctgggaacgtctcctccaggaccccaatatgtctcatcctggcgagtccacaaagtgctgattgacctgcccaccctcagtgagacttcctacgcccacctcctcttagacccttgaacttgacatccaggaagctgggattgagcctagcactaccacttaagagcagcagactttggacaagtcactgagtttaggtgtccatacctgtgaaagaactcagtagcagtcacctcactgaacaggtaagagcatgctatgatactgggcatgtgaagccatctccagccattaagcactatttttatttttatttttttttttgagatggggtcttgcactgtggcaatcaca

SEQ ID NO: 97602 - DNA, 13207 bp, Homo sapiens
atgcgtgccccagcccagccagctacccagcccctctctgtgtgcagccggagggtcctaagaatggctcccggagctaactgagggcccagccttttttctgcatgatccaggagcacataccacaaactaccacaataaaaaagctgtttttgctaattgcgatgttcatttccacttgtgtctgaaatctttgggaatgaaggaagactgggggcaaatgctggtttggggaggagggaaactgggagccggttggccctctgagccagccctgcagcttctttactgtggtctcttttcctttcctccctgccactcaacttttcctgccccttctcacatctccagggccaggcttggcccctgcatggattgacttggtaatacactcatcctggcccccttcctggtgcctgctgtcctgtggggctgtgagtggctagcacaggcttgtcacgtggctgccttggcaggaggagcctggtaagggagcggggcaggggatggacagcctgtcacaggcagcttcttgcccagccttgccacacctcccacagggcaggacctgctcagccaatcagctccaccaacctcagaactgcccgtggaaacctggctgggcttctggcttcagagctgggaattgtgggaggagggcccagatcccactggagataccgaaggagatactctttagtattgggatcccagaaaccagtcctatatctggccagagggacactgggttgtggcatctctctagctgctacccagaaggaacagggccccctggggcctataggccttgcccctgaccctgggaacacccagctcaggcctgccccagtggccacaagtcagggaggccgcaaatttttaactagaaacattgatcattaatagggggttagaaagagttcaaactaagtctcactctgggacatagaccaattgtgcttcaggcctcctgcagagatgctgggtccccaagtctggtcttctgtgaggcaggggctaagcaggagcttgtccaggaatgtgggggtctgggcctcaggggaggggaagaaggtggacattgcgggtatctacccccctgtgaccacccccttcactgccactgcagaggtggactatgggaaactggaggagaatctgcacaaactgggcaccttccccttccgaggtaagtggggctgtcctctgtgggacctggggagatgtgagtggccctttagccagagaccaagggagggtacacaggctctgtcaagctgtccagggatagtctggtactcagtgggtcattttattatgggagaggaacaggggagactggtctggagtcaggagacaggcaggaagctccacgctggcctgtaaccttaagctaaacctcacctgcttcagtttacccagctgtaaactgttaaagtgcctttgtagctcccagagtgattctgaggttggactggataatgggcgtgaaagtccttgtcaaccttgtcacttggtgcagatgtgaaggcatgtggctggggtcacgtggcagcccagccacagtcccagttccctccaaagtttgtttgtacattctcttctggacaaagcctccttgccagaattagttctcctgtgaccccttggctcctgtgactcctgttgtggctcctgtgaccccatctctctttacacatgggtctccccaactctgaggttagggaccagatgatatttgcaacaatcaacatgtaacagagtcccaggcacaataaatgaaggtagaagaaaatgtcaaattctgcctgccctgctccgcccatccccattccttactgcacaatcccctgaggcagtgctctctgtaggaccatcccacagatgggaatctgggcctcagagtgacatggtcactgcccaaggtcattcggctaacacatagctgagctgaggtttgcacctcgtctgactgcatggcccatgctccattttactccctcgctgactctcattataaaccctttggagctgctaggccacactatttcaacggagtgtctggtcagcactagctttgttgtggctgctattgaggcagtatcgtgtagactgtggactctggtttcaaatcacagctctggagtgagcgcctgtaatcccaacactttgggaggccgaggcggagggatcatgaggtcaggagttcaagaccagcctggccaacatagtgaaaccccgtctctactaaaaatgcaaaaattagctgggcgtggtggtgtgtgcctgtaatcccagctactcgggagactgaggcaggagaatcgcttgaacccgggaggcagagattgcagtgagctgagatcataccattgcactctagcccgggcgacagagcaagactccatctcaaaaaaaaaaaaaaaaatcaaatcacatctctggcactgacttagtgtgggatgattgctgtccctatcggacacatgggagtgataatgctcatattatgggatggttggacaaaaaaatctgagagaatgcaagtgaaatcgtgctataaattgtggagtaatatacattggaaggtactgattccaatggtaataatgattaaaatgacagtgtgattggcattgcagcaaagctgctttgtgactgtgacccctggcctgatggacacgttgatcattcatagctcagtactgagggaatgtgccccttccttggggacaatgaatgccctgtggagggccacgttgagcagggcacaactgttaggtttctgctggtgcttggctcgtggggcctggaggtttggtgaggtcctggttctcttgaagtgagaagcattttgagcctctaagtgaagaccttacttcagcttcaaggttcaaggatgctctagttcagggtggggagggtggactttgcatctggtgtttgcctgacacccagagaatccacagagacccccagactcttctctggaccctcccttctgggccacccacccactcttgcagagggcatggggtgcccaggagcacaggcttccgtggatttagcaggctgtgggctgcacatacccacttgtctgtctccctcgcaacctatgcaggctccagctcccatctgatcactcacccacacaccagagagccagcggggtgtggtaggaagagcccagcatcttgagttagaggacctgggcaagaatcctgccacttctgccagttaacagagaccttggggaaaccacttaacctttcaaatccagtcctcgttttagaataggaactgagccttcaggcttctagccacagggtcaatataatcctcccaaggcactgtcacagaaaacacagagatagagggtcccttccctgcttccagggtgcagccaaaatgcccaggaaggaagacacaaacaactttagctctgaaatctgtgtttctcttgccctgtcctggcccctgaggtagactttgcagcccaacactcaggctgaggagggaacgtatcacattgtaagggcctcctgcagccagttaaaggtcctctgaagaggagatgagggccaggcacagtggcttactcctgtaatcccagcactttgggaggccaaggcaggaggatctcttgagaccaggagttggagaccagcctggccaacatagtgagaccctgtctctattaaaacaaataaataggaggtggaaagctgccctggatgaatcagtgaagagttagagattcttctggaaagcactccctgaaactgtgtagcttttttttttgagacagagtcttgctctgtcgctcaggctggagtgcagtggcatgatttgcctcactgaaacctccgcttcctgggttcaagcgattctcatgcctcagcctcctgagtagctgggattacaggtgcctgccaccacgcctggctaatttttgtatttttagtagagatggggtttcaccatgttggccaagctggtcttgaactcctgacctcacggtccgccggcctcggcctcccaaagtgctgggattacaggcgtgagccaccgcgctgggcctcttatttatttatttatttttaagatggggtctcagtctgccacccaggctggactgcagtggcacgatctcggctcactgcaacctctgcctcctgggactaaagcaatctgcccatctcagcctcccgagtagctgggaccaaaggtgcacaccactatacccggctaattttttgtatttttagtagagatgggattttgccgtgttgcccaggctgatctcgaattcctgagctcaagtgatctgcctgcctctgcctcccaaaatgctgggattacaggcatgagccaccatgcccggccccgtgtagctctttttaaaaaatctttttagcattgctaatttgtactgattatttgaatagagagtattctttttgttttttctttcttttttttttttttttgtgatggagtcttgctctgtctcccaggctgcagtgcagtggcacgatctcggcttactgcaagctctgccttccaggttcacgccattttcctgcctcagcctcctgagtagctgggactacaggctcccaccaccatgcacggctaattttttttttgtgtgtgtgtatttttagtagagatggggtttcaccgtgttagccaggatggtctcaatctcctgacctcgtgatcgtccgcctcggcctcccaaagtgttgggattacaggcgtgagccacagcgcccagccaagagtattctttttaaataaaaattatgaccagagactagaggaaggggtcattacagaagggctctatggccctgaactcacacccataaacaccctcaaagatggactttgaattgttatttccaaatgaggttagccaaccacagaactagtccagcaggactgggaagatgaggttctccataaaacacttgtgtcctattccttccatacatagagtggaccatgctttcttgcaaagatataatattttgtatatattaaaaccattactctgttaaagaaaatattttgtttaaagcatcacaatgtttacaaccccattttggcatttcttatttttttttaaatgggctagatgcttttgaggggaaaaaaaaatacagtggcccaggcctgtttataccctgagaggccttggagattaattaggcttttagttgtctgcacctatggaaagcctggccagccagcccacctgctcacaacccgaaccatgcctatttatgggggggcaaattctgggtttgtaggtgcctcactaaggcaagaggtagcagctaccatcccggagtggccccagggatctagacccgatgaagtctcctgtccactctgccttctcagcccactgcttgcctctccaccctcagcccattgtgacctcatgttagttactccagaatgagctccttcctgggttcttttccctctgaactctgccctgtagtgaggcgaggggctgcaaatgaggatggaatatgccaggctggcagcagacatgggcactggatggaggtgcactggtctcagatggctaggaatggataccagcccagtcaaggggatcattctgtcatggccagcctgacccagcatactttgccccctgggggccaccagatggggagagagagaaaccaaagactggaagatacaaaggcctaagttgtagaatggattccaagcagaaggcagaaggactcagaattggagaagcagccctttcactgagcctggggacagctgtcagggtaggagacaggacccaggcctcaggcaatgcctgccaggctagacatgagggatgctgcggcctctccccaccccactctccccaccccacccgcaactgccttcctcacaatggggttcattgttgaggtggtggggggcacctagggagggtgcagcagggggcctgcctgtcagacatccttggggagcctgccctttcaagcatgaatcataccaccagagatcacccagcktgctcttagctctgcctgcctggtgtagggtcctggagaccttcttggagctcatccagcagccatcatgcaaggtggtgctggggactgccctcttgctaggaggtggaggtctcatgctgtgggttcagagaaagaggagaagaaaggaaacctctgagtgtccatcagacaaggacaagtcaccagaatcccataaagcaaagaatgaaagctggattaaatcccactttagccgcctttccgaagagaagctggccctcgacaacaatgccagcgctagtggcaatgctacccagactgagagtgggagtgaagaggtcagctccacggttcacatagagaccttcaccacgaggcacggagaagtgggctccgctctgcaccgggaatccttcaccagcaggcagaagacatctgggccctcagtgatccaagagatccaccaggagtctggaaaagccccatccactgatgaggccacgtgggccgctgtggctgcctgcaccaaggagattgacacccaggggcggcacctggctcactccatgctgcagcgggccatagcttaccagcactcaggtcacctagagtccaaggacatcaaccaggaggagctgagggccctcgaggaggtagagatgaagctgcaaaagaatttcctcacccagcgggaaaacaccatagctggtgccaatcacacacacaccttctatggccacagtcaccacagtcaccatggccacccaagccaccagagccacagcctgcctaatcgcagacactagatctgtgacttcttggaagccacctaaccatggatggagacgcccctgcccccagcaaggctggctcacacacacgtctgttttctctcctatggggccatctatgcaggccagggtgagatgctgtgcccaaatccctactttcttaggctcctcacggggattatgggctctttaaactccatgagtggggtctgccacagaagatggcccctgttggagggagagctgggaggacacagcgcaggtgagatagaccctgaggcccctgaagacccaccaagagaagacagatgggagcaggcaagagccccacactgatgtcattgcctggaacggagccaataaagctttgtgtgccttcactctgagtccaggggctctgtgggcagcctaaggtctggcagggatggagggagggggctccctctccagcagtcctctggagtggagtggagaaaaggcccccgacctggggccttttcactgggcctcatttaaagctccataaaacagctaccctggtctcaggttctggaaaaggggtacctctagacgtctcaacacccccaatctgatgttgccagggaagaggggagcagccaggtattgggcttggaggagaaacaggctttcagaggagagtaactaagccaggtgggaatgagggcccctgtcgtcttggtgctatctttgctctcaagtcatgtggcatcctacaaggcagttctctcaccagccccacctgcttcctggggccccttgggatccatgttagtacctccccaccacctaagtctacagctactgagtgagcacaacactttcttcttgtttgtttaacttaatttaatttaatttaatttaatttaattttaagttctgagttacatgggcaggatgttcaggtttgttacataggtaaacgtgtgccatggtggtttgctgcacctatcaacacgtcacctaaggtatttatttagccctgcgtgcattagctatttaacctgatcatcttgggttcttttttttcttttccctttttttcttgttttttatgtatgtatattttgagacagggtttcactcctgctgcctaggctggagtgcagaggcgtgatcacggctcactgcaacctctgcctcttgggttcgagcgatcctcccacctcagcttcccaagtagctgggactgcaggtgtgtggaaccacacctggctaattttttttttttcttttctttcattttgtgtgtgtgtgtgtgtgtgtgtgtgtgtgtgtgtgtgtgtgtgtgtgacagagtctcgcttcattgcccaggctggagtacagtggcgcgatcttggctcactgcaacctctgcctcccgggttcatgcggttctcatgcctcagcctcccgagtagctaaggccaaaggcacacaccaccatgcctggcaaattttttttgtatttttagtagagatggggttttgccatgttgcccaggctggattacagtggtgatatcatagttcactgcagcctcagactcaaactggcaaaattcaaataaagtccttagttaatgacattgtaccagtgttaattctttggttctggtcatcatattatagctaggtaagacattatcattggtggaggctgggtgaaggatgtatagaaaatccctgtacttttttttttttttttttgagacggagtcttgctctgtggcccaggctggagtgcagtggtgcgatctcggctcattgcaagcttcacctcccgggttcatgccattctcctgcctcagtctctcgagtagctgggactacaggcgcccgccaccacgcctggctaattttttccatttttagtagagacggggtttcactgtgttagccaggatgttctccatctcctgacttcgtgatccgccagcctcggcctcccaaagtgctgagattacaggtgggagccaccgtgcccagccagaaaatccctgtactatttttgaaacttttctgtaaatctaaaagtaattcaatatttcaagttaaaaaaaaagttttcagacaatttgattatgagtgtgtgtcaaagtttgattatcgttgtaatgcaagcaaaatgacctgtaagcagctaactcaaatatatactcttggtaagaatatttttattaaaaaaagaatggtcaggctgggcgtggtgactcctgtctgtaatccctgcactttgggaggccgagatgggcagatcacttgaggtcaggagtttgtgagaccagcctggacaacctcgtgaaacctcgtctctactaaatatgcaaaaatgagctgggcatggtggtgcccaccttaatcccagctgcttgggaggctgagttgggaggattgcttgaatccaggaggcggaggttgcagtgaacagtgatcgctccactgcactttagcctgggcgacagagtgagactctgtctcaaaaaaaaaaaaaaaaaaaaaagagaatggtcagatcactcactgttaagactacgtaaagacaaagaagagtagttaacagcttctaggctcttgcctgagagttggctgggagggtggctaattttccagatcaagtcttaattccattaaagttcattgggggccgaacacggcggctcacgcctgtaatcccagcactttgggaggctgaggcaggtgggtcatctgagatcaggagtttgagaccagcctggccaacatggtgaaatcccatctctactaaaaatacaaaaaattagctgggtgtggtggcaggcacctgtaatctcagctactcgggaggctgagacagaagaattgcttgaacctgggaggtggaggttgcagtgagccgagaccatgccactgccctccagcctgggtaacagagccagactctgtctcaaaaaaaacataaaaaagaaaaaaataaataaagttcatcacaaaaatgcttaagcatttcatcaggaatgtaatttctttccagagggaggttatgaattatgtcatgcaaaaaactttggccgcagaccagggcagaaaaaaataaagaacttctttttcttttgcacaacaaattgtcaacacacacctcaacacctatgctaggcaccacacaggaggccagaatgcatccaggcaaagtaaggcaagcactgggcaaggaaaacagaatgctgggtagccgacttgagcttgttggcccgcatttggaaggtgttccaggcagaagggaacaacacaagcaagggtgcagagggagggaagtgcagtgtctggggaaccatggcagtcaacttgttttttttttgagaccgagtttcactcttgtcacccaggcttgagtgcagtggcacgacctcggctcactgtaacctctgcctcccgggttcaagcgattctcctgcctcagcctcccgaatagctgggattacaagcgtgcaccaccacgcccagctaatttttgtatttttagtagagatagcgtttcaccacgttggccaggctggtctcgaactcctgacctcaagtgattggcctgccttggcctcccaaagtgctggaattataggcatgagccactgcgcctggtcttttttttttttttttttttttttgagacagagtctcactctgtcacccaggctaccgatcagtggtgcgatctgggctcactgcaacctccacctcccaggcttaagcaattctcctgcttctgactcccgagtagctgggattacaggtgcgcgcctccatgcttggctaatttttgatttttaattttttttatttttttaagacagagtcttacactgtcacccaggctgcagtgcagtagcccaatcttggctcactgcaacctctgcctcctgggttcaagcaattctcctgcctcggcctcctgagtaactgggattacaggtgcctgccaccatgcccagctaatttttgtatttttagtagagacggggtttcaccatgttggccaggctggtcttgaactcctgaccttgtggttcgcccgcctcggcgtcccaaagtgctgggatcacaagtgtgaaccattgtgcctggcctaattttaaattttttttagtagagacagggtttcaccatgttggccaggctggtctcgaactcctggcctcaaatagtccacccgtcttggcctcccaaagtgctgggattacaggtgtgagccactgtgcctggcccaatttcttattttataggagaggtcagattgaaaaattgtgtctaatcccacacatgggggtgggggtggaggattgaagagttctagggacctttgtagatgggtgctgtccatggggaaatattatacaaggaacaggtaacggaaatgcagagcagggaggcccagtggagagatcccaggaagacttctcagaggaggtggcaatgatgatggactaagaacgcataataatgtctggggacactccttatgtgattctttttagccacagtaagtcaccatgttgcttatgtgtccccagccccaaacgcccactcccctcactgccaccccagctcccagagcagcaagtgtaatcatgggggcaggggagagtatcttcctttgtcttacagctggagggggccttgtacacccactcctaatatcacagtaggtgtacaatgagaggtcattgagagcagcctccccttcaacaccagccaccctcctgatttaaggtttgagcactttctcctgactccataagaatgacagctaacacttattgagcaccaggttctattcgaagtactttataaatagtatctcatttaaacttcaaaacaactctgagaggctgggtgtgatggctcatgcccataatccccagcactttgggaggccaaggcaggcggatcacctgaggccaggagttcgagaccagcctggccaacatggtgaaaccctgtctctactaaaaatacaaaaattagccggcatggtgtcaggtgcctgtaatcccagctactcaggaggctgaggcaggataattgcttgagcctgggagacagaggctgcagtgagccgaggtcgcaccactgcactccagcctgggcaacagagtgagactctgtctcaaaacaaaacaaaacaaaactctgagaaaggcactaatatcatcactattttttaattgagttagcctgggcttctctgacttcagggcctgtgcatctgacccctcttctgtgagccctctgcttttctgctttttccccagtccctgcttcattggagatcctggccttttcctctcctctggccccctctctacactaacagggacacatcaggctcacacctggacatctaaccagggtgaaggaggggctctttggggtacccactcacagatttctgggacattttcttatcctttaaaacagtcctataagctaggattgaaatgatttcactgtcatcccatagaaaaggaaacagactcaaagatgtgatgtgacttgttcaatatccagaggtgactcttgagtctagtgctgccctgactacgccacactccctcttctccagccaggcacttcttccttcttgggagtcaggcatgagtcagttgcccccttcaatgagacagaagagagggctgtgtcatagaagctttgagcacagtgtctgcttctgactcccagagtgcaagcctcagctgtcctgctgtttagaccagctccacctgtagggcccctggaactgaccagcaggatgagaggtgaaggaagagggtgatggtggctgaatcagtggccgcagcaagaacctgccccagcccaggacggcaggcagggttggggaggaagatgactttggtattggaacagagagagtggcaagagtttgatctttgactctttagtcagagggtgctggtccaatcgtagctagattggagtcctcacccagggctggcagcttttacggagagcactgcagccccatgtagcaagacacagggaggcccttccttgggctgctagcctgacacacaggaatcaatcccccagaagcaatcccacaggagcgagaagctgtgtgcctccagacgttccctgcaatgttaccaatgcaaaataactaccaaaaaaaaaaaaaaaaaagcagctaaatatccaatgagagatatcctgatatcctggcaactcactctggaatctgacggtgtagtgaacagcatggaaaaagttggtggaatgaagtggagtctacatcacacagtgtcccctgaaggatgactcacaggaacaatttctcttggtcccagtgccaggaaactctgtgtttctccggggcagttgctt

SEQ ID NO: 97603 - DNA, 14233 bp, Homo sapiens
tgcttcctccctcttccctcacaccctcccacacacccatcctcactctctgcccccctcaccctcaccctcacccctagatgtgctaatttccccctcagcttcggctgcctccacctgtgtgtggctgataagctcacagacctccagcctgcctgcttccagccagccacagtgtggccctgggtgctgagccttacaggcccttcctcattaatcctcataacagccctatgaggtggggctactaccatctgaagaaaccaaggccctgggaatttcagtgatgagtctgaaaccgtacctttaagtagtggggcacagattgaaacccaggtgtgcccgaatcccaagcttatcacacatacaatcgctagaccagaccacgggcacgtctcaagcactccaaactcacaaaccccatgccagacaccgggagtgctgatttgttaaaagggaggaggaaagagtggctccttccccttcagcctgctcatcttacagaggtcactttcttggcaatgttactcccatccatgtgctgcacaggccagaaacctggaaatcacccaggtctctctctctacctcactccccaaacacatccactctgaaaccagttttgtcctaaatatctaaatatctctcggctctacctacttctctgcgtttcccattatcaccacctgagtcctggccaccattatctctcacagtggcctcccaatttggtttctcctccctcagtttcgcctctgcacacagcacagtcaacagtgagtgacagctctaaaacgtaagtttggcgatagcactctcttacttgaaatccctcagcagcttcaggataactgtcctcaggataacttccagatctttttttttttttttttttttttttagacagagtctcactctgtcacctaggctggagtgcagtggcgccatctcagctcactgcaacctcccttgcccgggttcaagcaattgtcctgcctcagcctcccgagtagctgggactacaggcacacaccacctcactgggctaattttttttgtatttttagtggagatgggatttcaccatgttggccagactggtctcaaactcctgacttcaggtgatctacccgcctcagcctcccaaagtgctgggattacaggcgtgagccaccgcgcccagcctgcagatcctttttttttttttttagacagggtctcgctctgctgctcaggtttaagtgcagtgccgtgatcatagctcactgtaaccttgaactcctgagtaagccctgctgcctcagcttctcgagtacctggaactataagtgtgcaccaccacgcctggctaattttttttttttttttttttttttttttttgagacagagtctcgctctgtcacccaggctggagtgcaatggcacaatctcggctcactgcaacctccgcttcccgggttgaagcaattctcctgcctcagcctctcgagtagctgggactacaggcgcccacaaccacgcccggctaattttttgtgtttttagtagagacgggttttcgccatgttggccaggctggtctcaaactcctgacctcaggtgatccacctgcctcagcctcccaaagtgctgggattacaggtgtggcgtgagccaccatgcctggccttaccaattatttaactttccttgaaggccctacgctctctagtcagtacgcctttgcacatgctgttcctctgcctagaacaccgtcttgtcctcacttctatccccttcatcctgcaggtccttcaggtctcagcttagatctgaagcaagcttcttggggaagggttctttggacgccccctctctccatgggttagttaccatggatgtgtgcttccatatacttttcacattctaaccattaacacacagctttgtagtcgcctgttcccttgactttccacctcactaggcagtatcatcattaacttttgcattcctttaactgaacaaacgtgtgttacttgttaactatgtgtcatagttacacacatacatacacgataaagacccagaccctgcccttgagatgagtaactgcgtctcttctctggggtctcggcgtctaacagcgtcaggtccaaagcgcttgttgaacgaatgaaccaaggaacgagtgaatgaacgaatgaatgcccgcgaaggacgtggtgccgcgcggtcttctgggaatcgtagtcccctggttcgggcctgtctttacggcgcaggcgtattcacatggaggccgtgttgctgttaatgcgcatgtcccggaatgcggctgggaggactgcgcatgctcgaagggtgggggttgaggccgacggggcgccgtacggcggaggcggggtttcagtggcttctggtgctctagggtgagctctgcccggctgcagggatggcggggaggggtaagctcatcgcagtgatcggagacgaggacacggtgactggtttcctgctgggcggcataggggagcttaacaagaaccgccatcccaatttcctggtggtggagaaggatacaaccatcaatgagatcgaagacactttccggtacggtaccgcgcgaggcctgaacgggcccttctgctgctcggtggagtgcggggcgaggctggaggctgcccggacgggggtgaggggacgatcctgaaagtccttccgcccttccggagcggaggcctccgcgccccaagtccccgtttggggctcggtgggacagaagctgtatcaggtccacgagcccccccacctcacatgatcgtgtgtcatgaaagaaggggaacagagctcgtgacagcctagacagtgggcttggactttgttctgctttctcctcctttagaggctcaccatcgtcccgtaaggcagggatgatttttgtcctactcacaggtgagaaaactaaagctcggagagggtaaggcacacactaaagttacgagtcggcagaggcagagctagaatttgaacccaatctcaaccctttctgcctccggtaagccaggtacacactcttggcaggtctcctcaggcggcctcggaatttccttgtagtcttgagcacagtaggcagaaatgtcgggactgtgagagccttctgctaagaccttgcactcaagccctcactgcctgccttaggtcagagtgtgggtgcaggcatgcttttaatccaccaggggtcctggtgactggaattaaggataccagcctcctattttattcctcaccccttctccagggcccctgtaccaagtctcaggaataaaccactcacctgtttcccccaaacagtccagcccagggctgctggctgagactggttcctgctgcctggtgtattaggtagtccctgacctgggaggctgttatctgccattctctaagctgtctggtaaagtgacccaagttatcatgggagaaggacaaattttacttcaagaattttttatgtttccaaccaaaagggacctcagagatcaaatctaacccagtgactggcagggggtgggtgctcagtaagtaatttttaatcagtaaataaacgaatgagtctgggtgcagtggctcacgcctgtaatcccaacagttttggaggccgaggcgggtggatcacctgagctcgggagtttgagactagcctgaccaatatggtgaaaccccatttctactaaaaatacaaaaattagccaggcgtggtggcgggtgcctgtaatcccaagaaatcaggaggctgaggaaggagaattgtttgaacctgggaggtggagactgcagtgagccgagatccaccactgcactccagcctgggtgacagagggagaccctgtctcaaaaaaataaaaataaaataaacaaatgaatgggtgggtgaccacaggagagaaggagcacaaggccaggttctttttgtgcagaaagtgtgattccttcatcaaggtgtcctcttcctagcttgtgatcttagttcatgccaaactttccctctgacccctccaccaccctcatcaggatagaccttgaggccttcagtggtctcatcagccctatttttaaataatttgttttctttttaaaagttaatgtgtctttttttttttttttttctgagacagggtctcactcctgtcacccaggctggattgcagtggcgtgatcgcagctcactgcggcctcgacttcccaggctcaagtgattctcccacctcagcttcctaaatagctaggactacagcttcccaagtagctggcacatgccgccacatccagccattttttttttgtgtgtatatatatagatagatagatagatccgccacatccagccatttttttgtgtgtgtatatatagatagagagagagagagagagagagggagatgggggtctcactatgtggcccattctggtctcaaactcctgggttcaagcaatccacctgcctcggcctcccaaagtgctgggattacaggcgtgagccatcacagctggccttcagtatctgcacataaaaagggatctgcatacatataatcttatccttcccctttctgacacatcactgcatattgaatacaccagtgtgcaccctaatcaatcttcattaccagttcacttggaagccttccgggcagtgttgtagaagccaaccctaatcagcgtgaccctccgctttgggatgaaattgattctaggtagggttgacagagggttgagcgtggcagcctttccccttgtcctctgtgccctctgggtcatgctcattcccctccacagcccagcccaacaactcggagagggctgcctgggtaggagagacggcagcccccagagctgtcctggactcccttctcatctctccccacaggcaatttctaaaccgggatgacattggcatcatcctcatcaaccagtacatcgcagagatggtgcggcatgccctggacgcccaccagcagtccatccccgctgtcctggagatcccctccaaggagcacccatatgacgccgccaaggactccatcctgcgcagggccaggggcatgttcactgccgaagacctgcgctaggggactcctcatagccctcagcccttccctcgtttccaggcctctccccaggcttgccatcagccttctttactttttgagcctctgatttccaattccctgctccttcccactccattaagaggctaggtgaggcgcttctaggttgctggggctctgctggttaaggaacaggaagcctgaccatctccctccactacctcttccctgtgctgttacacagtgtcattgttgatgttaaattaaagtcatattcttgcttctctccagatgggttgggtgctggaaaggacatgtgtggggtgaggccatggggcagattcggttggcaaggatggaaaaggtgctgccaaagacaggcatagaagaggtggcccaggaggattgtgccgggaggcagaactcaaggactggtccttggatcagagaagaccagctctggtctggggaggaatgggaggaggcttgagcccagctcctgcttcccccaccttgctcggcattgggctgggaagggggccagatccaaaggacagaagcagaaagcacacgaaacctgggagtctgtgatgccagatcccgcgagggccctgcgggagttttggggggagcagggctcttaaccagtgggccctggcctcaggctgcctcaggaagccaggctcatggggtctgctgggggcatggcaagtagaaccctggccctgtgtgaggtgaggcatggttgccaggtgactgtgcctgggcagccactcgccgtcagaagcactctgcttgctgtgctcacccctcagctgtggccaccctggtgccactccttccctggccaccatgtcacggcagctcaacatagacgcgttacggcagaacttctggaaggaggaatatctgagggaaaagatgttgcgctgtgaatggtaccgcaagtatgggtcgatggtgaaggccaagcagaaggctaaggctgcagcccgcctgcccctcaaactgcccaccctgcaccccaaagccccactctcacccccacccgcccccaagtcagccccttccaaggtgcccagccctgtcccagaggcgccttttcagtcggaaatgtacccggtaccacctatcacccgagccctgctgtatgaaggcatctcccacgacttccaggggcggtaccgctacctcaacactcgaaaactggacatgccagagacgcgatacctcttccccatcaccaccagcttcacgtatggctggcagctgggtgagcccaacctcttggaaatcacctcaaaaacagagcactagccatgtgctagggagtgggcatcctggtgaagggtccagacyataaacagagcaaggagatggccaagaagtgtcgacacgttccacagaactagggagtggcggtgggcagggaggcagcggccacgtgctgctatttattggattgtcaggaaaggcctttctgaggacccgaggctgagagccagatgataaggatgggtttggattttatttgttgtgcagggaagctgatggagggttctaagcagatttcaagagtgacactggtgaaccttttaaaaagtcaccctgacctgtatgtaggcagtggctttttcaggggaaatggtagaatctggcacatgagttgggcatctgtttggttaycctgtggtagtggcctgagggatcagcaatagagctgaaatcaattcaggatgttttgggggaagactcggtggaactcacccatggatagaatgtgagaataaggggaagagagatcaatcacccaggtgtttgtttagctaaagctgcagtgacagggaagactgggagaggtcagggctggagcgtgcatgaacaggtcctrtttagccatgtgtgtttggctatgttatgcttgaagtgtctgtagggtggctgtgtctataagtctggattgaagtcagagctgaagatgcaaattcggaggtcattggaatataggtgctttttttttttctttttctttttgaaacagtctgactctgtcacccaggctggaatgcagtggcacgatcttggctcactgcaacctctgcctcccaggttcaagagattcttctgcctcagcctcccgagtagctgggactgcaggcgtgtgtcaccacgcccagctaatttttgtttttttagtagagacagggtttcaccatattggccaggctggtctcgaactgctgacctcgtaatctgcctgtctcggcctcccaaagttctgggattacaggcatgagccaccggctggcctataggtgctatttaaatccatgagatctcctagggagctcaagttgctggaatctgatgggagtgggggcaggagggctgagccagagsgggtaggggatgtcattggcaggaagcctgtccatctcggctgagtcttttttctgtgaggttgagtcaaggccatcagcggggagggagctgagctgaggcagtggagtaactagagatgaagaggaaaggtgtggaacaggcatgtgccaggcagggctgctgggcgatgttgctgcacgtcccattgctgtctgtgctcatgaatgtcaagtgagactcctcagccctgtacccttctccagctgcttgagtgtcttgcagaaaaggtggrtggttggggattgactcagttgagattttgcccccaaacatccctttcccccaggcccctaaaggggaagtcagggaaataactttctaacaaaagcaggaggcgagccctagaagcggggagcaggaggccgaaggaaatctcatctctccacagtctgtccctgtgacaagcaggctagggtggcccccctccctgcaggtagaggatcctgaagctagggtaatgatggcagatggctgctgtatcctggcatccagccagctcccagtatttgcccatagctcccattcctccaaagcactttctatttcttcccacaaagtggctactccactgacggattcctagggctgtgcagacagacagggctcccatgctctgcgtgtccctccctcaggaacccatgcttggcctctgacatcttttcccaggccccccagtgaagcaagaactggtctcctgcaagatgtgccgcattgagtcattcttccgcaagaacggggccttcgcactgcttgatccccgagacctggccctctgaccgtgggccaggtgtgggcttaggggagggaagaagaaataacaggcctcctggtggggcaaagctgctgtgtgtgtctgtgcccctctgctctccctgtccctgaggttgcattcaggcctttctgaaactatcagacctgcaagttgccctcttgctttttccgtaaccctcatcactttaatcatccctttgaggactcagcaatgaccagagggtgctgggaagggcgagcactacttcgcaggcacgggatcctcagcaccaggggaacacagtagttccaggaagttctgggtgttcctggggagagagcggcttgtcatttcggaggccagggaaaggggcctcctgccaccgccacacccctccttgcccgcccctcacctggccccgagggcccgcagccgctccgtcctctcccgatgcatttgctccagctgctcccgcagggcgcgccgccgcccagccgcgtcctcctggcggtgcggagcgctgagcgtccgcggctcagtggggcgggcggggcagcacctggcacacctgcccctcgcgccccgccgagtcactgccagagtgcagtgcgctcacttcaaagggacccgggcgcgctaagctcggcccctgccccgcgcaggctccttgtggccccaccgccttctaggggtcttgcctgtggcgggagttgagccggactgggcgggagccccacggggtgaacccggcagtggcggttcctggcgatgtggaggcgttccaggacctgcagaggcggcagtcagcgtccggccgcccctcggtgccccgcccgctccaggcaggccccgatcccggcgtggggacacacccggagccgctgctgctcacggtcccgccggcggcgctgccgcctggccgcgctgtgcagctccagcagccgctgcagagccgtcacctgctgcgccgcgcttaagcccgcaggcgccttggcggtgctgaggggcgccggccacgcggccttcaaggccttgggacgctcagggccgccccacccgaccccggagggcacccggaagccaagcctggcccacctcctgctcccccggtgcggggcccactccagggccctgcagcccgtgcggatcgcgctccaggcctgggggccccggagagccccgaggagcccctgctgcccggatacctcggcgcgcagggtcgctggcatctcggctccggctccgcgacctgggagccgccgccgggccgggggcttcgggcgggtaagcgcagcccacgccccctcccgggcggcccccagctttgccaccgccggtgccgacctttgtggctcgcctttgatcatgctctgcgtcagcgtggtagtccttctccggaggtttgggctctccctgcccacaggctttggagtctgtgctttcagggacccgcaggagtccctcggatggctatgggggtcgccttcctctgggggctgcacagtggcctctccgggagccacctcccaggcttgtgagatattgccttcccaagaccgcagcatcttcttccctggactctggggactcgcctttccctggcacttaggactaaattctcttcgactcctccctctgaccctgaggagcccttgggctctggcccccgtgtgtcttcaccttctgactctgaggagcatctttgatctcgccccaggaggcctcggctctcttacgctgaggggtctccgctttctgatcctgagggtcctcctctcagactcaggggtgtccatccttggtggtctttgaagttctgctctctcctggcccaggtgcgggtccgagcccagcccttcaagggcatcttgggaaggcaggttttgggagggcaggtcccccggcccaggggtcccgggagtgagctttcttttctgggtctcaggctctgcctcactcctctcttccctctgggccaggtcctggaaaggaaaagcactttgggcccaggtttgagagggaacctgcagaccccaggggccagcctttgcctgattcctgaatttgttaaagccattttatgtagtgtggaaggtgcttcactgaagagcctcctcctcaccccagcagcctcctcccaggcagacccacccctgccatccccaacctgagacccttgaccttttcaccttgcactctgagctacctggcaccccaaaactcctcctggtagtggggttgagctcttgtaaggagcctgaggaagaaagaccagtattgggagctcatgtcccagcccctcatgcacagttcacctagactagagccaggaagtttagggagtcccagtgcatggctaggggtgccctgagggcgctgtctgaacctcaggctgtcacagttcatcaatcagccagccatgcacctgtcaggtgtgcctgccaacagcctgccccatctttctcatcctcccagccaaggcagaccactccagagggacctgcacagccccttcctcaagaccaccacaggaggcctgggagtgagaagggtcacggtgctgggtgcctgggttcctcagcaccggccactcccactttgccctggtgtgcccatcaggcccagagaagaaacccgctctgggcgtcttactttttactcttattcagaaaaaccttccttagccttttctttgtttctgacagcaaaatcaaaggaaattcaagatgaaattttaggccagagcctggcctaaaaactgcaagtgttcataattaacaaaagaaatctaaaaaaagagatgatgtgttgccgctcccctgcagctgtggaggaaggagagctgttctgcatccataaaaaccagttaaaagggatttcataaggtctgaaattgagaactttcccaagaatactgcatcttgttctcttgtgcaatatacagacgtgtgaatattcctaacagtaaccaaatgggtgcactctctgtgaaaacgcatctttcaaagagttttttaaacaaaggagactcctgggcctttagaaataattgccacaaactgcaaaaacaatctccaacctcccacttctgtaattctcatctgttgtcttactagaaaatttatttctctggtaataatgttataattgatatccctgtcttctcaagatgtaaaatacttgtaaaaacttctctgtccatcagaaaataattattggcacttttcttctctctcatgtgcatgatggaacaataaaaagcttatggctttgctagatctattatttaacaaacaatttgagagtctgtttcatttaaattaataggctcaaggctcacagtatccattccgctgcctgtttattgtcatgctatttctagcctgtgatctaaagacaagcacctagtctccttgttctctgtatatctccattgcccagctgaagggtggcaaacaggtggcctgtgcctggctgaagggtggcaaataggtggcctggagttggtattctgttccctcatccccgggcagccagtgatgctcattcctgaactttctcccctgaaccccagtttagcatcagaatcctactggacacagtgcctaagacagctggtaccaaccaggtggaattggcacatcaaataaaacctacttgccatcgctgggtgtcccggcattcccatcaggaagtgtgagatgacgaatgagtgaagaatgaagtcctgcgacttggggagaggactttcctgcctcatcccaatccagtctggctgccccagccccaggggccccctgccctcctggctgtctgatgacgtaccgcgtgtgggctctgcaggtcctccagggctctcccacccttggtctgcaccactcccggtttcacccagatctggggctgatgagaggtctccggcctgccccctacaggagttcaagggctacctctgatgcacctctctgggcccatcggctctggaatgggagggagtctgcctgccagtctcccgagacccccaccccagcatccaaacacttgagtcccgggtggccgcccccagtaccctccctcctcccccatcaccagatcctgggagctggagtttggaggttaacctttccaagggctgtggggcaaccatgggtgcaactaagagcccaggaggcgtaatgaggggcaccgggcaggactgcagaaggtgacagggaaagagcccagttcacagagggaaaggcaggattccccggggagactcacccctccaggagctgatggttctggctcagggagtccctgtcctggggtagaggatgcagcctagaattttggaaggtttgggggcaccctagtccacagggctccatcccccagtgtggcagccagcctctaaaatggcccctaaatgatccctgcctcctggaattcatgccctctgtgacccctgcttcccctccatgcaaaggagcttggaaacagatccctcctgcccggttgagcctcagatgagaccacagttctttccagcgacgtcggctgaacccttcctaagttgcaccacgaacacccctcctgctacagtggagagtgccttggcccagagagggctaccaacctgcccaaagtaactcagacagctggtggctgagccaggactgggacccacattcctaattcccagctctgttctgggcccagtcaccacagcacccccctcctggaggctcagcccagctgcagccctggagggaggggccagcggctggggctctcagcccctgtgtctcaggcgcacactgggcatcagtgcctttgctctctggggccctgccaggctactttcctcccacgctgcggtaacatggaaaggcttccagatatcaccacacaggtgatttgaccaagacagttgttaactgtggaatgagaataacggcctgcctggaaagagcaggccctgtgtgccaggcatagcccatgagtccactcttcctcccgacagcccttagagaaagatctcttcttgtgggcgttttctttttttttcttttttttttttttggccggggggcttgggggaaacggagtttggttcttgttgcccacattggagtacaatggtgcgatctcggctcactgcaaccttcacctcccaggttcaactgattctgctgcctcagcctcctgagtagctgggattacaggtacaggcatatgctgtcacacctggataatttttgtatttttagtagagacggggtttctccatgttggtcaggctggtctcgaactcccgacctcaggtgatccgcccacctcggcctcccaaagtgctgggattacaggcgtgagccaccacgcctggcctcgtgggcattttctagctgaggaaaggtaaactcagagcccacgggggtggtcagtgtggagattcaaacccagccctgtctctaaaaccctgccccttccgcttgccctcaccacagcagggccccagtgttcccagaacctctgtccccgccgtgccccctcacccactcaccggctgctcagggtccccacctgtgctaccacctggctgacagcactggctccatgcttgctgggcctggcccctcggaccgaaaaactgggcctggggtggccagaagaggcccagctccacaccagtcagcagttccaagtcccacaggagctgcaggaagatggggtgccagggcgtgagggggcacccaccctggcctcagccacacccccagccagcccttacctgctcctgggcccgccggctccactccatctgcagcagtacagggggcagctccagccctgggggatacccgcggccctcttgcacctggaggggcaagatggtgtcaggtccccgcctgtctccttccttctgaggcagtgcccctccctcacctgccaaagtgcagccctgagctggc

SEQ ID NO: 97604 - DNA, 13657 bp, Homo sapiens
ctttattttactttatagagaattttttttttaatttttaaataagacgtagttattgggggcttatatacaggggagagagtccagtggcagctggctaggcaggagaactgccaccgtgtggatttgaagtggtagctcttctttaagtaaaaaaagtcaatgtcatcactacgtgcacagccatactagatgctttccaggcttaaaaaatgtaatatgttgtttcatatgacactgccagtaatcttacacctatgaatacacatagaagagttatccatggtataaaaataatatgaaaaactataagttacagaaccaggtttcataatttctgtgttctttgtaatagccagtgaatcatctaataccttgataattatcccctcaattataggagttctattgatgttatccctcagtaaccatgccctctggtttaaaacacgagtctcaaaccaaactgaaaactaagtaaataaataaaaaataactttttccacatgatctctgtttctccttctcttttttgggacacggtctcactctgctgcccaggctggagtgcagtggtgtgatcttggctcactgcaacctgcacctcccgggttcaagcgattcttgtgcctcagcctccgaagtagctgggattacaggtgtgtgccaccatgcctaactaatttttgtattttgagtagagatggggtttcaccatgtttgccaggctggtctccaactcttgacctcaagtgatccgcctgcctggcctgctgggattacaggtgtgagccactgcacctggcctctcctccttttaaaggttttagtacacagccatgtgcacaatgaacagtacaaaaatgccaaagcaatttcactgagaaacagatctttcttattgaccttgaacacttcaataacaggccatcaaatctgcaaatgtaaaagtaaaactagataaacttaccatttgggtgccagatttctgtaatgaatttcattttaggaggtcggaggggataatcttttgggaaagtaagatgagccttaaaaacaccaccttcactggaaaaaagaacaaaaagaagttcttgcctataagttcctgcttttaagtatagaagtgttaaaacaaatataaaacaagggtgctagcactaacatcaaaaatgaagtaaacaaataatctggattcccacaggcagttactttctcaaataagtagtttaataaactgtcatggctatcacattgattaaactttcaagagagctggtaaaatgaaatcatctgctaaaaagacattcacaccagatcagatcagatcatattactgctatgctacaaacccttccatcacttcccagtgcacttaaaacaaaattcagaaggtttaacatcaccaatttctctatgttgatttgaaactagccagtcgtctttctattcctcaaacacatcaaaccctttctcatctcaaaacttatggacattttctttttccttatctaggaatagatatattgcctccatctatccatttattcatttcatcatttaacaagtatttactcggcatttatgtgtcaaactccaggggtatagcagcaaaaaaaatctcaagagtgactttccagaacagcactgtaaaaccaaactgtaatgctggagatgttctgtatttgtgctgtccaataatgtagccaccaaccacttgaaatatgccctgtgactgctattttagacaatacacctccagatcactgacacttaatcagcagtcattcttaaggaatcatcaaaagaacaatacaatgagttgtatacattaactaaaaccacagagatcaagtcagccttaaagggcaaaaatactaaattcctgtcttgcggccttggtactaaatatttcctctgttggaaatacttttctccctttgtcttctgattatcattcggtactcagcttaaacgttacctctagaaagattttatttgactaaaatctaaactagccaccaggtcccttctagtacattgacctctttaaatttctttattgcagtaccatttgcacatctgattcttctgttgttcaatgtgtccaaccattagaatcatgattgtggttgtttcagatcagtgagaaatgaaattctcagctcattaaatggttttcattcactgaacaaatatacattgattacccagttactctaaccattggtctacgtaaaaggatacaacagagaacaaagcattaaagagcactgtggagcttatcattttagtggcagaaggaaaatatctaccaagaaaaatatcagtagtaagtgttgtcatggaatgatatgaggaatctattgttacatttttaaaagcaggtatttctaaaacaagctaatttgtctttaaagaaaaagtgggaggccggacacagtggctcatgcctgtaattctagctacttgagaggctgaggggggaaggatcccttcagcccaagaagttgaggcttcagagagctgtgattgcaccactgcactgcactccagcctgggaaaagaaaaaagaaaagaaaggaaagaacaagtgaaaaattgggggtgtgtttgtatacacatagaaaaatgtccagaaacaggacatcaatacataacaatagttaactaacaatagttagtgttacgagatcttttactctctgctctttttaatatagcttgaactgttcacaagcaagtatgaatttttattgctttttctgatcataagacatggggaaggtgcagattaagtttaaaaaaagagacagatcattaacaccaaacatttctgaataattaggaaatgccacaggactcagagtataaagtcagtgaccttgataatacaatttttttagtaaaaagcaataggaaaaaaagctgtaaagggttaaagaacagggtagtaaagtacttaagcataataaacaggacaatttatacaaaaaatttaacagttgaagatagtaactagatggggaaactgtacaaaacaagcgctttaaaagagatattcgaagaaatgtagaaatgaagtaaggcccaccatagcgccttacttttcacaactgatgaggttatctattgaaaggaagaagcatgagggcttgagggaatagagactggaatagctgttgtgaagagtgcattacaccaaaaagagttaagtctttatctactgatcctgttgctctgtgtaagttagtgccaaaatgggtcttaggatatactgattacatggactagtttttcaaacagggctgcaaaagcaatttaatgagtcactatcaaagtttttttgttaacaaaaatagaaaacagagtttatcacaagtagtttcagttatataatctatgtatgtgttttattcactaatctatatatacatatgtatgcactgcgtcatgatgtaaagtatttctaattatgggtttgaaagccacaattacagaaaacagccaaacatggtggcgtgcacctgtaatcccagctacttgggaggctgaggtaggagaattgttggaacctgggaggtggagggtgcagtgagccaagattgtgccactgcactccagcgtgggtgccagagtgagactctgtctcaacaacaacaaaaaaagagtcaatgtaaaaggacatcaaagccactgccacaaagcccctgcacttgattctactggcagccacttgccacttgattccttgacaacattaagtcagctttcccacgtcacttacttttgattggttacattcactaaaaagcttcataatagctgactggaatcctcatcatgaaaaactgacttagaccctctaaattgttttcaatctctaaaatgtcaaccaaattcaactaaaagagtagccctaaaaatttaaagcacacaattttcactctatctgaaaatggccttgcccactctgaagcaaccatagcatttctgagtttttctcctatctgtggacccctcttcttctattttacctgtggaaattctacctgcccctcccctcttttcctttttttagtttttttttttttttggagatggagtcttgctctgtcgcccaggctggagtgcagtggcgtgatctcggctcactgcaagctctgcctcccgggttgaagagattctcctgcctcagcctcccaagtacctaggattacaagcgcacaccaccacgtcccgctaatttttgtatctttagtagagacggggtttcactatgttggccaggctggtcttgaactcctgaccttctgagccaccgcacctggcctacctgcttttttttttttgatgcttaactaactagtacccaacttgtgcgtgcaaacttctaccgagcagccaagttagcaaagagaaagcccaaaacccatagagtagaataacactgtagactacacattaacatgtcacatatccactatttttcaaatatagaaagatgtgactgtggccaggcaaggtggctcacgcctgtaatcccagcactttgggaggctgaggcgggcggatcacttgaggtcaggagttcgaaaacaacctgaccaatatggtgaaacgccgtctctactaaaaatgcaaaaattagccaggcgtggtggcaggtgcctgtaatcccatctactcaggaggctgaagcaggagaatggcttgagcctgggaggcagaggttgcaatgagccaagattgtgccactgcactccagcctgggccacaaagcaagactctgtctccaaaaataataataataaataaataaataaaataaaatttaaaaaggcaccaattaattcaaaatatctttcattacatattatcttcatcacagatactatagtataagtactatcatgatattaaaaagaggtatgtaggccgggcacggtggctcacacctgtaatcccagcactttgggaggctgaggcgggtagatcatgaggtcaggagttcaagaccagcatggccgagatggtgaaatcccatctctactaaaaactacaaaaattagccaggcatggtgacaggtgcccataatcccagctactcaggaagctgaggtaggagaatcacttgaacccaggcggcggaggttgcagtgagcaacagagtcagactctgttttcaaaaaaaaaaaaaagagagagagagatatgtaaccagcagtttcacatttgaaagtgtttaaaaacccaggcctagttcaatttttttccatgaggcctccattactgtttttgagttaaattataaaaatcttacaaggatcaaatcctaccatactgccatatttattttatgtaaataatgtgctgtatgctgccgtctgcaatttgctcaacattgttctattaatctatagtcctgttgtagctgtctcttgtccattcattctatccgccacagttcactattattctacgatagtcagaatcacatagtcatgtgatcactgacttggctgtgctccgtgggcactgcttttctgccaggtcctggagttgtcaccccttttgcctctcagcctcccacgggcgcaatggaggagaaggatgagaaagcatgggtgctgctggcccttctgtggcctccagtcacctggctatgacttttgatgctgttattgatgtgtttccttggcttcagcagctatttttgctataataatcctgctgcccttcagactcaggataaacggaacaggcaggtgaacaccatgaaattcatgctgctatatgcctggtattcttggcccaatgtagttttgtgtttctttggtggctttttaaaagaccgagtatttggaatatgatggggcacaattacttttagctgttttatttgcactggacaggttgttttgttctgggtggaatatttaatgttttttggctgatggaatttgaaagacttgtgtttggattggtggggagtgctcagcagttgcccaggacatatgctgtcagctggtttaaagacaaagaattaaacctggtgtctggactccaacaatttagcatggctagaattggaagtacggtaaacatgaacttcgtgagttggctgtattctaagattgaagcttcgtggggttctgctggtcacacaacccctggggtcacacttaagattgggggtataaaatgtattctttcactaatctgtgccttccttggctcttgcttacttagatgygagagcagagagaatccttcataaagaacaacaacaamaaaaaaaggggggggaagtttttacattaactgatgtaaaggatttctccttacccctgtggctcatatttatcatctgtgtctgctattgtgttgccatgttccctttyattggacttgggaaagttttctttacagacaaatttggattttctttccaggcagcaagtgcaatgaacagtgttgtatatgtcgttatcagctcccacaccccagtatttgggctcccagtggatgacacggggaagaacagcatctgggttctgcgtgtggttgcagccactcttgtgtcccacatgatgctggcctttatgatgtggagcccttgggttgctgtgtcttctgggaatctcctattcatcgcttgcctgtgcattttggccaacagtggcatctgtagttcctgaacatcaactgggaactgcatatggcttcacgcactccattcagaatcttggggtggccatcatttccatcactgctgggatggatgatactggacactgggggatatttgtttttagaagttttcttcattgcctgtgattctatgtgacttttatctgtggtcttactctattttgtgaatcatgcccagggtgagaacctaaattattccacaagacaaagggaagaaataaaattttcccatacttaataagtttaaatgactgtgtcatgagaatgggcttttgcacatcactggtttgaaaatctccatttttaaaaatttagagtttagtcatgagaaaaaaaataatggaatggcaagttgtatttatatccaaatacacctatttcaaagtgtatttgtgagaactattttagcctgtgtcttctgtattgtgtgttgctgaagaattctacaaaaggccaaccaacaatgaaaggtttagaaaactgctctggaacatccaggtgaacttcagaaaagaacagtgaaaacagaaaaacacrggagcttcttttgagattgtcttcattaagtatgtgtctaagggatacagccttttctttatcttacagcagaaaaaaaaaaaattgtgacagacattccctttcctggtaggggcataatgctagaagacatgtgaagatatttgtatgaagtctctttctactcacaaccagtagcttgggctctactatgtggttatgtggactgctgagcagtgacccttctgagttgatttttctgttactgagtcccctaatctcttagggacacaaattatagtacaaacagtctgtacagtttttcatatagtctaattagtaactacaaagtgtccttcgaattataattgacatttacaaaaataaataataaaacygcaaaaggggaaaaaataattttttttttgctattataagcaatagaacatggaacgtttgaaacatttcctaagcatagagtttttaccctagaaatgaaactgctaagaccaaatttaagtaattgttcaaagtcactcaactaagaagagtggtagagttagagagctaaccaaaggcagtccccaaagtccatgttcttgaacactacgtgataaaccgcatggcattaccactgatcattccatttccaagcaatgtaggcactaggttcattccctccagaacttcattacagaagagatggcttctgcctctatgtctcacacaggactggaaaataatttataactggaatagaattttgcaactgtaaaagaatgtaattcagagttttggttaactgattcttcattttctatatctacccaaggcaatactacaaaacacataatcttaagattctccagatttttcatatcattgccagtgcttaaaaacaaaataaataaataagacatactccttgaacagaccagccactggtgatgaaaggaaaagagagataaaagttatacagtcatcattcattaataatttataaaatgttataatgatacagtgatatccaggtttcttagactttctggttttgtttgtttgtttaagacagggtctagctctgttgcccaagctagagtgcagtagcgtaatcttggctcactgcagcctccacctcctgggctcagcctcctgactgcaggcatgcatcaccatgcttgacttatttttgtatttttttttgtagagacagggttttgccatgtagccgaagctggtctccaacgtctgagctcaagcgatccacccttggcctcccaaagtgtagggattatagacgtgagccactgtatccaccctaaacttccgtactacaaacctattgccacttctacctgaaattttaatttctgtggatatgagtggttatccatactgtttgataatcagtctgaaaacagttggtataccacaccagtttcagaatgtacatttcatagaaaggccttagggactactgcactggaaagactcattaataaaaataaaaatgtaatgctatataaatatgagtatgactgaattaagacttgtggcaactataggagtctcaaagtaatccttgaacggtaccagttatcaatcacatagactgaaaagagagtggagcgccctctagtgactacatgagggctaatgatggcacagagagataatcacagcagcttttacagaattttggtacagtatttctattatctaattataaagtggtgaattaatcacttaggtctgggtaccatctgagcctatactaatttattttcaatcctataacacccctccccccagcacaagcctctacttcccttcacaggcagttatttaaacgtaaggtgtatatattcacttccaatagtgctcttcaaacaattccaagatggcctctactctctccattccactgaaataattacaagaacctcactactttctgctaagaagttttttaagaacttttttttttttttttttagatagagttctgctcttgttgcccaggctggagtgggtgacacgatcccggctcactgcaacctctgcctcctggattcaagcgattctcctgcctcagcctcccgagtagctgggattacaggcatatgccacctcacctggctaaattttttgtatttttagtagagacagggtttctccatgttggtcaggctggtctccaactctcgacctcaggtgatcctgcccacctcggcctcgtgagccactacgcccggccgacaacaaatattttttaagcattctatgaagtacatggttcttggtagcattctaaaaggcttacttctaacaaacctttcttcattcccctgtaccttcctttgcctttctcaggtcctgccctaggaatatgctctctctttcctgagcaaaggctagtgatctcaggaaggcacagtccagaagtgaccaccagtattctcagcagcatatacacactccagcagagctgccagaaatattgctgtgattcacatctcaattcaacagccaacacttttaaaaatgtacaccaaagaccagagacggttttgttttcttttttgagacggagtctcgctctgtcaccaggctggagtgcagtagcgtaattttggctcactgcaacctccacctcccggattcaagcgattctcctgcctcagcctcctgagcagctgggactacaggcgcccgccaccatgcccagctaatttttgtatttttagtagagacagggtttcaccatgttggccaggctggtcttgaactcctgaccacaggtgatccacacgcctcagcctcccaaagtgctgggattacaggcgtgagccaacgcaccaagccagcagatgcatcttacaaaacaatacatactagtaaatttaagttagtctgcaaacactcagagcagaaaagaagactgtggtctttgcatctagaaatgtacgacatgaaatatttttaaactctatttctcttcttctactgctctttcacaccactacattgttgtctatccttaagccattggtttaacaattaatagtcagttaatagattatcatagagcataacaataactttcaataaactaggagaaagtgaccattagtttagtttgggataagaacacctagattctaaccagtattcggtggggactcaagtagagaaccatgaaaagagacgatcttgaaagttctccttagccttcttaaaacactgatgtgtgtaatacattctcaattaaaatgtccaaaaattatataactcttctgcctcctgagttcaagtgattctcctgcctcagcctcccgggtagctgggattacaggcatgccaccatgcccagctaattttcgtattcttagtagagatggggtttcaccatgttggccaagctggtatcaaactcctgacctctcaggtgatccacccacctcagcctcctaaagtgctgggattgcaggcatgagccaccgcgcccggcctgaaactattatttttaatagcaataggtcttagacattagagcttcaagcaaaacacaaaaactcttccatgatcaaattcagtacaaaggatattgaatacagccatttctcctgctccttaaaaaataatttcatgtcagtttgccaaaatatttgtggttttgctttgttttgttttgagatggagtctcactctgtcacccaggctggagtgcaatggcgtggtctcagctcactgcaatctctgcctcctgagttcaagtgattctcctgcctcagcctcctgagtagctgggactacaggtgcatgccaccacacccagctaatttttgtatttttagtagagatggggtttcactacattggccaggctggtctcgaactcctgacctcatgatcggcccgccttggcctcccaaagtgctgggattacaggtgtgagccaccgtgcccagcctgccaaaatagtttttaattcagtgtattaaaagagctccattttgaagatgtcagttccattatacttactaaagtgtatctggagggccaataataaggacttcccatcggtagagatcattgtcatctattaaacctgcagaaaagccttccactggatttttgttgagttctgtggaaaaagaaaagtttaatcaatacatttaagcacataatttgcatccagtagataaattacagaacttgagcgtacatgttttatgtaagttttaaaccattaaatagatataccttgccaggcaaaatgctacttgatggccaaaacattttcatgcctatactgtaagaaagccctgggtaaagcaaactatccagaagatcaacttctactggtatccagccaggctcttgtcattctaagtggccctacagtggtcttttaaggaagcttgttaaaatgcagatatccaggcccgtcccccagagattctcattgagagggagccctggaaatcaaatcatgttggcaattcttatgctgctgtcttcagggtatactttcagagtgtctaatcataccttttcattggaatgtactgcgcttaataactttcatttatactaacatttgtacacctatttgacttgtccctgtagtcttggggacctgcttctacagtgggtgctcctgtgtgcccatccatctctgagcacaaggagagcaggggccccatatgtcttgtctgtatatgtcgaccctctgagagccacagcttctgggacagaggagcagcttaagagtaacacctggagcatacagaatggctgcagcatcgtgaggttctcctcctctaaagagagtgctgtggcatggagaaaggatgacagggtgggaaacaagagaggcgaggaactggcaaggtgggggcacacaggccaagacagggaccttaaggagcaggtgagcagcggtacagagcccagaatgtttccagagacaccagacttaataaagtactggcctcctgatggtgagcagatcatgtgagaaatttttaaacaactttaatgaggtataactgacattcagtgaactgcacatacttaaattatacaatttggccgggcgtggtggctcacacctgtaatcccagcactttgggaggccgaggcaggtggaccacctgaggtcgagagtttgagaccagcctgaccaacatggagaaacgccgtctctattaaaaatacaaaattagctgggcgtagtggcacatgcctgtaatcccagttacttgggaggctgaggcagaaaaactgattgaacccaggaggcagaggttgtggtgagccaagatcgcgccattgcactccagcccgggcaacaagggcaaaactctgtctcaaaaaatatataaataaataaattagctgggcatggtggtgtgtgcctgtaatcccagttactcagaaggctaaggcaggagaactgcttgaacccgggaggcaaatgttgcatcaagccaagatcacgccattgcactccagcctgggtaacagagcaagactccatctcaaaaagaaaaaaaacacacacacacaatttaataagtactgatatacaccagaggaaccaacacaacaacaatcacaatagtgaatgcatgtatcaatcacccacacaattatcacattttaccggccagtggaactgagtactcattggctcaaattggaaagtgtggacaaagaacacacaggagtagagtggtttgaaaaggacttgctgggagtctcaacaggtgtgtaattctcgtatactacctgccatcattctcaggcagctttgtctaatgatgaaaggcagtataatataactcagagtgctacaaaggactgaaccaatgtttaggtaactgaggagatattaatttttggggaaatcaagagatggtattatttcaacaactacgatttaacaacatgccagcaaaataggagaaagccaatagtgaaaatttatatttaggcagggcgtggtggctcacacctgtaatctcaacgctttcaggaagccaagatgggtggatcacttgaggtcaggagttcaagaccagcctggccaacatggtgaaaccctgtctttagtaaaaatacaaaaattggccgggcatggaggcggacatctgtaatcccagctactcagaaggctgagacaggaggatcacttgaactggaaggcagaggctgcagtgagccaagaccatgccactgtattccagcctgggtgacaatgcgagactccgtctcaaaaataaaaataaaaaatttatgtttaaacatgaagtgcttcttttcttgaaatgtgaggggagatttttataagtctaacatttttgcataacaggcaaactagacttttacaaatagttaaaatcagctctgtatttcaaaa

SEQ ID NO: 97605 - DNA, 27095 bp, Homo sapiens
  misc_feature (1)...(27095): n = A,T,C or G
ctgctttttctggagaggtttgagatcttgttaacaaatcagactttacactatatacagatgtgacagataaattgaaccacttgtttgtgaaaatgagttcctgtcatcttcctcattcactcagccctcaccccagcagccttttccggtcattgtagctgacatggagcagtgacagtattcatttgagaacagggatgcaagtcacagacatcataaaatcagggtctccctgctgaagcattcactagttggcaactatgaatttattccatgtcattctgtttacttagcacttgcactacccttgttggttgagtgtatgctttatttgtttctagtttgaaatcccacatctgatagctgagagtaggcaaatacaacatttacctaatgtcattcactaacatggaagagttgtgaaaattctagagtgctgtaaatccttggcatacactatgacaaacaacttcattactctcccaccaggagctgctctcctgcacttagaaataatgtcacaagtagttttctaatgtacaatgcagacaaatgtactgctctctgaatacttgaagaaatggtattatacatacatagaaacttattagttataccttttcacaatcttattacgatgttgccgttaaaagggaaaaaagacacaggcaatgaatggtgggatagtaagaggacttagagtgtatgaatgagttgattttacttttttggaatttgattaagttgacagtaggcactgattggatgattaaacataagttaatctccactgtgataaaaacttaaataataaacatgatttaaaatagagaagtgttgttggaataaaatttttattcagattttatttcataatattatatatattcattttaaacatgtttctaagacaggtctcccaacttttgtatgtatttatgagtgtggaaacacgtgttaaatgtgagacttttttttttattgttaaacagagggagttaccttacaaggacatcgacatggatcttaaaattctgttccagaattcagaatgttaagtgtaggtatttactgatcattgttgtttttttttttttctagtaagattattgttagacagttttggtaaatagggtgatttttaaattttccacacttgggctagattctataataaagttttcaagaaagtatttattcatttattatttagaaagagtttctgcaactattaaaatattcccataactggttatcatcatgtcaaacacaaatgagaattaagacatttttcctctagagtggcagcttctaatatccctccacatacacataggggcaggatttggatgtccagggttgaaaagagctaatgtttgggttaaagtaatagtttatgattgaagctagagattctcttcaaaactcagctacttacttagtcccaagtgctactaaaactgaacgactccacttcaaaaataaaaggtttataaatgaaagaaccaaaataagttgaagaaaaacctcaagggataatccaacaatctgttttactgaaagtataattcatatttcattctagcttctaagtaattcaaccagcttgtaaatattaaatcacattaaagaatggttatttgcagttgatataatcaaaaacagtctgaaatagaaaaattttacatttcatatgatgaagtttgagaattataggagtcctattattgaaacttctccaaaatatgcattaaagagctgcttatcatgcttccaagatggtaacattttagccagcttttgaagacatgtatttcatgtgaagatactattgatatttttgacagcaaaaacatttttccaacaaatttaattagaagggtcttagatgtccacacaattaaagtattcatattgtcatttttctacaagtcctgcaaagtgttaaaaatccccgatcacttgggtgtttgggttgctgagttggggttagcagggcaggtaaggagtattggtaccaagactcctaacttttaaaatatggaaaccaaaggcacacaatacttttatgactcatatcttcacttttgggtaaggcagacatgatgtaagagagaattcatttatattgtatcctgcaagattagtgatcttccttattatacataaaaccagcagattattttcaatagagtagtatataatccaagttcagactctgaaaaatcagaactacttgtagaattatgttattcaaataaaacaattataataatgtccatctactcaaagaagtccaacatcaacattaatctcaggtaatatattatctcaggtttttcatttattaaccaataaaatctgaagttcttgctgaattttatagaattgaaagcattttatttctgtgttagtttctatctataattagttttacttttcagtaaccctattttgtgcagtgattattccatattcctgagagcagaggtgaccagttccactgtgtcaatttaatatttacttacttaattaatttatttggagacagaggctcgctcagtagcccaggctggagcgcagtggcacaatcccagctcactgcaacctccgcctcccgggttcaagcaattctcctgcctcggtctcccgagtagctgggattacaggcatgtgctaccacgcccagctaatttttgtatttttagtagaaaaaacaaatgctaaagacatatattaagttgaacaaaaatatgtattattaatagcatttatatatatttatatgtgtagttagcatttaaattatcctcgtaattctttcgaaatttgatttttaaaaaatttaaaatggtctctcaatttttttaaaagaatgacagtattatgaactttttgaagtcttttaagaaacaaaaactatcttttttaaactaaataaaattcaaaaggactagtaagtttagaaacttggtcagatgtaccctctgtaacacttcttactaaaatattaggaataaataggatgaaattgttacaaaataaaatcaagtcactgctttgaatgtattctttcttgtacttccatcttcttactctaaaatggaaaacattttgagatttagcaatttaaactacacttatagtataaataacatttttcttacaactgacaaatgacttctcatttgcaatctcaaagatgaaggcaagaaagaaatttactttgggtacctctgaataaattttatgaatccaagagaatggtacaccagttgcaccatttgagaaagtgcaattaatttcgagtttgaatatgccatactccaggtccagatttcatactactgacatgacacaaccttccttacctgttctctcccatcttcttgcttccaagctttcagtttcctctcttgggttttctattacccttaggtattttccaagctgccctatccttttcaagtttatggtgcatagattgtgcctgtctatctaatgtgtatctaatgattttttttttttttttttttttttttgagacagagtctcactctgttacccgggctggagggcacaatctcagctcactgcaacctcctccctcccaggttcaagtgattttcctgcctcagcctcctgagtagctgggactacagacatgcaccaccacgcccagctaatttttgtatttttagtagagatggggtttcaccatgttggccaggcccaggctcttctcaaattcctcacctccagtgatctacctgcctcagcctcccaaagtgctgggattaccgctgtgaaccaccatgcccagccagatgcctttgttttttaacaacgtggaaataaaataaattccaacactgtaatttacaaaggcgaactaagaaaatatctagctgtttttttaaaaaaatgtttgatctgtactagatgaatgccatttaggatgtaagatcaaaaacagtggatgtgcatatggtgcttcttatgggtattgggaggagggctaccactgaatgagtttgcactccctcagggcactgtgtgacgctctggatatggcactgaatgaactgtttggggcatagctcaatgatcactaaactatcaagccacatacaatcttcttatccccaacttggtcagctaaaatttttagacaactaccttgtacagatagagacgttggttttcccctgtggaagcctgtctcaaacattcattcttggtgctcctaacaggatccttttgtaccagaaaatgagtactgtctctggttctgtaacatcactcatatctctaatgttaaaatgtgctagaactgcagccacctgtctgctagagcacgagaaaagcccaagacagagaggtggcaggtactcaaaaatgtatctgaagctaggattgcagcagtaattgtctttcctgtaacaatgaacagaaaggtgtggatagcaaaggcaaggacgacctgggaaggaagcagcagtgagtggttacagatcaaacactacccagaattcctctcatacttttcaaaatgtatttttattccacctggtatatttcagtgatgttctggggaagcttatctgaattggataggtgggtccctcaactatgcaatctatgttttggaatggtcatccatcttttttaaaattattatttcatcagagataaggtgggaaggagcaaaaatcaagcaaagacctttaaaggtcttgaatgtaagacataaagatgtcagtggaatttggcaagtgcaagactttggcaatatctaggcatctataggcatatgggccacattatgtcatacatgttctattgatgcagatttcaagataaatgggtgtcctacctgagaatgtggctataccactggaagtgtaggtggcatcaactcacatgtttgtgcatatcaagacagaaggtgcagaacatctctctgctggctatcatttcttatatcagaggtaaatgacagaaatttaaatattttttgttctccaatcataaataaatttagcattaggtgacatggaattttattttatagttgtgtgttctatttatctaccagctttcagatgccaggtctagtatgtttgctgttcctcactggttaagaaactgcccctagatatgtacagtaaatctgttcaaattacaacatattctgtgaaaactaaatagaaaaaaagcagatgggggaaatagtacaattttaaaaggtattttagattccttaaaatttcatccaatttatgttgctttaatttcttatttctgttaaatgagtagtagccttacatcaccactttataatactcaggctttaaagtttaacagtattggctgggcgtggtggctcacgcctgtaatcccagcactttgggaggccgaggcaggcagatcacaaggtcaggagatcgagaccatcctggctaacatggtgaaaccccgtctctactaaaaaaatacaaaaagaaattagctgggcgtggtcgcggacacctgtagtcccagctactcgggaggctgagacaggagaatggcgtgaacccaggaggcagagtttgcagtgagccaagatcgcaccactgcactccagcctgggcaacagagtaagactccgtctcaaaaaaaaaaaaagtttaacagtattaagagtgtcatcctaaaatcctattatcaagtacaaaaggagactaaataatgtgcctttccatagcctgcaaataaataacccatttattcgtgcaattaagcaatgattgtcagtttttaaaactctaattatccttgtgtatggcttgagatgccatgtttattgctacttttcaggtttttctataaacttttgttttggatttcaattataaactaacaattgaaaatgtgggttgcctgttaattttgggctgtaatgcagaacattgttcaagactatttgtcacttgaccattattgatattccggcccttgaatcctcttaccagtcagcccaaatgctcttattagttccaagtaggagtacatcttgttattatcagcatcaaatagctccagttgttcttgttggggtgtctctgctcctagagggctctggatttcactgtaagttaaataaccatttgctttgttgtcagcccatagaaaaagacttgaaggtctatgaaaataaaaaagtttggtatatttcaactcaaattttcaatgttaacccaaacatctacacctttcagaacagcattttgtcctcctggggctggtcttctttccggtcctcaaacatacctagatcattttttgcttccaccttggctttcattgcacatcactttaccacttcagttgctcctttcctttctttcaacatccagtttacctcttttcttcattctacttgaactatctgatcatttactttaataatttttcttctgtgatctgtatcctcatgatgttttatatctaatctagtgttttcrttttctgtttgcctcattccttaacataagcactgtaatggaatattcttcttcactggtagtctagtttttgatatattcattggatcttctttctctcctaaaactgtttaaaaacttccatctggctacattttaatggcctttttatcacagtctttgcagttcccttgtttacattcatttgctaccttctgtctaatatttcttaatattacatcaaaagatacctacttatttggctaacaattctgaacatactgatatctcttacactcctaagttagtaaaatttattagtttatacaaaatcatatgtttcttcatttgtaacaccaccaaataatattcctttgtcagtattcttattattctcttgatctcattgctttaagtactgcctttattaaaacacaaacaaacattgttttctgtttccgaagtgccaggctctgtacgtaatactggaaatgcagggatgaagaagccatagtttctgacttccaggggacaaaaccagcaagtaagcagtttcaataagcgaaggaatatatattgtaatataggtacagacaatgtgccattgaaacagaggaaagtgagagaagtttccacctggggattgtttcagttgagtcaaaaagaaaaaatagaagctcaccaggtaaagaaatacatagagataatttttggaaggcatgaccctatggtcaaaggcattgagttatggaagagtgtggtacattggggaactgcaggtagtttgctctgataggagtatacatgatgaacagatgtgaccactatgctaagcaaaaacaaacaaaccaacaaaaaacttttctaactgacctcagtcttacttacttttggctctttattactgtaacacaatctgctttgcattaactattcagtaactttccccaagatacctgtttatgttcctgagtgttcgatacctggccatatggcacaactttcaaaacagctggtgttaagcttcttgtgttacagatgatttgatgtaatgtaaaggctctctattgaagctaaattgtagatagacaaaaggatagcactcaagtttacttatgcttggcttaggaaatctgcaaaacagttttagtgtgtacagcttcttcttagctagtttgcagaagagaaatgataattttttcatcttaaaatatgaaaaggaatatgatctggtaataaaagaatccagcaattgcaacaatttataaaccattttttacttaacatagtaaataaatataaatgcctaggagtactgactgacagcgtgttcaagataacagtgacaggccgggtgcagtggctcacgcctgtaatcccagcactttgggaggccgaagcgggctgatcacctgaggttgggagtttgagtccaggctggccaacatggtgaaacctccgtctctactaaaaatacaaaattagctgggcatggtggtggatgcctgtgatcccagctacttgggaggctgagacaggagaatctcttgaacctgggaggcagaggttgtggtgagctgagatcccaccactgcactccagcctgggcaacaaagtcagactctatctcaaaaaataaaataaaataaaataaacagaaaagaaaaagaaataactgtgacagagtaagtataatattataattatctaggcagtcatgaattaaataggtgtgcatgggttactatataatgttgtctctggtatagaaagagaaattactacattaaggagttactatacaagaaatataataaccaaatgtcatatattttttagagattttaactctagccatacacattattcaattagcacttgcttcttcctgcaatttttggttttgcttgagtagttattactctatttttattaatctccatttcacaaaagtatgcattccaaataccaaacccacatcccagaattatatcaaatgtggtttctaaagcttcccaaatgtttgaaaggaaagggataggtaaaccaaacttttgtatggctgaaggaactgagagcaataatgaagtgtggtaaaataagtaatcatgacatttgactattaatttaatagctctcttttcagattcattatcttttctctaccaacaggtaaataacacagactgtaaagtaatagaattaggaaaagtttcaggtttgtgtgtggagcccctacagatacagtaccttctaaccccttttacaaagatttgattagattgttctagctcattgagtctattatatcctaggagctggcaataatcaatactcctcctccttagggatgaaagaaaatgatttttcttccttgatcctgattcattttggagagaaagtgagaaaaggaggccaggaaagcaaacaaccttgaattttcttccactagaggcagatgatggtataatcaaataaattaaaaactgcaaacatagatttttttttaatccatattcaaaaaatgtttccatattaagcccagagctacatttatatgaggattaaaaaaataggatttaactgataggtarcacaagatgaagtgggagaatttagattggttccatgcctctacaatgagaagtcatttagatgtcaactctaagagaacatttgttacatcccctattgcttctccctctaggatttttgctgaagttcttttgtccaagagggaatcaaaagctccttcccttcaaatcatgtcaaccattttcttctaaaaacaaaagtaagaaatacaaactactgcacacaaataatatttaaataaaaaatcagaaagttatcactgacttattttatacttgctttagagaacttaagctaaatcatttgcataggatgttctatgatgggtgactatttcatgctcaggatgcctgctctgtggccaacatttattgaaggtcacaccttaatatacttttctgtttaaggaggttggactagtggccttgaaagtccttccaatactgggtgggccatctgacaaattaatatcaagttcccacggttttgtccaagcccttgacttttccttccttcctcttcagtcagcaactccattccaaacctaggtctttgcatcacccagggtctccccacttctgaaatactctgctctaagatttcctctctgttcttagcctcttaacattccagttcccattcccactacactctattaatgttcagctcataactgctcctttttttttccctgtcaatctaaaagattcctcctggttacattttatttgataatcactctgggcctttgatctctaacttaagcagttctattgtctacacccacaaaacttgactctactttcctgctacactcaatgaagcaaaagtccaatcctggataaccacctgtgttctccactcctgtacctggactcatcagaaattttaccgaaatcaaatagccacgtggattggtgctactaaaattgaaatcycacaggtcaaggtcctcatcttagttgaactgtcaatgatacctgcacaccattttatatgttccattttggctccccctcttattgtccgtagctatttcaaaccttcaccattttcccctcagtttttttgttttttttagtttgccaatttacctccattggtttcagcagattatctttttttacttactgaaagaaataattcccaaagatgtttcttcatcttgctgccacttctcctaacttatttgtatccatacctctatttttcttattttctatagtttcagtgaaaaataataatatagcaaaaaattaacaacacacattctcttctagtgcctaaatctaatctcatttttcagattctactctgtagttctttatcaagctatccaagtgaaaatatctaggaggcattttgatatacaaatctggaactcaagaaagaaagcctggttggagattcatgtttgaaattcagcagcaaataaagatgaattaaaactgtggcagaagaacagtggctggcacatatactcaataatatcagtctattcttgtccctgtttccctaatctcatcctcttcctcatttcctttcttaaatagtgacaccagaattaataccaccactcaagccagtaaatccttgtgtcaccttagatgccttccacacccaccatcttcgactagtagcgaagtcttgttagtttacctccctgatatcttttgagtatcttctctgttgctgttgccttcacgcagctggttagcatgttttcctggcttattgccactgttccctaatggtttgctctgcttccaggctgtctttcttgcaacctattttccttccacttactgaattatctgtgtacacatgcaaatgtggtcattctatttataattactcaaggtcttcaagtagttccctagtcacagtaagataaaacctaggctgacacataacacccttcattatttggtgcttaattgcatctccaaactcatttctttttactttctacacttcctacctgctcgatatagtcatttgcaatttctcatatgtattatgctatttttaataaacataagctttagtatctctgtttccttcttgagttcccactacctgccatctttttcctcacctcttcccacttctgtcgtcaccctttccttgaccaaatgtttcctcttcaaatcataaccctaatattatcttttagagaaagacttctcagtctgagttatgctccctgctcccaagttttcttctggttttctatgctcatggctcgttgttataattgctcacacgttagtttctccactaaccatgaagaaaccatgtcagtgactttttaattttaattcccagcacctagtagagacctcagatatgggaagcccacataaaatgtttgctgaatgaacaaaagaagcattttgattcattatttatcctactgcttctatatctgtgtatgttaggatttaggatgagaatttatggtagaaataaagctaaatttatgtaagatgagacaaaatatatttaactgttaactcttggccactctgacccaaataagagccccttgctagctttctctgagtactaagcatatgcatatatttcccccctccccttctgggctttaaattcttccacatcaggaaccacatctgtcaggctcagtgacctatccttagtgtctggcacaggatattttcaatagaggctgtgagatttactaaataattgattctcctctggagaatgtctagtggaatagttgttctcgatccttcgtagataaacttatttctgaatctttgtcaagtagttgcctttcttgttgcccttataaattaaagcataaattcactgattttatatgayatatataacctatgtgctaaaatatatgggatatgaattagagttcaacaaggatgttatttttaaaaaccaaaccagaaacacatacaaacatgttattttaacgcagtggagaaagctcaaaataataacctgtatccctgtcaaaagcaggcaacatacagtcattatataataatagtatttgataatatttaaaggataaatattatttagaataaggcaagtcatgtggaaacactacttcatacttattaaatcattttcagatgatatgcttggacattccgctttgttactaaatcgtgaaatttacctgtaagattctttatgaatgaaacaattatcttggatttctctttcaatattgcagaatctatgtctttagtatcttatgatgctggttctggaagagcttttataaagaaaacaacacgatcagtaaccctggtccaagagatgtgagaaaatgaatagtcacatttttggtatagtatatccatgcaaacaattgtaggtctacattatcactttataatcatctcaccaagtaatctggaacagaatgtttaattccatgctctttttgtcrtaaacacaattaaaaacctacctattttcacatgttaatgtttcattttcttctctcttcttgcttagtgcttgtctgtgtatgttatttagacttctcagcaggataatacacttatttgttcattcagagaaacatgtactgagcacccactctgtgctaggcacaggactatgtgttgtgggagaccaagctgaaaaagacatggtctttggcacaaagaccctactgtctaatggtaagtttgaaaacaagaggtttttgaaggtgtgatgtgtgggaaatgcccaggctgagatttctagtacaattaatattctcaaaggtagtttcatccaattctctgataaaagagccatggtaacaatgaaaaacataaaaataattaccttaagtactcaagaaatcaagcaacaggtaatcatttgagaagcctaagataaattttgactaaatataaaataccgtgtggcatgaacgaaagagtcctattaggccagaagaaaggaagacccctggagtttaagagtggtagagaataagaacaatttgctgtggttcatttcatgtaatatgagttaaaattgaaatcccaaactttgttaaatacaacactgctctaatgccagactttgggaaagtcatggctctataagcatcatgcatacaaaatgtaatttttcctgctcagaatcaggtagtgaagacaagaaaatctcactttagttcagcagaggcacacttctagatgttatacattgggctaatcactgcaccaactcccaggtgtggctcttcatcaaaattccctgggaaaacccaactatctgcctactgtacatctgcaccagaacagctgaatactgctggagaacactacagtgctgactggtttgctcattatacctatgactgcaatcttaaatggcctctcaacactgctatccatctgtttaccttttcttaatagatttgctatttttaaattctctttcattaattcattaatctttttttaaattgttgttgttgagacagagtcttccaggctggaataaagtggtgcaatcagtgcactgcagctttaacctcctggtctcaagtgatcctcctgcttcagcctcctgaatagctggtactaccagcatgtgctaccatggccaacttttttttttttaaccatttttagagatgagggtctcattatgttgcttaagctaatnnnnnnnnnnnnnnnnnnnnnnnnnnnnnnnnnnnnnnnnnnnnnnnnnnnnnnnnnnnnnnnnnnnnnnnnnnnnnnnnnnnnnnnnnnnnnnnnnnnnnnnnnnnnnnnnnnnnnnnnnnnnnnnnnnnnnnnnnnnnnnnnnnnnnnnnnnnnnnnnnnnnnnnnnnnnnnnnnnnnnnnnnnnnnnnnnnnnnnnnnnnnnnnnnnnnnnnnnnnnnnnnnnnnnnnnnnnnnnnnnnnnnnnnnnnnnnnnnnnnnnnnnnnnnnnnnnnnnnnnnnnnnnnnnnnnnnnnnnnnnnnnnnnnnnnnnnnnnnnnnnnnnnnnnnnnnnnnnnnnnnnnnnnnnnnnnnnnnnnnnnnnnnnnnnnnnnnnnnnnnnnnnnnnnggctagcttgcaggatatttgacatagtttcctttcttaaaatgcttttaatttttctctttcttggtctcctcttctataaaaggagttaagtacttatgtttacctatatcatgtggctgttgtgaggatggaggagttaatactaacacataaacagtattaaatgtgcctagcacatgatatttctcaaaaaatgaaagctgttactgtttttaaaataggtactctcctgttccctctcctattttgatatttcagtgactgtttcagttttgatttctggctgtgcctctgctgcctgacctataaatggagcagggctcagggctgggccctcttctcttgtctgtcttaatttcctccctgtataatctcacagagcctcatgtttttgattattatatgtacattaacatcccagatttatatctctacctctcatctatctctcgagttcccaacttaactacttgtcatctcttttttaagtstaataaggatttcaaatttaaaataccataacagaatccataatttcccccaagatttttccacgttgtaaatgataccaatatttttccagttacttaaacatctcaactgctgtatttttctcagtcttcacatacaatcaaataattaagtcctattggttttacccctataagttttcctaaaacacttcatctcttgccacctccagccatgctcatctcttgcctggcctactgcacaaagctcctggaggatcttccaccttccatccttggctttctaatattaagtttctactcaacaaccaaagccctcttcaaaaaccgtaaaacctgtcgtttcacttctctctcaaaaagcttgggttttctaagcatcccaccaaggcctacgggtgtctacctgttcttgccactgtctgtattttcaatctgatattctaccacatttgtctttactcactaaacttcagccttactgcaccttttttctttctcaaatatgctaagccagtttcctttgagaggyctttgcagtgcatgttcacttttcctggaatactttttcttcagtttttcatgtggatgccctttcttctccttcaggcctctgtctaaatgccttttgttcagagaggcctttcctgatcaaccaatttaaattggtcttctccagtggtttatgatcggatcaccctttcttaataactctcactattatctaaaatcatgttacttatgtatttctttctttacttgttttgtgtttacttctctcaatgagaaggcaatctccacgaaggcagagatctttgaatgctgagtcctcagtgaccagagcaatgcctggcacatggtacttggtaagtaaatattgttgaataagtaaatgtttaagaaggcatattcccaataaagtgtgagagcaagccagggcaattcatatatcctctctgtcggtaaaactgaattttatagatatcctttccttaaatataagttaacaatataaaagcatgacaatttctgccatcccctacattttgtcaacatggacttgaatactataaaatatttgggttataaggaatatggaatatcatatgaaagtttctaagaaaggtttgttaaaaacagtaacttattttctcaatttatctccggttgctatgactagttggtcaattgtcttattttcttcactcctgaattgtttataataatctctgcttacctgcaagtataagctgcaaaaataagatatgtctctacgttaaaatttgccaatatattactatcattaatattacaagtggcataggtattacttgcagaattagagattagtacagaaaaagccaaagtctctcttctcatgattactgccatgtgttattcatgcatttattcatttcttcaacagatacatacagaatatctaatgtgtgccaggaaatatacctgaagatatgcagtgaactaaatatataccatgcycacycttttctgaatatcatactaaagtaaattattagtatgatcgacctatcagaaatatcataattttgagtcggcattatatatgacagccttggaatatrtgatttcttttctttttcttggaaggattgagttggtgatttagtatatgaatttaaattttccatcctggtcatagtcaatgtattctccaaaacatagagattatctttaagttgggaaatttgcaataaaaacattattcaggtcctagaaagcaaagtataattaatgagtgttcaaaaaaagaataaaaatgcttaatcaaaatggttccaattatattacattttatcttgaaaaaaaagatactacaaagcacattcagggaaaatatttaatacccaaagtgatatttgatagcacattatgaagaaaaagtctacattgaagagaatgtattcattatttattttattatgaatgtttccttcctgctctctttcagtttggaagtatgccaattcagatgaacatcaacttactctaagcaataaaagtagattattagattgggtttttcagataaaattatacatgttgcatgaaagtttgctttttaaaggaattctaccataaaactatatgaagcaaattatttcattatttcttgtgggaataaatacaatgaatgaaaagtatatattaaaattatttaagctaattaaacatgtaaactcaattatcagattctccatcttggggctgataataatagttacaaatgatatgaacagtttcaactgctaatggtgttataatcctcccaactggtgagttatcttagagtgaaagaggacaacttgtacttattttccaataaaaatggcagagaaattacatgcatgtatatttctgataaatatatatataaattataaaattactctcacactggcaatgcctattaattagatctattgggagttttgaaatgataaagtaacttctctattaatatacatttgggttatttttatgtatttttaagatattgctgcatatggaaactcattatttaaacattgaggaattagatagactattttactaaaattatcgtttcctgattatgctgagaaatacaataatttttctggcagaggtcaaatggccaaaagctggatggctgatgttctgatgaacagatctttgatgacatctagtggtgaaatgtagatttatttattcactgttctcaaagttttaagatgtcaatgttgtatatatcttgagagacattgagataagttggagattgaataaaatggagaaatttggtaatttttgtcttcagcaaagataccttaaaatggttaagaacaaaggggtaggcagaaaagagataaacaacctttagtaaacatttttacattttaattctgagaaatttgtgtagagaataaaatttaaaactgtagcttataatataaatatatttcttcgtgcaattatgtttagctgatgtgaatatgctccatttatgtgtataagcaccacacttgttctgattaggtgaatttcagtaatatatggacttttaagaaaatttaaaagaaagccaaaagacaacctgtgtatatattttccatttatgataatctatcattatttatatttttaaatgactgaatagacatgtccttatacttagtagcagcaaattttgttgacctaggcttattttatatgtgttttaagcaaaataacatcacaagcaatgaattctaatttttgctaggttttcaggagcaaaattatttatacttttaacaaatcaactcagacctttaatcagcatgtttcagcagcacaaacatgctggagactgtcaaattttgtcttcagacatatatatactagcagaaattggggcaaattatttgatatcattaagcctgaaacttattttcagaatgaatatattrgattaaaccccagtctctctttgaatccaaacattctttgatttttatatgatcatctatatgctttatttactctttggaacaaagttctaccaaggagtwgggggaaagtgtcacaattatatttctaagactctgtttacaaattacaagtgaaattggaattttgttaattatccagttaatttaattagtgtttaaattcagactcaatttgtcatagcctaatttacctacattattgtgtctatattgactaaattaaatgtttagcctgcactttgctatgttgacttagcctgtaaactgacagagaaataagagagtacataacaatgtaaactagtatagtttctcaggggaaatatgttttctttacactagataagctccgttgtgttaatcacactgcaaatgagcaataaaatatttgacatacatgatcaaaatgttatagtcagttatttttattaattcaaaaaatatttactgagtaccgattatgtgctcagcaaaaaattttatattgataaaatttgttttgtggtatcttttccctagcagtctccagcacgtttgtgccactgaaacatgctgactaaagatctgagttgatttgttaaaagtatagataattttgctcctgcaaacctagcaaagatcagacttcattgtttgtgatgttattttgcttaaaacacatataaaatmagcctaggttaacaaaatttgctgctagtaattataaggacatgtctattcagtcatttaaaaatataaataatgatagattatcataaatggaaaatatatacacaagttttctcttgaatttcatttaaatattcttatatatttccaaatatatttccatatattactatgtgtatatatttactatatattactatatatgttaccatatattactatatgtaatatattttcatatattactgaaattcacctaatcagaacaagtgtggtgcttatacacagaaatggagcataatcacatcagctaaacataattgttgactgttttgaaaacatgctttcaggaatatctttgtgtttgttaattctgcaatattcacattgttttattaagatagagtcctgaactgaaattgaattgatgaaagtataagagtactttatagctttcggtaggcattgccaaactgctttccaaaaagacttaatagtttacaatatcactagtacttgtttttctaccatgcatcattattacgaagtaaacttgttttttcttgttttgcttgttkgctaagtgaagtctgtatctcattttgatttgaattttcatttctttaatagaaaaagatatctgtctgtactttctgttgctatttaaaatttgtcttcagaatgtatataaactttgaaaattttggcagatatatctcctactgtattatttgccttttactgtttttgcatggtagtttaatttttttcttatctgtcttttcttttatgagttctccccttgttttcaaatgtacaaaggcacctctgtctcttccaggatattgaaaatatttgggtctagtttcttttagttgtatgctatttcatttttaaagctttaccttttaatccacttacatttacttgtgtttgatgtaaaatatttacctgaattaatttgctcccaaattttaaataattgtcccagtactgcttattatataatgctttcttcactctatcatggtgatattttctttgtcacataaagttttatgttcagcaggacccttatcttgtttagggcgacatttttcttcttgcttaggttttacacttttgcatgctttccccatcctgactttgatgaatattagttgaatgaatggctataatttttaatatgttttatcacctgataaactaattgacattcaaacctcctgtcatcaagtttaggtatctgctttttttacattttacttattccttttctcatttcaatgtaattgtgttcaaatctctcctaaatatgtttgatctcagatgtaccatgcaaggacttctgaaaatccagcttcacttttacaatgtagcactttttccaagtgcatattttgtgaggcttttaacatttatcaattagcaactagacactgactcagaaacaaaaacaacaaaaaaagtgttcaatgaaatggcctgaacagatggccgatctaagacaggaagtcttcttttttctgtttagtccactgatcctttttattctgcagtggaataaggatgatttcaaagttactcttatgctgttctatggattattctgggctgtttatggatgaatacaaggtaaccattcagtggagcaatgttgctgttggcttaaaacgtaaaagaacaatgcaaggacaactgaccttggtaccctagtattctatcttgaacatatatttgatattcgcagcctcagtctgaagtatacatttgaaaagtaagacagaaaagacatgtgaatataaactcggttataaatactctttatatcattaaacatagactatttggaaacattcccaggatataagcagtgatttatttgtttggggaggtaggcatggaaattcctccccttctcactaaacaatctcattcgaattcttcatgttcggtaaattctaagcactggggaatacattttccttcctataactcaatgtggtttgcattagtccttaataaatatattatgatatgctatatacgtctgtttgcagctttagaaatcattgtgtaacttcctgccaaccacctccaaaatgtacaaataggctattgcatacaaggtgagtaactgtgtatcttttaaaattgattattatccttttaaaaaaattaatcatcctcacttgtacaccaacctagagagagtactgacctcttgtaagcagttttgaaggttattcaaagtggtagtgacattttcaagtcgtttttcaaatgcattcatttttgaaccagcgggactttgtagctgctgaaagagagtatcacaaagtcatatacaccaggcagcaacaatgatataattaattgagttgtaggtaaaattatgtaaaacagcttgacttttgagttcatcagtaaggtgtccagttcatttttttttttttttggcaaggtaaagctggcagtgatattttagtggtacaatactgacatccaatggagagacaaattaaatcttatttcctttgaagagctaaaaaagagttattatttatgctgtttctaagacatctttcacattgaagaattcattcaattttaagacatgtaaatttgtatctctgtatcatcccttcaaaacagtattataattttcaacatagttgtataaatatgccaaaaattttcagttgtaatctttttgttgtagttgcttgtttggttgcaggtttctccctgcaagaaaatatttgtttcttaattcatcaggatataatcactaagtaaataaatatcatttgcttatacataactatatttaggaccttaaaatgaacataaaagatatgttgttcatagtaaagataaccagttattgcagatatttccccataatattttagagtttagctgagtcaacgtttggttgattttctaatattgcataattagatgtattttaacaattaaaagaatcttaaagagctattagtgctggtatagtaaatcatagccagtgtaaatgaatgtttgtaaaaagtcattaatgtcagtggaaattagaacctcgggcctgtagtttttctgtcagcagaagacagtgtgtattctgccgaggaatattgactgcattcttattcaaaacccaaataagtttgataatttagactaagccatattgaaaaaatttgaaaagggaccgggatagacacctttgtgtgtgtatgtatgtgtgtgcacacgtgtgtgtgttttcctactcagcacacctcctcattcttttgacaatgaagcacctccttattggggggttctatgtagtttgggtgggttaaattctttcctccagtgacagggatttgcatgtgacccatgactggttagtctgagtaattcatctcctgcccacagtgacaagtgcagggatcagaacacaaaccaagcaggagctattttttcagattctgctaggattgctaaaattataggacaggagctttagactcaatggctctggttccctggatccagctgcacctgatctggctttattaggtgcatgagttaatccattcatttgtgtacttaagttagtttaagataggcttatgattgttgttgttgttattattattatgattgttgtttataagggaaagaaccttgagcaatgcagtgaacacaatactggtgactggcatgaaaattttgaaataaattataatataattctctgcaacaatagatttatgctaccagaacatatcactatttcacacagtcattgcactaagaggttaaatcaagtgaaacttctctattaaccatgaagggaaaaaatggttttaataaaaatagttttattaaaaagtttaaaaatcactaaaaaatagaaagcactaaactattgatagggtggaataaatcaataattttcttactaataaattcagtgatctggaacaaatcactttcttacatttttaatttccttatatgtttgatgcaggagttaaactccataacataaatctagctcatactgaatacctgactattatgacggcagaaagactatatcttccaatgtcagatagtctccaacacaaagcgaatcaggaaaaatacaaaaacaaaaacaaacaaaaaagaaatcactaacaaacataaaactggaaacaaaatgtatgtacgaggctttaatacccttaggaaatctgtttacacttttgttttctttttacaaaaacacctacaccaaagagtttactcatttgttcttagttttgccttttgcttttcaaacaatgtttggggttttgtgaagtttaggaatataaatttgtctttttttccctaaaatataagaaaatcttgcatacactggaatgtggataatcagattaactgcagttttttcatgtattcagcaacttaattaatcaacacatagttattgaataacaacggtgtgctaaacacttggcaagaatattcttctattattttgaaaaacaaaaaatattgacactgacctatttgagacagaacagatgaaggggtttgggtggttttaagcataattttaattagcacatttttttcaaagtcttgggtctctctgtatacagatttgaattgagaaagacagggatggggcacagaaaatactaacaaggacaagtgctttcaggtcatatttgagatttactgctactcttcggtgaagaccactgaaaactaggaacttgaggtagattcccttctttcaccactatagagagtcaataacctaaactcattttatctgttcaatatcccggaaactaggaaatttttgtttagtatttgcttttgacgaacacttggcagctgaaaaacttccaaccagattggtaaactctggagaaagataaaaactggaagcaatcattcagggtctgattaaatgtaaaaatgtacatgtttactatgtaatttagttacaaatagttttgtaggaaaaaacccaaacttagtggctatatctagttaggaagacagataaggattcgtgtcatccaaacacgaacttggtgagtaagctgttgaagctcagatacaaattcacacaggagtgatttaattttctcagtataatataccaattgccagattcttggctgcactctgattgttagttacatagtagctgagtagaaacaataagattgagccaagtagcatttcatatgtgcggcgtgggggaggtgctggtggtggtggtggtgttctttctttaatgactatttaaggatgtttcataactgtgttgcttttatcactatttctcttatttggtataactctgaatgtaaatcgtcctagttttttaaaaggtagctctttatttcacacaagttatggatccattaagatttcaatgtaaaatatatgctattttcttgcttagtaaacctctggatatctcaggccaacattttgtaggaacgataggctgtgtgtatgtattgctattccaggactaacctctgttacattttatatcactttatcgccaaacatttccatagtaatccaagactatagccttcactgatgttttttcagcctttaaatctgtggataaagattattaaggattatatctcactgattagtatcaactgatttacaatgtataaagatttacattgtaatacagaactactaaggaaatcaaagtcaattggaatagcctattaatgccttccagaggaaagaaaatagagatgtgtcctggtcagtctctttctctcttcccctctttttgacacactctacaaatattttacatctttaagtgaatatccccagatagagataattgaaagataagcattttcttgtatgaaaatgaattagtttattaccaggacagaatagggggtcttaagagaaagtagctcctactacctgttccctggcagaaagaggagctacaattaaaatattccaaaatgaaaattatcatatcaggcaagatttttatttaacttttagcaggcagcagttactacctggaggttcatcttgtactattcatggcttattgggcatttttatatgatttaagttgcagtcatgcttcatagcttggaattgtgaaggcttgtttgctcacttgttgctatgtaagagcacacttggaattgctgcttgataataactttattcttatcaataggtattacctggctcaccttaaaggtgagcagccctcacctagtcagctacatatccttttccggactcttaatttttacaagaggatggcagcctactcccagcaaaactgcctgttgaagcatacagcactgcgctcaactcccacagtaaaagtgactatatgaaggtccttcctaagaatatactcttgaccttgttatctgtcaatagcttccaaaaacttggctgagataaacagtagttatagaagactgcataaagattgtatcatccattctttcaactaaatctatatttttcaaacatcttttaaagtagcagaacctttttatcaaatgggacttttcacacagtccagtaaataaaatggatttaaagaagagtttaccccagggactcctgttgaaccatgttgtctttagtgggacccccagctgtgcaatgaacaatctgaaaaccattgctataattgaggttgcaagcccaaaggcctttaggggcccactcaagtaaaggtagattagtctgtatttctatacatatacatatttctatacatatacaaatacatgtacatatacatatacacacaaaatatatatcaagagcatgaataattcccaagggcatttatcaaatgtgatttgtttgtttgtaaaacactgtgctggccacacaaggcacatgtgcccttctcattttatcctttgggccctagtttccacacccagatactctaaagtctatcttaatagccacattatcagaaaattatgccctgaaactgtattatattatatataaatgtaacacatcatttattttgcttgattgcatttggcatattgccatgagcatgactgactctataggaaagagcatcatgtgtttattattaggacatttagaacagtgtttctcaaaaactgataaatgtacctttgtattagaatcctctggaatgcacatttcttggccttatctcaaacttaccaaagcataatttctggtagtgaagcctggaattctatacataaaattatttgattaatgcagaggaaatttaaatacatataactaagtgaaagaagccaatctgaaaggctacataatgtatgatttcaactacatgaccttctggaaaaagtaaaatggacattctgttccattttattgtgagcctaaaactgctctaaaaaagtttattaatgcaaaaaggtagataattattatgaacaatgaagtttgaatatcactggtccaaaggatcttttctatttattaacctgtgtcctcagaatcaatagaaactgttctctgagctcatcttggaaacagtgttaattaggcttttactaaacattttttcttaactttcagaatgctgtgaattttgtaactagtagtgctttcttctttgtgtggtttgctcataaacttagaatcaaatttatggagtttatttcacaagtatataccacttcaaggccttaaattatcttgccaaactcactattggctctactttatttttctattactaaattttcttcatttatttttcttcaattattttaatttgccttatcttgacagaatatatttttgcttctgtgtaagatattttaaacactgtcacattggacaataacttaatttttctgaggtaatattctcatttttaaaagggaaatattacccaacaaataagtttgttggataattcaacgtgatagtgcatataaaatacttaccagagtgcctggcacataataagcactcaataactgctacttagtaatttttttaacaacaggaataatatatgccaatataagtgttaatgtaaatcatcagtgatatttcagacattgatagctttttcactttataatttcatttttatttgcttaattattgtgaaataaattacatacatcattacattttatctctaagtacttctaatgtgcatctgtacaaaaataacacatacatctaaaataatattatcacatctgaaaataataatttcttg

SEQ ID NO: 97606 - DNA, 13810 bp, Homo sapiens
aaagtggaattttatacatcaaaaaggtatcctctcattttacaagatacatatggagacaaaagaaaagataccttttaaagtacagtgcctatgaagtaacatgctaggagctttgcgtatattctccttatgctgtctctacatgcaatcccaaagagtagattacaaaatcatcttttcacagctgaaaaaatttaggcttagagaggttaagaaacttgttcatggttaaaaaagctcaacatatctgatcattagagaaatgcaaatcggaaccacaatgagataccttctcacaccagtcagaatggtgattattaaaaaatcaagaaataatagatgctggcaagattgcagagaaataggaatgcttttccactgttggtgggaatgtaaattagttcaatcattgtggaagacagtgtggcgattcttcaaagatctagaaccagaaataccattggacctagcaatcccattactgggtatataaccaaaggaatataaatcattctattacaaaaacacatgcacatgtatgttcattgcagtgctattcacaatagcaaagacatggaatcaacctaaatgcccatcaatgataaggtggatatagaaaatgtggtacatatacaccatggaatactatgcagccataaaaaggaatgagatcatgtcctttgcagggacatggatggagctaaaagccattatcctcagcaaactaatgcaggaacagaacgccaaatactgcatgttctcacttataagtcggagctgaacaatgagaacatatggacacagggaggggaacaatacacactggggcctgttggggagggactgagggaagggagagcattaggaaaaatagctaatgcattctgggcttaatacctagatgatgggttgataggtgcagcaaaccaccatggcacatgtttacctatgttacaaacctgcacatgtatcccagaacatgaaattaaaattaaaattaaaaaagaaacttgttcatgtttatactgtttttctccaacaggtcattaattcatttgacaatatttattgagctcctactatgttccagatactatttcaaacacgaaggacaaatcagcaagattaatacaagaccaatttatccctaatcctgtcctcagtcttctaggatttgtagattagtgaagggggactggcattaatgaaaaattcccatttttttttaaaaaaaaggaaattgtaaaattagtgagcttcataaacagaattgctagatttggcaaataaaaatataggacactcaaatacttttaagttttcaataaacaacaaataatgtaagtatgtctgctatggtctgaaagctggtgtccctctcaaattcatatgttggaacttactccccagtgtgatagtattaagaggtgaggccttttggaaaataagtaagtcatgagggttccaccctcatgaatgggattagtgcccttatcaaagacgctgaagggaggtgccttgctccttccgtgtgaggacatctatgaggaataggccttgaccagacaccaaatcttctgggaacttgatcttggaatttccagcctccagaattgtgagcaataaatttccattgtttctaaattacccagtctaaaatatttttgttatagcagctggaagggactaggacaatgtcccatgcaatatttgagacatatttatacttaaaaatttttattgtttatctaaattcaaatttaactgagcatcttatattttctctaataactttatgaggaaaagcacactgtattaaaagtaacctcataacagaggcttagaggctggactgaaatctgaagagcataaggagttaatatattagaggtaagcgggggcaggttgcagaaggagactgatgattgaaggttgctggggatggaagtggtttggggctcatgtaaaatgaggctgcagaagtgagcagaggccagaccacctagggctctgaaggccatgcaaaggttttcagcctttattgcactcaactaacctgtcattacaatgttccttctgccaatgcccttcccttctttgctaccaaatatataactgtctccatggagtcattcccaaccacccatgtcactcactcctatggcttttaccaaagaagttagtcctctttacatttgtctcacaaaacagaatggtatttcactgagggcttccagcagatacttggtaaatattaaggaggaaaacatagcttagaaagtccatgcatgctgggttcttgctatcctatctagtactagttcaaatgcatctgcatatgtggttcccctaatgataacatccgactcacttggcagagcttgataaacagcacattctggacccaaacatggaaccattaatttagaatgtctagaatggggctcagaaattcccacttaaacaagctccccagaaaaatatgatatacacaactatttgagaatcgctggtctatttggctactctaggattctagggtttccaaacagtggaaaatgataagagaaagctctcttggtttcacttgtcataaatctcactgtactcttgacttgtaagagggtccaaggttgtcagaagactgaagcccatccctatagtgtccagtcttaatcatttgtattatatactatctatgggaaaagatgtagcaagcataacgcacattaggtgatcaacagaaaatattttaaatgtcacactaaattgatctgagtatcttctttatgttaagcaggaattatttttcaaatttgatccctaaaattgttttaattcatacatctaatggcataatacaaaatctaatggaccacttatctacaaaaacagagcctatagcttcatgtaaaattttaacatgagttaatttattttaaaaacacattttctatactacttataagcaaacttcaaacttaaaatataactcatcatatatttctctatttcctggaaagaaagaatactagaactagaaaggaccaaatcatccaatccatcctgtccatttatttcattttgttcaatacctctcaataggtaagccatcctcaagtgcaaatactactgctgtccctaattaggaggggttgtttgtaataaaataaaattgtgttttagtatcccattaagacatatttctagcaagaattaaaatcgtaacttcattcccattgttatttttagctgtctcaaataaagaaaaaacctccaaattcaaaccactgcaacattttacactggttgctcaactgtgcagagattgaaaaagcaaagcagagattgaaaacaatgtggcaatgttgcatcaaaactatatatgccaggggctgcctttcctgggtttacaaacagacttcattgaaatgatgagtttgtgtttaaatggagaatactatgtatgctgtgaaccacagtcaaacaggaacctcaccaacatggaaccaagaaatacgctggtgtattgaaggttttcccttgatatagctgcacagaaaaagaggcattttgctttcactactcacagaaatctaccgtcatctggagtaatatgaataacaacagtgggctggttaaggagccattttgacaaatcacatgcttttattcatacaatatgtcatcaagtttgcttaagaataagagataacactcctaattataggaaatgggttttctggtacttgtcgtcacgtgatatattgcacattatgatgcctttgccgtaatctcctggagactgggaactggatcctattatttgaagcatttccacacttaaggaatatgatagggttaataatgaataggagttttactacaagctgttaggccagtctgctgctcagatcagagaagctactttcactgtcattgggtcatgaaaaataaatctgatttctccactacatgaacaaaacactcagatgtgatccagagcttctttttttccttctccagacagtcagtagctaatggcatttgattacatattagactgttaggaaaagtctgctgtctgcatttgctcacattgagggccaaatttcattaaaaaaacaatgctgggaaaagtctctagaattttttaaaagaaaattctgtgtgtgtgtgtgtgtgtgtgtgtgtgtgtgtaggggctttgtttgctaatattttccattcatggaaaatttgtatttccaaagccaaagctctctgagattatctcttttgtcttcaaaacaaccctgtaaggtacataagagctagtataagctatttttcacaattctcagaggtggaagatgaacccaagagggtgagtaacctgcccaaggtgacataacacaatatttggggaaatggtgactagcatctgtgtctctgggttccttgataattgcttttcttcctccctcccttcctttctttcttttttcccaaccccgtcccctttcattcattttgcctacatactgcagatttgggctccttcagtaaagccagtagaaaaactttgtcactgggtttccagaaagtggtctttaaaaaaaagaataaaatggatcgtggatttgatttattattttccaccagagaatgcgttatcagtagtgttttttaacgcgtatttttatgccatgaaagaggaatgcggcatattgttttgtaagacattcttaaacctcacttagaggccaggcctcctgccaaaaatcctgcagaatggtggcgcaacgggttggcactacagaacctcacgaacctcaacacctaggcgttcacatgaaaacttcccacgagcacgaggcctttcggaacttgccatggaaaatgagtgaacgcctgagagattaatgccacattcttcagaattaaggataagaattaaacggaagctaccgcgctagcagtcagctaagtatgaagggattaggttcagcgggagaggagaccatcacggcatcccggtctcatctccttaaggctctcatgagccttaaaagacgcctcatctcctcggtcccccggggagcgcccggtagctgcggctccttcccggcactgcggcgcactgcggagccgcctgcccgccagcccaggccgtgcggggctttcctcgccgccccgcgccgccgcagtcctcccgcccccctctgccccgccgggtcgccgctctccgcgccaggcgcgccgcggggcatccatcaacccagagcttttgacgcacacacgcgcgctcccagacggagactccgtcgcctgcccccgcccgccacccccgcccgcccctcgcgggtctgcatttgcatcactcgcacacgtagaaggtgacgcgagcgcccccagctcaggccgtccaggcggcacctctagcccccgtggctcagcccctccccccgcccccgcgcgccgcctaaggtccccgcacgcccacagatctgctcccgattgttcatctgccgtggggtgctggctgccccaagccaagttcatccccgtattccgcagtccccgtgggcccagcccggggcgctccccgcgacgctctggagaaaagtcttcccagttctagaacccaggcggaaggggaaaagcccactaagagaaagggtcagagggtcggctgatggcttttgctgccctcatcgccatctaagattacctcggtagcttatttactgcgattggtccctctcccctctgagcttcacagcctcgggtctgcttcgcctggcctggcgcacagcaggcgcccaaaaggtttttgctgaatgaaggcgttgtaacgtaggaagtgcaggcgctgacaaagagcctcagccccgcgggctcccctgctctccagccctctcttgctctctcttagacgccagacaggcgcttcgggaatgtatgtgggagagtttgaaaattcatggtgtttctttcaggctctctcagcacttactgcggctacctctgctctcccgccacctgcacgtctgcagagggatccccgccgaaaagttgagcctaaggcagctatgaaggtataggtccaggtacccagcccggggctctaggctgctagatttgaatctgcctatccctgccggtcaaaccacacaagcaaaaaagagcgtggcggtcgctgcagatgcggcccctgcatccccgctgctgcccacccacctcctctgggaatcccagataaagtgcgacccagtccccagacctaccctagcgaaccctggggtcactgcatctattttacccctactttcctggtccctctccaacaaaggcgcctacaaagcagcgggcacctgcagccgcttccccgggggcaggcggggcaaagttgcgcttccgaaaggctgcaaaaacttccccaggctgcagcgcccggccaccagtcgggaagagaaatccagcagcgggggaaagtctccccgcggatgcccgcttcacctcccccactcaccgctccagccgtcggasacccttkccctgagtggtgtcagcactgcagccgcctcagtgcgggcgccgctccggctcgcttccccgggctgcctccgtctgccactctcgcctgcagcgcgcggagtggtgactcctctgagcgtgtcagcggcgagaggaggggcgggaaagtggcycccggcttgcacgctgcggtcctcctcctctcctccgcctgcctcctccccctggtgctgcagtgccgggcggcggcgtggcgagagtaccagcggtgcgcagggagtcacggcgcgcgggggaggcgggacccgcgcgccactcgcggtgctccggcaagtcgcggtgctgaggcgctgctgcggtgtgggactggggcagggggcggggaaggagagccacctccaagtggtaggtacttctggagaagtcagggctctgagtttgtagcaggtgaaggagaggggcggcagtccttaattagtcaccaactgtgactgtgcgttgcgcacttggcggcgccccgggtcaggtccagcgtgagacgcgagggagttctgactgctggaytctgttagcaccggacaaaaagagggtttgtattctatttccgggcctgggactgacttgttcacttcgacttggcttccagggagcaaccaggcagagctaggttgcctacttcccccagcccccaccccgacgctggaagacaagtccagaggaaacttgggcacagcaagagcaaacagaagaaaacttcgctgggttaagtctastgtctccccaatgctacatagggccagacagctgggctcacaggcagatattgaaagtggccccttagaggggaaacaaccaaatatgaggggggggtggagagagagatagagagagagagaggaggaggaggaagaaagaaagaaagaaagaaaaagagaaagaaagaaaggaggaggagggagaaagagagaggagagaagagagagagagagggagagagagagagaattttgcttgtgttgttagaaacaaacatttctccccttggcgtgcaggagagagaattttgcttgtgttgtcagaaacaaacatttctccccttggcgtgcaggagaccccaactcgagcttcactgttccaaagcggtgggccaggcggctggagagaaactcgctcccgtgaggccacacccaggcctggcgcacccaccccgcggcagcagtggagggcgtcgccctcccgggccttccgacgcagaccctgccatccggatgctgcgggaagtagggcatcctcacgtccctgactcctccggctccgcgcgctcacggaacccaagtggagtgggaagcggtcacacaggcgtgtgccgtccccgaaatcgttgctcctgtggtggtgacccaaagcgagacaaagcgccgcgccaatacgggctgcagtgattggaactcaaacacacacatctctccgcgaatgtgttccatccgtgtaaatatgcctgggtgattgaatggatggctgaatgaacgctgtgtggatagaaatataaatgttacatgtataatacaggcgccggggaaggagagctgtcaggcacccccaggctggagcctcctgcccagaggagccggtggagacaggcggttcgcccagggcggtgttgttagcttgggctttccagttcgatttgtgccactatgcaggatactgtgaagagaagaaaatggagacaactcttggcctctcattttccctcctctctggttcagacactctggaactaaaagttatgattctcatgtgctgttgaacctacacttccttgctggtctgtcttgttccggtgagaggctttgcagtctgtgaccatggtgctatgagatggtcaggcaatatgaaaattagtgaacgtgctcattttcatttcgtggattcttcttagtaaaataattatttaaatagttaaataatttaaatagttaaataatttaaataattatttaggctaaaattaatgtgctgctactatgacaaggaagtgcctatgaatccagcattggaaatacaattgtgaaattaaaaaataaatcctatctggattccccgcatgttatttataaaaatttgagcttccaactgcaaaatgtgctggcaattcactgagttctcaaacggttacctttttgagaacctcccctaaactgttgcagaataatggattgtttctccaagtgatggaagttcagaaaaccatgaaacaaactttaaacgtgatcaacgttctttatgctatgctgtatcttccttaaattattctcctatcttgtccgtggaagatatttttttaaagtgggttgatttttctacttctggattttcgtgtcttgatgcatttgaaggtaacagctcctttaggaaaatccctgattgtgattttgcctgaaacatcccatttaagaccaggttgcactggaaaaggctattttaacgttgtgtctttggaggacatgaaacattgtgtcatgatgatgttgtgccctggttcctggacttgccctctaaagcagttctggttctagggtcctgcctggcacacaccttggccccaggccccttggatccagcactcagactagttttattcatgccttcattataatgaaatgttttctctcttctgaaaacacttgtcttgtagaagcggatggagtgaaaaggggtataccctccatccccacagaatcccagtactctaaagtcattgctctcctacacctcaggacttttgttcctcaatgcagggtgtcgtcttgtgatgctaaaaaacaagctgtgaaagacacctaatgagcatgagaggtctgttttcgcatcagcaaagtggttttcataaaaataattcacactaagtacagatgctatagtggttatattttataatatacacaagaagcacagtgcctagtacacaatgggtatagaataaatgtcagttgctcttcctcttttagtagtcagggcaaggttttccaaagcctgcgctttggagaactggttttgtaagatgctctggaaagtcagagttacacctggcttccacagcagatgtctgaagacagccccatactcttggaccaagtccacacagctctccacttctcctcactatcatcaggagtctatagcaaagtgcagacacctactcttcttaccccaacactcagcttccacaacactcaaaactattttttgtctcttttgtaattttaatcgaagtattactattcattttttttaaactctgtcttataagcaccacattttaatatctaagtcaatattgggtgaaagaaacaccaccaagaacttccctccagaacaaaacaatgatgttcattcctccaaacatccaaattgaaagtctatcacaaccaaaacaaaaaaacaaagcccacggagaaataaaaagtaacaaaaatcacattctagggtgttagtgcatttggcagtctttgctgtgctgttgaaccatccttcagctggctttcaaaaaaaaaaacaccctaagctcatcaaaatatacatttgccatttgctttttaaaattaaaaataataattaaaaagaaaacttcaaggaattcacaatcaattgcctgacttgtttcaatgtcatgtacagcatatggaagtgaaaaaggccatttgcagcacctgtgattaagggatattcatcttcagggtttagctttcttccagacagcgtaaaatacccacaattcgaagtttgaagggacatagacgatctcctttgagaattccacaaggcaatacaggcacccaagctgttcttcatagagtggcagggcttctgtcagattgacacagtttgcctgtgtaaaatatttcccatcctgtttcaatacattcattcatgggtcaaaaatcagtctgagaaactcccacatggaatcttgttccagagatgtggagattggaacagctgtcaaatcgttagtcacacaatccaattctctcccttctttggtgtgcctcttcagtattggaatgcagtcttctatcagagcctgatagcagcctcctttaagattgtctacaacatcaccacatgttttttgcatatatttcttacatccatcaatcaccatttggtcaatctctaccatagtgaccatctttgattttagtttgactatttctcataatatgcccccatctcagcctctgagaagcagtacctctttgccagtgaaatctgctttgctgctgcccgtgatggcccaggtatatgccaaatcactctgccgaatcaacatccctactaaggatgagaatatttccaaattgcttctagtgtagaattgtaatgttccaataaggtgaatcttcattgtacaccacttcatctatgtcatattcaaccaggcgcccatcggtggtggaccaatgtctgttgatggcccctcttcaaactacaggtggtaatcgcttcaccagcccagtactgtcttgactcaattctttcattcttttttctacattgtttgaaaggctgtcgatctcttctttgccctgcaagtcatcattgtaactctgaaggtccagcaacaccaatccatgtaggtaaattctcaaattggcaaagatgctgtttttgtgtttctgtctgtaggttgctaactagccattaacctgccaggtgtgcagactctgccatcccctgctcctggaaaatggactggaggccttttagaatggtcttgccatcagctttggcaccgagcatgaagttgatcttgctgtgccatgctgctgtgacagtgaggcgaggccctccctgtgccatgcctccggtaggtggctgtgggagccagggggtaggggcatgcccgtgtcaggctgtggcccgcgggagtcaaaacagtatgttttgagtctaccaatgttcgtcttgttaagcccttaatgcctgcttgtatcagtgaacacaagaagccccaaaatctcaagtgcttttctcatctcttacattctaatactcataaggctcagcacatccagtattctgtccctttctcactatccagctcctgaaaccctctgactatgcctcctggacttcaaagtccactgttagcaaaatgcccaatatcctcaacctcatctccaagtattctcttcacctttctattctcatggaagtatggcttgccctcctaagaggctgctctcccacaaccctctcaagtgatggctgacttttccctccaatgcttgcatcacttgtgtctggagataggaaggtgatgtccttgttctgcattgctacttccagaacattcttcatccctcctccctgaaacctactgctataaatctcctttcatcaggttatttcacccactactcttagatgtggctagcatgctcagacctccaggtgactctacaactttcctgattgactcctaagttgatgtcacttcctgaacactaatcctgccttaatccttggcaatttagtatacacacaggtattcattccaaccagtacaatccttggacctgggcaaacaaggggttggtctccatgctccatatattaaacaactctaaagtttaagaggccacctctctggtggccaggttctattggtggggtcctttaagcctacacccagatccacatggaccctatccctgtttctccccttcagtgtgctcttcagctttcctctgactccaaaactcattgtagtcttgaccaaatgccccaaggagctgcagagctcccacttatgaagtcagccatggacatgtggacaggtcctggttctaggaaggcagtttggcaagtggattgctcttgtggctggtgcccccatttcctttccaaaattgtggaagatcagcaaccagaaccagaagggtgctgccacactgagtttgggtaactcacattgtttccatagacacccctgtctcctaccttcctactcgccctcttattttatgtttttaaaaattagtttgtttgaatcaagatccaaataaggtctaccatacattgcaattggttgatatgtctcttaaatctctatttatctattggttcatccttcctttcttttcccttcagaatttactatggatgaagaaaccatatgtcctgtagagctctccacagtctggattttactgatttcgttcccgttatgctatttaacatgctctgctgctccctgtatttcctgcaatccagaaaatagatcgagaggcttatcagaggcaggttttgtttttttttaaatgaaactactacatatgtgtcgtttaattaggaggcatatactaattgtcacttttgtgatgttagcagttgttgatgattattgctacttatccactatttcatttgggttttgctaaatggtaaaattctaatgaatacttcttaaacagccatcctcctatccttttacgagatgtttgatagtaatatgatggggtaggttttcgttgcctttttaacgtgagggggatacaagacaaaacctaggacctgcccaagttattgaatctaatagtgaggcacagcccaccctccattacaagcaacctgaaggtttacactttcagtgtaagggaaaccagagatcaatgctccctacctctaccaatataggggactgctgaaaatgttgccttgatgcttagtaaagcaagagaatgtggctatgcagtagaggtagaatatgcttacctgagaaatttcaactgaatacaagtcatagagctctctagcaccaaattctcaacaaactatgaattcagtttaatattgggttggtaatttcccagatccctgatagaaagaaatgcaaatcctatgtggaggagccctccctcatcctggacttcaaaaaaaaatcacataaataaatgaaagttagaaaataatgaagcacataaaataacaacacacaaggaagcatgataacatgaagtagcaccagcagatataacaaaagaaacttcaatcttttcctgaagaaagacttctttagttaaacttcaatagttagaactattggtcataattttcactgtacttgaagaaaaatatgtgcaggcaataggaaactataaggaataaccaatcatatttaaaaaggcaccagatcaatcttctatccaactctgctggttgccctaccaacatccagtccagcttccatacacatatgatactttatgcttacctcaga

SEQ ID NO: 97607 - DNA, 19577 bp, Homo sapiens
ttgttattccatgaaagagtcacacatagaaatgaggggagttggccaggtgtagtggttcacgtctgtaatgccagcactttgggagccaatgtgggaggatctcttgaggccaagagtttgagaccagcctgggcaacatagcaagacccagtccctacaaaaaaattttaaaattagtcaggtgtggtggcacatgcctgtagccccagctacccgggaggttgaggcgagaggatcacttgagctcagtgagctatgatcgcaccactgtactccgggctaggcaacagaaggaggccttatctccatttaaataaaagaaaaagaaaaagaaagaaaaataaaggagcagagtggagacaggtaagaggcttcaatgaaaacacaccctatattgggctccatcccaggccctcctacctccaaacactctactccgcctccacattcacctctaaaacacaaaccctgcacttctagagacatcaagggccagcaaattttctgtaaagggccagatcacaattaccttaggctttgctggccatatggtatctgttgttactcaaatctgcaattgtaacagaacacagcaataaatagggggaaaaaataagtgcagctgtgttccaataaatcttcagagctgaaatgtgaatttcattaattttcatatacaacaaaatataattcttcatttgattttcttttcaaccacctgaaaatgtaaaactattcttaactcttgggctgtacaaaaacaggtggcagaccagattcagctcacaaaggatccctgtcctgcagcagagagggatggactttaggattggaaatcagacagatcaggtttgaatcccagctctgccagagtggctttctcactccgatgccgggcagaggttcccaacaaaagaggttgtttgttgatgattaacagggtcagtgtaagaattaaatgaaatggaagatgctaaagctcctggcacaggggatgttcagtccttactcagggtctcttggtctgaagtccccagagataattatctctaccttaagctgtaaacacagcatctattcatcaacatttgttatattattaattaacttgttatcccatgggggatactgaaacaatgaaaagtctccatcatcctagccctccctaagatggcaggaagaagctcggaggggaaagaccaagagccagaggtaaatcagctctccagattctgccaagaccaaggtaaaccaaagtgccaccaccaggagaaagcacagccttcaccctctaacacatgacgctaacaggatctactgccttaaagatattgggggcattaagagtctatgggaactctggtactgggaacacagtgcctggcccttggcagaagtgctgcctctgtcaccaccatgcatctctgaagacctgggaaagcgccctcatcagtgtccccaagcactgagcagatgggtggcaggaagggagtggtgtgactgaattcttcagaagcatattcctgtaccagattctgagcaacaagaaaaccttggtaaatgtacactatttgggtgatggttacactaaaagcccagacttcaccactacacaacatatccatgtaactaaactgtacttttgcccccttcatctataaaaattagatagtttttttttaaagaaaatcctgaaagcctttttctggtcccaggggaactcttgcccaggctgctgtgctgctgctgctaactaagctcccagaacgctgccgctggcagtgtctccaccgggaaattgctgaggcctgctgagcggctgaggtcaagggtctttggccatgtatcagctctgctccgacttgccgcctcctggaaattgacacctgactatgcaaagtagttgaaatagtctttgcagagcaaagaagccgtcagcgtttttccgtgctgagccttcaaactgtcagatccaatggggctaaaagaacaggggtgggtagtaatagtaacattaatagacagcatttaaacagtttttaccaggcgtcaggtaatttatgtgcaacgacaccaattatctcatctaatcgtcccaactctcactgtcagaatctccgttgtacaaatggggaaaccgaggtcctacggcgttaggtaatcaatacgcggtctcatgactagtaaccgggactgggctgtctcattctagagccttccttctacactctctctccgtcctctcacccctgctcccgttcctcccctttggaattctctcccgagtcacgccggactttttgggtctggcggaggcccacggagcacctccttgcacagcaaaggcccagcgccctgggactggcgtgcgcacgcactcggaaacaggaatagacgcgtagacctgtgcgcgcacgtgcaagcaacacgagtcagggggtgcacaggggcccccaccttcctctagactgccccccgccgggttccacacgaaagcccccggccacccccgcggagacccagcagccccagcccgcagcattacccagttgcgggcccgaaaagcctgcacgcatcgagaacccagagcgcccctgccgccgtacaccagcacccggcgcgcctcgcctgcagccgccgccgccgccatcctgctcctgccagcccggctcccgcagctccgaatgcctcgagccggagcgccgcgccccgccccggccggccaaccccgccaagagggaacgcgcggcggccgcgccccgctccgcgcccgctgctgccgcctagcgcgctgccacgctcggggcgccccgccacccggagggactgtaacttcggccaggccctgcccctgggacggggacatcggcgaagcccctcctcccacccgccagcaagtgctgggcctcggggcgtgcagcgagccgggctaagggcgaggagggtggagagcgggtgttttacgagcattaatttgtgaagtgtaagcatgtaaaatatagtatagtacaattttcgaccactgttttggcaattttttatttttaattgtgcatcaaaatagagatttaagtattcccacctgccaaaaaaacagaagaggtcgctacgctcaaggagctgaaagtccactgccgagacgagacaaaccacactaggtcttatttcttctatctaaccgtaaatttatacccattaatccaaatggcccttttactacatgccacccatcgccagacacagatcctggcattttctcccttgtatattagttatttctgcccatggcctgtatctttaacacagagcctctcatctacagcactactgacattttgggccagataattatttgtgacaggtgctgccctgggtactgtaggatatttacagcatccctggcctgcatatactagaaatcaatagcaaacccctacccctcactcataagaatcaaaaatatctccagatttaacagttgtctcctaggggcaaattcatcactgatagagaaccagagctctaacactctcataaccttcttgatagcagaaccctgtattacatacatctttgtgtcacttcccatccacatataaccttgtacacagcagacacagatgtttgttcagtaaacttgtgccaggtaaagcatgcagaaatatgtcactagagaagaggatgcagccagcagcacattttgttgtcagaagcttcattatcagaaatagaactgctaggaggctggatggagaggagagcaccatctatttagtgctccttatatccaaggcactgcgctaagtgatctgcctgtgctatttcactttactccacacgataatcctatgcagattagaaagctgaggcatgagagtcacagacacttgtctggaagagtgggaatttgaacacaggtcttcaatagctagagttccacttaaccacacctttgttcagcaagacaaaggcttgttgggaatcaagtgtttcccttagagtttttctgaaaacaattgcttaaccctcaaaacaccaaaagttgacacaggtccctcactgacggcagaaatatgactcaatgatatttacgcaagtcctgacttgtcaaagcatgcttaatgttaaaataagaacgtgaactaacattattgatcacttaatgtgccaagcagtcttctgagccttttatatgtattctgttattttttaccagaaaaacatttgctgtttcaaagtcactgggatgaagatgagctgttgtaattcaaagacctgaatttcagccccagcactgacatccagtttttcatgagagaaatggctgaaatcgtgcatctcctgtttaccttaaagggttgctggagcatcagaggtgagcaagcatatggtcaaagcattttgcattttgtacatggtaaagtgccactcatctgtatatatagtaagagacaggatctcactctgttactcagagtggcatgatcatagctcactacagccttgagctcctgggctggagcagtcttccagcctcagcctccagtagctgggactacaaatacacgccatcaggcccaactattttttttttttattttttgtagagataaggtctcactacattgcccaggctcagaaattctcatttttattttcattgtggagtggccactgaagtgagccccagttgcgaggaaggaaactgacatttccattaatgtgtccctctgcttccttgacactctccaagtgagattcctgggacccctattggttaacagtgcaacttcctgaaccccccttcaggcttctgtgaccaactaagaaattttactgctccacttttgcccaactttgctccccagagatatggatagagtgactgttgccagtctcacatgatgttaagttgatattcaggaataaggtaaaagtcaaaatgtcaaagtccacagtataagatagaaaggaaagaatatttcattcctagtatctacagattaaaaggaaagcctagatcttccactattagaagagatgaataccccagcagtgtggctactatttgctaatacactagaaaaacacttttctctcccatttcagataacgtagaaggagggacgggtgagagcaatgttaagtgttggattccaggctaccccaacagccacaaagtaattctagtcacagtttacccccagcagattcacacagtgagaaattcataaggccctatttacacatttcaatattaaagccccaagaaccggggtcatttgatggtattaataacagtcctaaagattctgacagcagtgacatttcagagaaagaaatgccagggcacccatgcatcagcgagatcgacatttgatactgcgcattgttggcaatattcaagtgctaatcattctgtttttgttttccttctaacacatgcattttttgagattggtttgcgtctcttaatcttcagagctacctgattttgcttattactaactcctttatcattacgaggtccacaccagggctatttaaatacttgaaacgaggaacagttaaacagtctgctgaaacattagtctaggaggagatataaggttacttccttcagtaacacactccgctacatagtcaggtgaagattgtctctgtagaggcttctggatgtggttgtaggaagcatggactgtgcaagcttgcgctgaaggaggacgagaggatggacctacaatcttgaaacagagtgtttggaagagctgaccttggagcagagcattgccgagtatctgaaagatgtcaatgaccctcgctgctgctcggagaccttggggatgacctgcacccactagcatgcctggatggttcaaaaaggcgtggtatgggctggcgtctttactcagcttctcctccttcatcctgatcatcgttgccctggtagtgccccactggctgagtgggaaaatcctttgtcagactggagtggatctggtcaacgccacagacagagagctggtcaagttcattggggacatttactacgggctcttccgagggtgtaargtgcggcagtgtgggcttgggggccgccaatcccaattcacgagtgagtatattgggagcatgaaagctgattctaggcactcatttttgttaatgtgtaagagtgcttatgtctcattgtggaatttggctgctgcctcaacgtcaggcataatgtcaaagtccacagtgagccaagggttctggatccacatcaaaaagatctttccttccttccttgcttccttttctttttctgtagagatgtatagaaacattagaaataaggatytgtgcatttttgcagtttacctctattaattatgactattaaaatattgagagtttacacgtgtcagacattgtaagcacctcacgccacttgtctccttaaagccttacaacaaagttatacagaaggaattgttaatgttcccattttccagaggagtacactgaggcttggagaggttacataayttacctgaggtcacccagccaggaaacagtagagccggactccagacccatgccacatgaccacaacaagtgggtggaggctgcctgcagaactgaacctttgggaagcatgatgaccctttccacatctacttttgtaaaagcttcatagtctgagaaaatgcaaaggggcactgtgcttgggttctggaatcagactaccctggctgaaacccctactggaaagtttactggtggggagacctcaagcaaggcacttgcctgttctctgtgaacgtgagcgggcaccgactttggctggcrttcagtgtagcatcagagctgcccaggatgtaagcagagcagtctgcacaaacaggaatccaagctggacttaggaacgggcttctggaaaggaaaaaacaaaacaggcaatattctgcaagccttttgaatcgatgagatcactggtgaaaagtgtctgcacaaaaccgtaattaatcaataccatgccaatgtagggtgatacagaattgtattcattccttgatttctatatttcagtattgtagtagtttatagaaatctggccaaggtaaatgtcgtattaaatttataaggacaaaaagctggaaccgttgacaaatataatacaaattgtcatcatttaaacacacaaaaatttacatttgttatgtatattcaagatcaatatgtctgggcatatttatatttacctagcaattagattagaccctggatattgaacaaatagctccatcaaaattataacataaaacttgaaaacacacacacataaacaaataaaaaaaagaaatgctaaaagctaaccatgacaactacatggactactcgattctgaactagatgctttgctataaaggatgtcttcgggactttaggggtcaagaaaacttcccctttgcactctgaaggttctctaaacaatctactgacaaaaggcagattaatagggaaaatggcttacacatttattagcatgcataggggaaaaatcacagagtgattgtccgctatctcaatggggtacaggtggttgtatcctcttcatcttaggggaaagagagatggggaagtgtggatgattttaggggactagtaaattatttttagggaaattcaatgggcttaaagaacatacagtgagctgggacaaagtctgttgagcccacagagcagacattggtttgtgacaaaagtctgtccagctgtgttaacagactttagtctttcttcctgtgatatgggtacaattaatgaacactcagggaagggaccagaggtctttttctttggtaggtctggatgtaggcaggtaagggaatgtcagagaacaacctcatcctgtgcttatgagacagacaaagaatggagagacacgagggagaggggaggccagagagaccttgagacttcttcacaaagcttcatattttaggggtgttggtttctgaaccccaacaggtaaatcgttgaaacttgaatggggtgagaagattaaacagcagtcacatgccagcattaacctaatgaccagacccctgccattcccagctcacagaaatgtaaactgcttcgagtaggaagctgcaaacaaatgcatattttgtttgagccttggaggaactcagtaagtacttcttgccttcctccttcttccttcttagaaggacaccaatgggaaacattcccctgggttcatctaacgtggtctggtctggaaagcatcagaaccctgtgagaagcataaaggacattttattcttgtccctgagtaggagcgtatttgagaaggttttgtttcctgctgccctggggttgtctcagaggagggtctgtaaacatccattcgcagtaccttggatgtgattctctttcaaagcattcacgaggagcctggggccaggttcctcctgtgcttggctggctttaccccagtacagctcagggacactgatagtgccagtctagtctcctttagatttacagcttttaattctagcacagtgtaacctcgaggcagctacggggtatatcagagcctcccacaaccaggagtctgtttctcytggggtctctttctgccattcactatccatctgtagaaaaaaaaaaaataatccccacagtcgcagatcagtgtagatggggacgtaagtgaaaatgctttgcaaactctgggatggggaggtttattgggtctcgttcacaaacagccacttttctcatcacagaggcctccccaaaaaatcacccaggggaataaattcccacgccaatcatggagaaaaccaaagaactatccatcgcaaagattaaggtcctttttttatacccaggccctatgaaataaaaacaagtcaacatggctgtttgggtggctagagaaagaaaaagacaaacattactttagcattgtccacacattcaattgtactatggagtatttacagaccaggctcttaagaaaacagggatgaacaaaycagacaagtacttgccctagaaaagcttamcatctggccgggtacagtggctcacgcctgtaatcccagcactttgggaggccaaggcaggtggatcacctgagatcaggagtttgagaccagcctggccaacatggtgaaaccacgtctctactaaaaatacaaaaattagccgggcgtggtggcaggtgcctgtaatcccagctactcaggaggctgaggcaggagaatcacttgaacttgggaggtggaggttgcagtgagccaagattgtgccattgcactccagcctgggtgaaaagagtgaaaatccatctaaaaaaaaaaaagagaaaggaaaaagaaagaaaaatttaccatctgataaaggagaggcagataaatatatactaggcacagaacacagtatctgaagccattgccttgtagttcatttccttccatttttactatgctagagaagagattttattacgcccattttactgatgaggaaattagagaccagagaaatcgatacataaaataatttctttaaaagcacctaatgtaatagattgctttgcagcttttagttctctggttcctctctacttcctgcctcacaggtattccactagtggccaggacctgggtttgacttcagatgtcctgcttttcttatttgccctgctggggcgaaaaggactgccagacctctctgggattcrgagcaaacaaattatcttagatgctgatagatgctgatagatgcatcatatgctgatagatgctgatagatgcatcatatgctgatagaatgatgctgatagaatgattaatcaattctgctttcaagtgagttgcctctaatgtgtaggaaacaactatatctattcaaattcaaaatgagacctccaggattcaaaagactctatgtttagaattttaaacctctacttatctgtgctttctgatttttctgctctagccctgtaatagagtagttaagctgacacttttcttgctgtgggagcgtagctaagctatttcacttctccgagcctcagtttcctcatttgtaagcatgagagagggtgtccatgagcaacagaacaaagaatatgtataaagccaccggcacatagtctgcaccccatataggtggctgttgtcatttatcaccatgaatcatgtgttgtcatttatcaccatgagtcgtgtgtagggtcatggatttcaagctagaaacttaaatttaattcctagtgggagacatctaaaactcttggaacctggatttcaaatgtgaaaggcaagtgagcaacagctttcctagggcagcactgggtgtcaggctaaggcagagtcacctctcagtgagaaagtagaaagaactggtgcattaacactcctgagaaatgatttgaatttctacttttttcttcttttttaaaaaataatttaatttagagacagagccttgctatgttgcccagacttatctccaactcctagcctcaagcaatccccccataatggctcccagaagtgctgggattacaggcatgagccactgccccagcctcgaatttctaaataatgacatatattaaaaaataataaaatctctattaaacatgaggtcctgagccctgtgttatggcccaagaatgtgggggttgagtgagatttgccctttgccaataagtattttttaattatagttaatgcacttcctactatgaaggccraggactgggcactctttaccaccctctccacatcactccacattccccaaattccctctcccccgtcatcctaatatgattatttctcaatttttaaaaatcaaatctggatatggtttcaatcattatgtggatataattctttctttttaaaagatgaattatatacattatggacattatggatactttattaaatcagyctattcacatactgttttttctccaatcttttgctattgtaatgaatatccaatatttgatccacgctttgagcacatgtgggagtgcttctggaaaataaattcctagaagtgaatttgctttagtagatgttgccaaattgccctctaacaaggttacatgaattaatatttctatgagacttgagagtgcctcttccttacaccattgtcaacacggtgttttagcaaacattttgatctttrccattcacataggtgactgttttctattgtaagagttttggtaagcattactatgttagtcgtgtgtcctaaggattgcctggttaagaaaggggataatgaaacaatttaaaaatcaggcacaagcggcagggtctggtggctcaygcctgtaatcccagcacgggcagatcacttgaggccaggagtttgagaccagcctggtcaacatggtgaaacccccgtccctgctaaaaatgcaaaaattagccaggcatggaggcgrgtgcctgtaatcccagctattggaaaggctgaggcatgagaattgcttgaatcagagagaaggaggttgcaccaagccgagatggtgccactgcactccagcctgggtgacagaacaagattctgtctttaaaaataaaaataaataaawatcagcacaagctactgtgtctgaaacaaaaaggggctgagagtttgaaaagagaaaaaaaaaatctaagggacattaagatgggatagaagcacagggaagaaagacgctttacaaagacaaactcactggaaaggagctcatcttccagggtaaagtttccaatgctgattagataaccatagggagataaaaataaatggaaattcagaactggaaagaaacatcagaacgcacaatgtaaacgtggagtgcctgaaaatgtgtcacctaacgggacacctaaygggaaaaacaaaaactctagttctcaggactgggagacgccaaccttcagtgactaagagaggcaggtgaaccagcaaaggaactagttccatcagggtgggtattcagcaggaaccttggagcaattgcagaggaatgagtatgctcagaagttctgtagctttcataatgttcaattcttcatgtaaaactactaaagatcatgacttgacactgttgataccatacagttgtgaacaacagttctcagaaaaggaatttggagtaaagaatttattccagttaacggtttgcaaaccagggaaacacagcctccggtgtaaaaggaaggtgtattccagagaagaaagggaaggctcagattttatagcaaaagttcccacccaggtttccagtcaggtctgtttgggtaaataaaggattcaaattcacttagttctgattggtggatacagctgaaccctgattagctggtacagctgagccccgattggtcattacagctgagccctgattggctgaggcagatctcaaagataaaaaggtgtgggttttcaaggaactcagaagatgcgtgtgaccccctagtcagtaaatggccacttggccctactttaaatttagagccagttaaccactcaggacccatcttgaaggacgggctctttcagggtcacatttgttctcatagtatattgaactataatcttatatagaattaagagttgccttccccaaacacaagcaattaatgtctccaagcctgtgggtataaggagtttataaaatctacctcatgtctttgtcatgcacattgaacaagatgacgatgtaaaatgtttggcccatgactgcacttagtaaatgttgattatcctcaattcatatgcagggattactatccccattgtactgatgaagaaattgaggcttgagaagtcacatgactttcccaagwctgtcaaaatataacagcaataaccacagctgccatttttgagaactgactttcccaggcactatttgagctactctattatgttatgtcatttcatcttcacagctggtactgctggcaaacatagagaaaacaaatatgaattaagatttcactaacttattttgccatactcataaggcaaattaatattttaataaaacgttgtgcaacgtgagaattatgtgtccttcatacatggggataagccagggtctaccttgctaagtcactggggcctgtgtgcatcagttcacatcagatcccagagcttcaagctcaatgcaacttaaattgacagccagggcatattttgattttgtgtccactctaaggaacagaggcttgttggtcaactgacaagcatgaatctgggggccatgagttcatctcagaaagtctcccgctgtttgaaatccccacgcttgctgtcttgccctcacccctgtctgtcgaagccttcgtggtaagcaagcttggacttcatgaaagtgagtctaactctgacattgaaatagtggctgtgtcttgtctccccagtcttcccacacctggtgaaggagctcaacgcaggccttcatgtgatgattctgctgctcctcttcctggccttggccctggctstggtcagcatgggctttgccattcttaacatgatccaggtcccgtaccgggcagtcagcggtcctgggggcatctgcctatggaatgtcctggcaggtaagaagtcccttagggagagaaaattatgtccacaccatcatagggctgggctccaagtagttgggcagaaggtgtgaaggaactaaaatgccccactggagccttgaccttcctgggtctaagaccttcttgatgggcatggaatgaatgtcctctttttctttttctttttttttttttttctttgagacagggtctcactttgtcacccagactgaagtgcagtggtgcgatctcagttcactgcagccttgacctcctgggctcaagtgatcttcccacctcaggcccccaagtagctgggagtacaggcgtgcaccaccatgcccagctaattttttgtattttttgtagagacaggtttcaccatgttgcccaggctagtctcaaactcctaagctcaagggatccacctgtcttagcctcccaaagtgctcaagaatttcctctttaagttgcagagtctgtcacaacaaagaagcatcttattagagtacgtgaatggctgagggcttagagcagtgaagagagatcgaggtgaaagaagaagccagaagacagagagctggaagtagggagaggtgggggccctgagatgggaaagagatggagctggtgctgcagctaaggctgggaggaactccacaaatgacagaagagaagggtagtgtgagcaagaggccattcgtgaaaggctcctccattcaggctctgggttgagaaggggaagtgagtgccatctagttgccaaggtctttggtgttccccccacacacacacttgggcatattaatgcagacgtggctcactggctgtctcaactctccctcctctcacctccccaacaccttcactgcaccatgcccttaaactagatgcaacttactgagcaaccactaagggctgggcagggacctggagattttgcatgcattgcttcatttaaatctcaccacatccctatgggaggtattattagacccacaattacagatgaagagcctgaggctcagagaagttaaacagtcgcaccacaatgagtggcagaggtggtattccaacctaggtgtaactgattctaagctctttatttttccacagatccatgctctcatttatgaccatcatgacctgttttccaagccaaaaactacaagatgtgtgtgtgtgtgtgtgtgtgtgtgtgtgtgcgcgcgcatgttgatttgggagtatattgatgcacagaaattaattcacatttaattatgcacttaacaaatcatctgtaatgaaaataacagaatcttgtgaaatgagggctgtcacagaaaactcaggtcaaatattcaaggtaccattagaacaataatccctcgctatgattaccttatacaagaataatataaaaacaggtaatgttattttattatgtattataatgtatatcaatcaatcaattattatgtatttgcctttgtttgcagatggtagccaccctgtagaattgtttacatacatggcttaccctcatcaagactacaggtgtcttcctcatctgcatgaatcctcacagaggctgtcatgtaaaaagtgctcaacgctgcttattaaataaatacttatctctgtccattcctttccttagagagatagcactctcagactctactgatgagagtattagcaacaggcaaaaaagcctgggcaacacagcaagaccccatttctaaaaaaaaaaaaaaattagctgtccatggtgtccggtgcctgtagtctcagctgcttgagagctataatcccaacacttagggaggctgaggtgggaggattgcttgagcctgggaggtccaggctgcagtgaaccgtgatcatgccactgcactccagcctcagccaacagagcgaaaccttgtctcaaaaaataaaaaataaaaacaggcaaagctttatgtcttttgacaaaactttatttcttgccactgagcttaaaaaaacaacaacactgtagtgtcagaaggcagaaaaaggtgaatagcctttgaatatcttttgactaaacaattccatgtttgaatttatgctaaggaaatactggacaagagaacaaggatgtacataaaatggtatttgctgtagcactttataatatcaaaaaattagaagtaatctagacatccagaaataaggtcatacttacataaattatagtgtgtgaccttatttctataatttagtagagactgtttagtctctactaaaaatacttacataaattatagtgtgtagtgcataaaatactatgcactcatttatagtcatgctgtaagcctggcacggtggctcacgcctgtaatcccagcacttggggatgctgaggcagcaggattgcttgagctcaggagttcaagaccagcctgggcaacatagtgagacctcatctccacaaacaaacaaaccaacaaaaatcaaaaattagccaagcatggtggcatgcacccatgatcccagctactcaggaggctgaggcaagaggatcgcttgaacccaggaggtcgaggctgcagtgagccgtgatcatgccactgcactccagcctgggtgacagagcaagaccctgtctcaaaaacaaaaataaaaacagacaataaagtcattctgtaacagaatatgtaacaacacgtaaaaatgtccaagtgaggggaaaaaaatcaaatttaaaatcaaagtaagaacaccataatactaattttcttaaagagaaagaaacataaagaaaaacactaaaatgttcaaagggttcaagctggcttttaggataaaagtaaatttgcttatgattttctctggtgtccaaatttttcttcgatgaagatatactaatcttttaagaagcatcataaatgtgttattaaaaatattaattaaaattgaaaccagaggaagagagggggagagagagagagagacagattcctcccagaaagtcaaagtttcaagcaaaacatagggaagtagtttggaattcttccagttttcccctccctcctttcctttttctatgaatggtcatccttatccttaagcatggaaggaggataattaaacaggagagcaacagtttttcttacatcttgccacatagccttcacggtcttcatagaaatcctaggatattttagacaatgaacttctccaaacgtggatccttaggaagcatggtactgggtaaggggaaaaattggaagagtgggccgggtgcggtggctcacacctgtacttccagcactttgggaggccaaggtgaatggatcacttgaggtgaggagttcgagaccagcctgggcaacatgatgaaaccccatctctactaaaaatacaaaaattagccggctgtggtgacaggcacctgtagtcccagctactcaggaggctgaggcaggagaatggcttgaacccgggaggcagaggttgcagtgagctgagatggtgccactgcactccagcctgggcaatagagcaagactccatctcaaaacaaacaaacaaaaataattggaggggtggaaattcaaagctgataaagcagatcctctctttccccgcacaatcctgcctttctccttcatactgtgtgggttatctcctacttttaaaagcaaattaaaacttatgtcttcctcataattttgttaacccaaagcaagtttgtcacacgtggcacagaaatgccacctcttacagagttgcaaaaaggagccgtgaatgagggtgacctttttgagtttcaggcggcgtcgtggcgttagccatcgccagcttcgtggctgcggtgaaatttcacgacctgacggaacgaatcgccaactttcaggagaagctcttccagtttgtggtggtggaagaacagtatgaagagtcgttttggatctgcgtggccagcgcttcggcccatgctgcaaacttggtcgtggtggcgatcagtcaaattcccctccctgagattaagaccaaaatcgaagaggccacggtcacagctgaggatatcttgtattaatagccttcccctgttcacaacctgtcctaagtcagttctgtgtgcgaatggagtcctcatgtttttgcagccttcccactccatcatggctatgttctcagcagtaagaaaaaggatgtgaaggaccaaggctgttgcctgggccagaaaagaaaaacttgcccggaatccccagcgtccttgcattcctctctcatgaccttggagttcaagttgcagctggagactctgccacttgccggctgtgtgtgacattagacaattcacttaatgtctacgtctctgtttcttcatctgtaaactaagcacagtaacaacttcgcaaggctattgtgaaatttaaatgggtgatgatattgccagattctgcattctgtagagcacttgacaaatataagatactacatactccaataagtgtctgtagatccctggtcgattccatacaatattgggctggtgagtggggaagaattctaagaggaatatgatactgttcccgttcctgccctccagaaacacctatctttctacatgacacaggacttagcaacggtaacactaagaatgtaagtaactgccattttttgagtggttactatgtgctagacactgttctaactcatttattaactcattaggtcctaatggcaaaaacagcaattacttttgcaccaacctaataatagaacagccataagggaccgaggagggaattaaatcttgaggatgggatgtggtattaaagaaagtatcacagcgtgaacatttgatctgagctttgaaagatgagtagactttttccagtggtgaaggaagcaaggttaaagaagggcattccaggatgcgtcagtaaaaaggctgggcacagggcatgaaattacaaggagggactgggcacagtggctcacacctgtaatcccagcactttgggaggctgaggtgggcagatcatgaggtcaggagttcgagaccagcctgaccaatatggtgaaaccctgtctctactaaaaatacaaaaattagcctgccgtggcggtgtgcacctgtagtcccagctactcgggaggctgaggcagaagaatcgcttgaacccgggaggtggaggttgcagtgagccaacatcacaccactgcactccagcctgggtgacagagtgacactctgtctcaaaaaaaaaaaaaaagaaatttcaaggagggcttagaagcatgtgagtactcaatgggattagaatgtcgctttaatcacctgttggagaaattcggctgttttgtgttgggttttcctaagtgccactggaatgattaattttatgtgtcactttggatggaccacagtacccagatatttggtcaaacacttctagatgttttttcaaaggtattttttgatgagattaacatttaaatttgtgtattttgagtaaaacagattaccatctgtaattggatggaattccctcatccaatcagttgaaggccctaatagaaaaaaggcctcgctcccctgcgggagagagaattctgccagtagactttttggactcacactgcaactgtcactgtatctccagcctgcccaccaagcctcaagatcctggaattgctggcctcctgagtcacgtgagacaattccttaaaatatccccctctttctctctgtcactacacacacacacagacacacacacacacacacacacacacacacagcctgttggctctgttcctctggagaaccctgactaacagaggtacacaactctatgaactcattttcccatggtgctagcttggatgaatcttttcccaggtcccctatcttcatgtcatgcaaaagttatctaatgcgatccttttgtagttcatgaggatgacgattgggttttcgtg

SEQ ID NO: 97608 - DNA, 12702 bp, Homo sapiens
ttgtgcgagcgtgccgggagaatgccacggggcgaacgttcgtggccaagatcgtgccctatgctgccgagggcaagcggcgggtcctgcaggagtacgaggtgctgcggaccctgcaccacgagcggatcatgtccctgcacgaggcctacatcacccctcggtacctcgtgctcattgctgagagctgtggcaaccgggaactcctctgtgggctcagtgacaggtagctgggaattctaggggagtagggaggaagaggtaggggaggctgggccgggtatcatctgctccatccctgccctcccaggttccggtattctgaggatgacgtggccacttacatggtgcagctgctacaaggcctggactacctccacggccaccacgtgctccacctagacatcaagccagacaacctgctgctggcccctgacaatgccctcaagattgtggactttggcagtgcccagccctacaacccccaggcccttaggccccttggccaccgcacgggcacgctggagttcatgggtgaggggaccagctgccagccagggtggggacagggccctgccagagaggcagcagccagggctcaccccacttcacttacatatgtgccacttattgagtgattactgtattcaagcaatgaacgaagtatgtggattgatctttacaataaccctggagtgtggcataatattagcccccttttacagatgaggaaactgaggggtactgatgttagggatttgtgcaatcagacaattataaatgctagaggcaggattcactacagccaaaaagacaggagaatcaattattattttatttaaataaggagaaccagctaccatcgagcaccctgctaaatgcttgacgttcatgatctctcttccttggtgtggttctacaggccacactttacggatgaggctgtggagagccaggcaggtttagtaaatcgcccagggtcccatagctagaaggggcaggtctgggattagagccagccaggctgattttgaaggcttttaatcttggtgtcagccacactctttgtgaatgggagccataccttggagccgatccaagggagcttgtcaccctgcttctcagcccctctggagttctggggaccccgccattttgtgcctgggttaattcctcaggtgacccatatgtctcttggggtatgccaccacctctgtcctgcctactggccttcagggcctgccactctggacattcccatggtctggtgaccaggacattgtcctgctgctcaagcacccagggacctcccccgcccccacttccctgccaccaggaagctgggtcagcttggcctctgtctcctgtcagctccggagatggtgaagggagaacccatcggctctgccacggacatctggggagcgggtgtgctcacttacattatgtgagtgtcccctaccccaccgcagccctctctgcccatacagtgagctcccggactcaccttctgccaacaccctctcccccgtgccccacctcccctgtacacacatccacactgcacactcacactcaggtgcacagtagcatggccctgagcactgtgcacctgacactaatgtccttctgggtctgggtgttggcctccggtctgcatatgtcaatcaagctatcttccccaacaggctcagtggacgctccccgttctatgagccagacccccaggaaacggaggctcggattgtggggggccgctttgatgccttccagctgtaccccaatacatcccagagcgccaccctcttcttgcgaaaggttctctctgtacatccctggtgagtgagccccacacctgctatcccccagtgttacctgcccctggcctggcctgtgccagagatctcccagctcctcccctgctcctaggaagaagtctgctgcttctactaaatggtcatactacccaccatttaaagcctgaggcagccccgtgcaaggcagactcactgtccccattccggagactggggaactgagctcttgagctgcccaagatcacacatgtaggggtgggatccaggactgggacatgggtctgcgggaggacagagccccggcagctcccagagcttccttccaggttcatcatccctggctctgcctggcaggagccggccctccctgcaggactgcctggcccacccatggttgcaggacgcctacctgatgaagctgcgccgccagacgctcaccttcaccaccaaccggctcaaggagttcctgggcgagcagcggcggcgccgggctgaggctgccacccgccacaaggtgctgctgcgctcctaccctggcggcccctagaggcacggaccacagccaggcctcgggcttcaactggggttcccaccaatgccacgggacattccagggcccacgctgagccaggcgggcctggggcttcggttaccaccagcagcaacatctggctgggctcttacctcatagaccttcaaggacagagaccccagggcctggacctgatgccaccccaggccaaagccagagtgggagacccattggtcaggctcagcagggtgggaacaggcagagggacaagaggggaatggagaagtggagaggaaaaggaatcgagggacaggaagggggaggctctaggaaggttctgggttgggggtcagtgcatctcagggagaaccaaggaaggtgggcatggctggagaggaggaaaaggaaggagccccaggtgtcagggcagtaggctgggagtcagtgtggcaaagcgggggcaggacacagatacagtggcaggggcccagggctgggacatgagagaaggcagcgaggcggcagagggagaagagaggactcaggtggaggtggggtgggtcagctgtcagcatccctcagaggagaaatgtggagagctggaggccagcagtcactcacactcgctctgtcctcctgtccagtggatacagccctgggcgctctgctggcccaaggatgtccccactgcccctccatggcctctggccttcttcccattcatatttatttatttattgacttttatgaagtttccccttccatccgatccctactgcccatgttgtcctgaccatccctcccagccatccagctgtctgtctgtctgccacaaggaaataaaaatggcaagcagcataacctgtgtgtctattgggagggatggctggaggggaagatggctggtgaggggtgagtccgggacaggggcatttagccctctctgggtattccccaacacacacattcaggaatataccagctagcactttgggtccttccaaccccctcccgtgaccctcctggcccctcacctctccttattcctggagggaggggagactgtggtctgcttctccccttgcagtttccggaatgttggcagatccactgaacccctgcaaccaggctctagtagcccccacctcttgtcacgtgttccctcatcacaatgtgggggatgctgggctctgaaataggccagccctcaccccaatcctggctcagccttgttcactctccccagaagacaggcaggagctctggtcctgacccctggagcagagtgggtttcatcctgatggttggtgagagtaggtagtgtgaggagctgcagaagaaaccaggacagggaggctaaggtggctggatcacctgaggtcaggagttcaagaccagcctagccaacatgatgaaaccccgtctctactaaaaatacaaaaattagccaggcgtggtggtgcacacctgtgatctcagctactcaggaggctgaggcaggagaatcgcttaaacctgggaggtgaaggttgcaatgagccaagattgcaccactgcgctccagcctggatgacagagtgagactccatctcaaaaagaaacactaggacaggctcacaccccttgccctccatgtcacagcacatatcagagcacatggagagcaccagctgggagtgctctagtctgctgtgtccagcattttcctagggctgagggacacaccagcctggaccttcttgtccacatggcaagttaggaggtctgctgggtgctaaagcacctcaattctagccacacccgtgccatagaatggtcactgggacctaggactgagctgctctgccctgaggttggggacgagggattggggggttggcagggacccagacctccttgtctccagaggaaatgtttccctcatccccaccttcaaaattctgttcttggcaaagtaaaaggaacaaagcctctgaccagggtagacagagttgtcactgctgtgttgctgatggaggttgagggccccttggctccagcccagacaacccttttgcccagcccagcccagcctctctagcttctcaggaccccagggaagaggcaagccccatcatcataaaataacaggatgttaaagccagctggaagggaccagaacgacaccttgcctacctgtcattttagcgatgaagatatacagtttgcctgtaagaatctccaatcccctacacactgcaagtgttttgtataaaaatgaggtgcctgaactcatatcttgataaatggtaaaattcctctcccgtccccgctctgatcttgagctcccttcccatctccattggaaatggcatgtgaactgcttgttccaaacccggaggagcaaaggtaatttatgtcagcagagctatgtcaaaattgctctgatcaaaacgtgacagtgcccccacactagggcgggtagttccaatgaatggaagcaatgcttctgcccggtgcccggcctgggcagactggcctccaggcaatccccagaggggttaactgaaccccttcaccccaggtggtctgatgcccctatgcaccaatttatgcccccaaaaaggaattgggcagacctagggttggggccagtagtggtgctaatctccaaggacagtgcagtctaaacagcccccaccatgtgacatcgaggggagtgagtggggatggggaaggcatggaggggctgctattctcaaaaatctttcccgtcccctcccggtttatctcagtttaccgccagggggcacagtgtggaagtgacaaccctggactcctggggttgggggtaggggaagagtaaggagcttctggattggtcttgacagccacgtggccctgttgccgttagctgtaggggccctgaggaccaagtccgatgctactctggctgtattcagggaaaccccagaaacactcaaaccccttaaccaacagggtgtgttgtctgactatccagagcccaacctgattgaaaagctgccccagcaggaagctggatctcttgtcagctaggggctgaatctggtcctcctgggagtgggatggataccccctgccctgggaggggacagggcagcatccagctgtccagctgtccaggtgctgacgcaaggtgcacctcagagctgctcgggtttctccccacgggcctagcccagcggctgagccagcatcccaggcatccacaggctaaataaagagcctgcctgagtcagagggaggcggatggggccccggggggcttggggcaaccacgccaaacaaggcaaggaggggagcgatgtataaaaccgggcccagggctgagcacctgcctgcacccctactgtgccatccagaagggctctgtgctgcctgcaatccagccagtcgactcaagtccctaggtcaacccctccacggtgagtctgatcctcagagaagccgcagacacccccattcctccatctccctgaatgttctgaccagggaggaaaagggctgaaggtgggagcctctgtctcaacctggacccccatatttgtcgcccactccccagatgtctaaagcagctcctgccaaaaagccagtggctgtggccccagctcctggatgtaccctggacatcaatgacccacaggtccagagtgcggccattcgtatccaggcctcttaccggggccacaggtgagagggaaccccggagccctgtggaggaagggagctgcasagagcgcactcttgagtrgggtttgagtaagcgctgagcagcgtcaggagcctttakaatgagtggtctcaggggagggtcgttactgaggtatggrggagtggccgggaggaatgcatcatcctatcagggcagcagttcaggagcagtcctcttccctaccaagccacacgtttaggggtctggcsggtccagggggcasgtaggagatggtgcgctcgcggtaagggctgtggccrggcctgtcttakgaactctgggccctgactckgcccgcgggtakgtcccggaaggagctgcgcgagaargggccgccgcgggtgctggagccgctgaaggacgtggtgctgatcgaaggcagcgcggccaagctcacttgccgcatttcggctttcccggacccattcatccgctggagtaaggacggcaaggagctacgtgacggtcccaagtaccgctacgtcttcgaggaccctgacgtggtggcactggtggtgcgcgacggcgagctggcagacctgggccagtacagcatcaacgtcaccaaccccttcggccagtgctcmgactcggcgcgcatcctcgtgraaggtacgcgcgccccgggcgcagcgccagggcgcagaccagcaccactcagccagagcccgcagcccggtccagctgcgcgtgtttacctctgggcctagctacagggtccccgccagcccagctctgggcacggcctggggcgcatcgccgcgccagccaagtgcgtccttccctacctcgggatccagctccacccgggctgagcagtcagctgtggacttccatcacgcggctccgggtccccaaggtcacacagcaagccagaggcagagccagggttggacccgggtcttctggctcccaactctggcaatttccactacccggagcggtctctgaggcaccgcgagatgtgtgaacattcaggggctttcgcccgccttatctctcttgatcctctattcgaccccgagaagtaggagaggcagggataagtccctttaacagccaaggagatgaaaccagagaggctaatgatttgctcaacgtcacactgcgagtttaaatgcatctgtatttagtgccgggtattagccggtgaggtgatgccctgcctcatctccgggtccttcacggggtttcgctcccctttccttccgctagtcccgacgaagattcaaaagggacccgacaacactaaggcgcgcaaaggcaccaccgtgacgctgactgcggagatcctgggagagcctgcgcccgacgtaggctggaccaaggacggggaggacatcgaggaggatgacaggcgagggccgggacctgcggcacggccagggcctggggctggaacctgggtgggactgagcccagaaatctggctggagtgacgggggcggggactgggcagcgaggaacagagctggctaaggagccccgcccagtgcgcccgtgtactgaccacggctccgccctcctccccgccgcccttccgcagggtgttcttcgagatcggcagcaccaccacgacgctgaccattcgccgggccacgcctcaggacagcggcaagtacgaggtgtacgtggagaacagcctgggcatggaccagagcttcgctcgcgtcgacgtggcctgaacggcacccccggaccttccgccctggcgccgagcccgggggtggtgggacccacagccctccaccagcttgcttaataaagctgctctctgaccctccgcgtctgtcctgctcttccgcgtcgccattccctctcccccgcaccagcgcccacacgtattccagacccccacgccaaggtcacagcctgttggagtcacagggaggtctggagagcgcctagcgccgtgctgcatttcagacagtcaaactgataagagttgccctcgccgtccaaggcgccctcacttcccagcggtaccgccggctgggcctgggactccgccttctccgcttttgagcgcctccagccccagccccttgtggctgtttgcccctggccccgccccttccagggctggccacacacccctgctgtccttagtcccgttttcctgtgggacccagttcctcacttcggctgctgccccgaggccgattccccaacagctcgggtcccagtcttaagttccaggctgggcttctcaggccccacccttcttcgcatttaaccccgccccgcgatcccttggtcacacccctggacttcagcacctctttcctctcccataaagttagaaagcgggtaaagggtcagactacaattcccggcagaccctgcgaatgagttctcgcgacttgcgagaagacacgtgcgcggaaggagcttgcagtagcgggcggcagagctggagtgaagggagctagtggtaaagggagctggtggaggggtggcggcaggggtaaggggcaggggacaccctctagacggagagcgggctccgaggtcctggctggccctcggtgcgcccgcccctgtgttggtcccacaatccctggcaatgagaggccagggtttattggacagagtcagttgtggggttcagagggtcagcaatcaatcaatcctccgaatccagagatttagacccagtcgtccgtattaggactggaggggggtcaataggttcagtgtttgagatgccaagggaacctgtcttttgatttggggttcaacatacagaggttagttttaggattcatgtttagcatatagaggatttttgctgggattaggggttcttcaaattcagatcagtgttagttcagtacttggggattacgttcaggatttaagttaaatatctgaggctcactcagggtttgctgtccaatattcagggttcactattggggttcagggcttaatatctagaatgaagacgcaacactttgggaatttgaggcttcagtattttgaggtttgggtctgagaagggagtctctgccaggtttctgaatttgcagaatttgttcatggccagagggaagtcttttagagatcaaattgtggggtgtgaatttcagaatttgggaggaatcactgtgaggtttgaaggccgactggaatctgggttgggatttgagatgtgtgggatttgtgaggttctgtccaggcagggactatattgagctttgggtttacatcttgggggagggctaagtgctgctatttggggtttggggtttggttggggtgtgagatctgagcttgatttctctgctgggatttgagatgtgtgggatttgtgaggtgttgggtccaggcagagactatattgagctttgggtttacatcttgggagagggctaagtgttgctatttgggttttggggcttggttggggtaggagatctgagcttgatttctctgttggaatttgaagtttaggtagcagtcaccattatgctcaaagcggtgatcctgattggaggccctcaaaagggtgaggtgccaggggaatggggggaggaggttgggctggagtggtaggcgggatgggggcagaggaaggcaggaggccgaaatgttctcctctctcctctcccaggaactcgcttcagacctttgtcttttgaggtgcccaaaccattgtttcctgtggcaggggtccctatgatccaacaccatattgaagcctgtgcccaggtaacctcaggggctcccctctctcacctcacttcctgcttatcttcatgctgtttccccctttcccaaccatgaactcttcccaccaggcataactccaaggaccatcattcacagatgacaatgtgaatggcgccccctcaagttatgctgtgcagctgccctgctgtcttcccctaatctagtttctcatctggcctcttcctgctcagatttcactcctatttttaaagtgtggaatgtgagatcaggcaaggatcttggagacaatgtaaagccgtagcatggagactcttaatgataaccaagcacaaattcatatccttgatcacattgatgctcatttctttattgcttttcgtattgagccaggcaaggttttggtttgaattcagtctctgcctgctgtgaggtctgcaacaaataacacaccctctctgacactcagtttccttatgtgtaaaatgggggtgattagacctaccttgttgggtggtgaagcttagaaatgatatttgtaaaatgcctagtacaacgcagacccttgataaatggtacccttacctcatgctgatctcaagcttaggctgacagataataaaaatggccgggggggagggggcggggtggaaatggattaatgcagcttggtaggcaaagtctttcttagagtgagtcccagttcaggttggtgggggtaataattgattgaaagatcaggcctggcatggtagctcatgtctgtaatcccaacgctttttgaggccgagtcaggaggatcgcttgaggccaggagttctagcctagctttggcaacatcaagagaccccttctctacaaaaagtttaaaaattagctagatgtgatggcctggctgtagtcctagctgctctagaggctgaggcaggtggtgacatggctgtagtcttcaatactcaggaggctgaggtgggaggatcgcttgagcccaggacgtggaggctgcagtgagccaaaatcatgccactgcactccagcctgggcaacagagcgagaccctttttcacaaaaataaaacaaaacgaaaaaagatcaggcctccgacttcctccaaattcctcattgtccagaggagaaaatagcccagagtggtgagtgccctggggccccacagctgagactgaaactggtttctggactttgggccagcaccaaggatttccccaacatcccctcctattagatattcttcatcccagcctcttcccttgtcctcaggtccctggaatgcaggagattctgctcattggcttctaccaacctgatgagcccctcacccagttcctagaagccgcccagcaggagtttaaccttccagtcaggtgtttgtgcacacactcgtatatgggggggtggggatgccctaggcctctgagttcttggaagtgggttgagtcagcatttgctggagttcatcctcgcctactagaaggattcttgtttggacatcaatgaatctctgagtatatagagtttctctgtgggccttgggcaggagtagtcctgggagcaagcggtggcggtcaggtgccctggctcatggtatctgtttcctaagatccactgagctggctctcgggtccctggggacaggtacctgcaggaatttgcccccctaggcacagggggtggtctttaccattttcgagaccagatcctggctgggagccccgaggcattcttcgtgctcaatgctgatgtctgctccgacttccccttgagtgctatgttggaagcccaccgacgccagcgtcaccctttcttactccttggcactacggtgagggggtcaggagggctggagggtgtagaggaggtgatcccaagagcttcccggaattcagggtgttggggaggcaggggcgccccgggagttggtgtgggagctggcgtcaggagggagatgcgctgctctggcagcatggaggtgttagtggagaccccgagccctctggctgttcagaagtagggagggggagggcagctgtcagtttccacccttgctgaaggcctgtcagtggcagagctgcatgccaggtgctgtagcggagggaaagaaagaaaaaacagacgtggctgccctggagcaggcgggtcactgtctcgggtgtgtctgtctttcaggctaacaggacgcaatccctcaactacggctgcatcgttgagaatccacagacacacgaggtgagagcagagtgggggctgggtgggtgcctactctgtgtcatcatcccctctacctcaggcctctagagaatgctggcacagtatggggtgggctctagtcttgtcagacaggtgagacactcccgattaatcatcttatatccctttaagagagattgaccagggggagggggggaatggttaatttccctgggggtggtgctgtaataaatgtatgcacagtgcatgatgggaacaccaagggggccccaacccagccttgctggggtgggagtagagagggcttcctggaggaagcaaggtctgagcagagtcccatttgtctagatgacaaaggagacaggaaggtactacaggcagagggaatggcaggtataaaggcctggaggcaggaagtaacataccagaagcaggagcatgataggcagggcagcagggctctgtcctgttttgtgaaactcccttctcctaagccccttgactttcacataaccctccctcctttatttatttatgtatgtatgtgtttatttatttatcttgagacagagtctcactttgtcttccaggctggagtgcagtggcatgatcttgggtcactgcatcctcgacctcccaggtttaagccatcctcccacttcagcccctcaagtagctgggactataggcatgagccacca

SEQ ID NO: 97609 - DNA, 20933 bp, Homo sapiens
aaaagggaacaatcttaaacgaataccttcttcagtcaccaagtattatcaattctactattgcaatgtaaattccatttggctctgcagggtcctcagaacaccaaactctctaaaaattctctaacaatgtaaaataatggcatctgtgcagcatgtaaggtcattaaagtctatattatagagaacataaggacacacatatcttaaatttttactagattcacatatattaacttcaatcagttttgttttttcaggagaagaaaaattcaatttttttcaggagaataatttagctcttagtgatatacttgcatgtaatattctggtaataaatttgataatacaagtttctttacaaaacagatatcctattttgttttgcccagcattctgagagttcaaaagataaggaacatttattagtatggacaaatgtgaaattcatttgaacaccaaatatgtgttctagtgattaattccctgaaagtattagattgctggctttcttttcatgagtgatgggagtgcggagattttttttttttttttttttttatgagacggagtctcgctctgtcgcccaggctgaagtgcagtggcgcgatctcggctcactgtaagctccgcctcccggattcacgccattctcctgcctcagcctcccgagtagctgggactacaggcgcgtgccaagagatttatatcctttaaaagaatctcagaactggctgagtgtggtagctcatgcctgcaatccctacactttgggaggccgaggtgggcagatcacctgaggtcaggaattcgagaccagcctggctaacatggtgaaaccccatctctacagaaatgcaaaaaaaaaaaaaaaaaaaaaaaaaaagccgggcatggtagcacgtgcctgtaatcccagctactcaggaagctgaggcaggagaatcgcttgaacctgggaggaggagtttgcagtgagcctagatcatgccactgcactccagtcttggcctgggaaacaagagcaaaactccgcttcaaaaaaaaaaaaaaaaaaaaaggaatctcagaattgtaatggaactgaaggcatagtctagtccaagcatgaaaataaacattggcttgcatatttcagacccaaaagaattcattgtgaatttagaaaacataaggtagttgacatagaatatttatgaaagtttgccattttctttcttatacctttcagctgttttttatgagccttgagtatatttttattataggcagcactgtccaatagaaatacagtattaagggaaccacaaaagtgaagcatatgtgtacaatttaaaatttctagtagaaatattttaaaaagtaaaaaagtgaaattaattttagtaatatattttatttacctcaatatattcaaaatgttaacatgtaaccagtataagaagcattaatgagatatttttatatcactttttcatacaaattctccaaaatctagtgtctgttttatacttagaacacatctcagttgagactaaacacattttaaatatggggagggatagcattaggagatatacctaatgtaaatgatgagttaatgggtgcagcacaccaacatggcacatgtatacatatgtaacaaacctgcacattgtgcacatgtaccctagaacttaaagtataataaaaaaataaataatagagacaggtggcaagtggctatcatattggacagcatagttacagagagtgactattgtcatctggattaaatgataaagtggaagaatggcaaaaattggcccatcggtgtccggctcaaatcccacttcttcctagatgcctctctgatcccatctgcagggaatgacattttcttacacagagctttttatgaaacctccctttaactttttctgtgttacttttaacatactgtctttgattgttattaatgatgcacaagtgctaacatccctatgccatttcatcgaggaatcttttagttttccctaagagtggagttccaaagttactatgtactgaataaagcagtatttccttttatttgtccacagtttcttccttccagacctcatgtggtagccttctaatgctatgcaatcttatatacatgtgtacgttcagtttatctgtaattttacaagttgtggtaggcagtatagtacaatggccctgcgattccttgctttgaattctgacttcattccctactctgagaccttgggcaaatctttatcctctttggttctattccttcatctgacaaatgaagattatttttattactctataaaattgctgtgagaattccataagataatgcacttggcaaatgctctgacatgcgaatttgctgtagtcagatgttttgtgtactttggtcattgttatatactattcctgagaccaatgtgtgatgcatagcaggagtcaataaatattttggtgcacgataggttgaatttttagttttcctttgttcttcaatcacttgctcagctgtctttgattcctcatattcacttattcatcaatgtctcagctattttggccatttctacctctgaaacagcttctgaatgtgttcacttttctatgtctcctctgcattcctcttgtcatagtcactatcctttcttttttttctttttctttttttttttttttttgagacagagtcttgctctgtcacccaggctggagtgcagtggtgccatcttggctcactgcaacctccacctcccaggttcaagtgattctcctgcctcagcctcccgggtacctgggactacaggcatgtgccaccacacccggctaattttttgtgtttttagtagagatggggtttcactatgttggccaggctggtctcgaaatcctgacctcatgatccgcccgccctggcctcccaaagtgctgggattacaggcatgagccaccaagcccggcccatagtcactatcctttcttaccaagaccagcagcctagatgatggatgatagcatttctcctcttaactggtttctctgtttccgtttgtgatttccttacaattcatataacattggttgaacatcctctagtggattttcattgctcttcaaataaaatctatgcttgtcatagtttccaagatctcacctgattggatttttatctaactatccagctcactcagttactatgtctcaatcatatgtatctctctcctcctcaaacatgccaagcacacccaccctacatggttttaatgcttgacattcccattgtacgtgcatcttccctccagttttggttaacctttttctgtcactgagttctcagctcgaatataatctccctatacccttccctgattaccaaatcataccaaaagatgtgattcatgctcatggaaaagaggtgaggatattctacactaacaaggtcacaaagtcaggaattagtattctatttgtcatttgtaaatgtcattcagtgataggggcatcctgaataataaatcactcatgaaaaattccatcctttccagaatgattcaattcattcctatattcactataggtattctgtagtgaaaaccttacacatttttaatattaattgtaaaagatttatgtttcttaaccttttctgtttgttctaattcttacatcttaaggcaaatgtcaaatggaatgatcttctatggggttaactgaggccataaaaccattttttgtcagttaaatatatatacgattactttttactctatttgagcacattttttcagcgatataaattatgtatgttattaagtgaaactgattttaaggaaacatattaatctttaaggttcagaatattactgaccacattatatcactaatggttatctgagtctttcttggccagttagattatttgttaaattttaatgaattaggtaacagtatcctggttgcttagcaaagcgcacttggataattgggatcatttctctaatcatttaaaattaatcatcacatgcctccaaagtatgatttaaaagtggaaataaaacacaaattacatttctattaggcatgtgtattctacataatttttggaggggataatcctctattttttgaattacatattaaaaaattagtcaaacactattatcattagatcactacagtttcttttccttctacccttcggtaatgtcttaatgtgactatgcctgaacttagcacttcattaagattatattctactataattgcatgatattttctcctaccatcctttttcataccagaagttcttagcattctactcactccatatgtcagacaagtaaggtaattatcagtgacaccttatgaatcaataagcaatggtatgcttctagacctcaggattatcttcttcattaatgaagcacttttcccacaagacagtgataactatgtctgcttaggaaatttgtttgacttctaccatataatagctgtttttcaaagcataacaaagtttaaataacttataaaattgacgtatctttctttccattctacaaacatgaagtatggaatgaagaagaataaagattgttataagtagcttttaatggattaaaaaaagctccaggttattggaaatatcagattactccactgaaaatttctaaaggcaatgctcactctcagagctttaatgaataatacatagacttggcctaggttatgatgaaagatggaccagaatgaaatgtgaatttatcatttattcactaatttatgcaacaagaactgggagtgccttttctatttcaggtgtctattattgtagttctctctcgttgctttttactactcccctgactatactgactggctttcactgatatctgattaacagttcttcaaacactggctgtctcctgaggcacatatgtgagttttctggaggaccttggaggttatttccattgcctatttccttgacttggcagacccagctctggttcaacatttgtaactcctattagctccttcatctggcatcatatctcactggtttttgctgctaggtcttcttgcacagtgacagtgatcttgggttgggtaatggtaagatgatccaagactgatcactctctgttgtcatacttgacccatgggagactctggcatttttgttcaggcaaaggtgggtgtacaaattgctccacagcaacactttatttgttctgctttctgtttctagtttccctttgctctgctcagtaaggaataggggcagagcaggaagtctgctgcctaagtacctgtccaattgagagatgtcaatccttctagcaggcactctagatgtatggtagtgatacacatgggcccctcctcatttagctggagtcagaatgtgtgcagaagcaccttatttcccattctgtgggcagccaaggaaaagccatgatattctctgctaggccagaaacttgggaccccattgattttcttctttcccttcctatagtcttctgtttacatggagttgagagagtaggtcgtaggtactatccataatgattagctatctctaaaatacatttttacatttttttgtttcaggtgtgcagaagagtaaggcctactctttatgtaatgtatctattatatgcatatacacttaaaaatcagtatttgtgtttgtatgcgtatatatacatgtgaaatttaaaaacacatggagtctattggtcttttattacataaacttctaagacaatccactatgcttatcactctgtgaacttcactgagttattctgcctctactagcctaaaattattccttagtgaacataggaaggatcacaacctctaccttgtagtagtaattactataaatatgattattacggaattagtgctttttaaactttggaaaatataaatttacttttctctttctctagatatcatactgcatgccatccagacaggaaaagctgattaaagtgattgtttatggcaacaaagccaaagtaaaaaaattgactctgggcatggactacatgtttcaagtgaagaaagttaaaggcaaaggttacagtgtatctgtaatgaaaaaagtgcctataagtaaggaaagatcataggtagtatttagttttatagttctgtaacacttgaaaatattttggctaagcatgattatggttgttttaagacataaaagctgataagtaatgatgatcttaagaatatgattaagagaactcaaaaaacatgtgaatttaaaaaattatttgtatgtctagatatattgagagctacacacagagtttttaaaaataatctgaagccaaaagtatgcatatatgtgtgtatgtatatattgttatatatgttagatacatggaatacatatgtatacacatgtatatatattatgccataataatataagcacaattcattttctactgacctgagggttgataaacagagtaattctgtttctctttcctgaagtttgtaaatttattataaattggtttgtaatgtttttgggtgaggtggaataatagtattagttatcaacagttctcatgaaaatttgtgaggttgcctctcagtggagactaaatgataatgcaagtagcaacattagttgtatcgatgaacagattaaaaatgcagcaatataggaatgctaaaagctttgatgtaacaagaagacatttggaaatgcccttactcctagccctcgctccctctctaacttattctctttcatcttcattcggtatctagctatgtgcttggtggtagctaacaaaattctgattatgtcatataaggatatgtatggctacaagcactcaagaggcacaaagctaaaggaatgcctttatcacgaatgatttatgactgatgaaggaaagatatttgggaactagagagaatattgttgtgtcacttaaattaaaacccatatgtaatgtcttatttttctatttgcagagataaacatatagaacattatacatgagtaaattaaaggactgttacatagatatttaaattataatattcataattgctttatttttactaatatatgtgtaatttctatttatatataatttaccttttcattagaaccatctaggatttgtggcttaattttgaaagctgtgaatatttcttcaaatttaatgtggaatacaacagagatcaatttcacccattataagatttatatatcaaatagaacatttgcaaaagactgtcttatttgggaagtggtgactgagcacacagttacagatgtgactcctggtgtaatatataacatcatggtacacagaataagaggcaaccttggaggatgtggcatgtttaccagggttgttgcaggtgtgcaaattctctttgatatttaagaaattcacatttctgttatatattgtattgttcaagataaaatttcaatagaattttttgaaatttgaaaacttacagtctatagactatttgagaggatgaaaatgctcattttagtgggctgttctgcagatttttttttttttttaataagacagagttttgctcttgttgcccaggctggagtgcaatgacgcgatctcggctcactgcaacttctgcctcccggattcaagcaattctcctgcctcaggctcctgagtagctagattacaggcacacactaccacacctggctaatttttgtatttttaggagagacggggtttcaccatgttggtcaggctggtctcaaactcctgacctcaggtgatccacccaccttggcctcccaaagtgctgggattacaggcatgaaccactgcgcgtggcctgttctgcagattttygacataacatgtgaaatataaattgaataaaacattatttgacacacagtgatcaataaatgaggttaatattatattcagtttcacaccgaattagagatctagccagtggaattatgtggtatatttgggatcatctattctcctaaaaatgtgttctttgtctttgacatcctaatatgtgttatacacatgaaaaagcatagtcttatgatatccacagcatartaaagaatacaagtatggaaacacatgtagtataagtcagtgcaacaggcraagcaatggaagtatgtccaaacttattgtagttgcacagaagagggaaagattagccctacaaacgcaatagagaaagctctttggggctggtaatgtctgtaaaaggattaggaatttgctaatcagactagagagcatatggagtgtgtgaaaaggaggactcccagaggtagggaacagcccatgcaaaactatggaggtgtaaatgaatatgctgtatttgtggaactataagcaattcaatattgaaatattttgttgttttttaatatataaagagaataaaatcctatcctgagtaatttagagagtaatttttaaatccaaaggaagctgtgaagcctatgaatattttaaatttttcaaaaaagaacaagattgcaagagtaacacatgagaattactcttaagtgatcttgaaagctatggattggacaaccgacccgaaggtcccagacatatggtggtaattcagggtatgggtaattattatttggctgtcaacactttcttagtttcttatttttactgtagcaaattatcacaagatagtggcttaaaataactcaaatgtgttatctcatagttctgtaggtcataagtccaacatacttctctctggttgaatcaaggttctcgtagggctgtgttcctttttggagattctaggagagaataagttccttgctcattcaagtagtttgcagaattcagttccttgtggttgcagaactgaggtcattatttccatggtggctgtcagctgacagttgtttccagattttagaggatggctcattcctcgacttgtgatcctcttcctacacccaataaaggagggttgagtgccactcrggcttcaaagctcccctttccccccatcatatatgactcttctgacttcctcttttacttttatgggctgttatgattagatcgggactaccaggataatccagttttgatctctgtttatagtttataatcttaattccatctgcaaagtgccttttgccatgtaacacaacatattcaccgttccagggtttagcatttgggcatcttttgtgggggtgggccttacttatactgcttaacacatacactattattctcctaaatgtgatatatatgtgataatgcaaaacaaggaataaatttagaattcatataccagctttactccaggatttgacactggttagctgagtactactgggcaagttacctgatgtctttgggtatcaagtttctgagaaatttaaattagatgacctctgagattccttttgactcatacacattctcctaacactttgcacatttttgttctatttctacagataatctatgacttacaatgccacaatttttctactttacaatgatgcagaagcaatatgcrttcggtacactcctcaacttacattggggttacatctgataaacccagcataggtggaaaatgtcacatcaattatgatgggttatcaggatataaccccattgtaagttgaggagtatctgtgtatattaatagatactatataccttatctacttctaaaaagcaaatgtgttaaatcatgtgtcaaatgtcttttactacagagtattatgataggtaatgtatacaatcgaacacactaaaatgggacccattctagaggttttagtctgtggcagygtttctcagcctcaccactattgatattttgggctgagagattctcctttgtgaggatgtgtcttgttaattgcaggatgtttagcagcayccctggcctctactcaccagatgctagtaggatcyttccaattgagccaatcaaaatttttgttagaaaattgctgcaagtcccctatgtggcaaatcacaactagtggtaaatgcagatatatttagttagatacaaagatcaaatagatcattgagcaaagactgaagaaaaaatatgaaaaattattttgtttatacataggtaaaggaaagagtgcagttagtgtgagtggcaggatttgctcccttagagaaaattttgtcagaggaaaaagtgaccaaggtggtatcaatatcaggaaagtttcataaaagatacagaatgtttgttttcattttacttaaagaaaagagagctttataaaatagtaggaacttgatgttctggtcgcctagtgtggtttaggtgatggttttgagagattgcaggtaagtaattgaagtccctgttaaaacagcacagtgacttaagagatgagtataagaagaggaaatgggaaaagatggtaatctgggttccctggtggaggtctccagagcaggaagacatcttgctgtcctagtttttataaacagaagagcrgtgatgatggagcagtgcttggggatccattttgagcaaagcattgagtggatatgaggagggggctaagctgagaaatgaagaacaggtaacatgatggtttgactaagagatgaccagggcttttagagaaaaatagtagaaatagcaagagactattaatcatagcttacatttagtacttagttcttactatgttcaaggcagtcttctaagcacttcacatgtattaacttattttattttcacaacaatgtgtgaggtgttattatacccatagagatgaggctggtgaggtatggagatattaagtattttgcttaaagtcttgtttatatggcagagtcaggatttgaacccagcaatccaactctagggcctgtgcccagtgtctgtattaaaaattgatttttacrccctggtgacatccgatataatgctgactttttagaggatgtttattttatttataatttattcatagcctatttctaaaatatgaggaagctacaggcacttgataagtatacattgccctggtatgggacatatttagactgaatcccttaagccaaaattagaggtcacttcaaataataatcataggcttgaaagaaaaattatagatcatctaattttgtggttgaatctattttaaagtattaattaattcatttaggatttttaaaccwgctgttatttgtaagccactttgtgaaagttagaggagcacacagttatcatagtgattgaaaacttgaagactttgcctctgggtctaaatcctggctctaccatttacccattagctatgggacctgttggaattacttaaattctttgttcctcacttttaaatgtcaataatagtattcctggtgttgttgcaagtgttacataaaacaatatatgaaagtgcttagcacagtgcatagtgtgtcataaacttagtaggagttagttctttttattttgtaagtctgctgcttgtacatctcattatctgtcatagaatacattatgtccgatctataatttaatcacagaaaaattaaaatgtgagatttaaaacttatcagatacagtgttagtgcagagaaaatataaagttaacaatgatgatgaaacttttaaagtcttagcattttattttaaaatatctgcccattgtagtcttttgctttcttgataccattttgataggtctgactcttttttaatgttctgagwtatgtaagattttgtatatattggatgtcttcccaactctgttgagctgtttcctttatagacaaagaccatgggatcttatttctcagcttctcaaaataaaatttaggtaaattcactgaaatgccaaggaaaaacttaagagatgctgtagtagttaaagctgtactgtccaatatgtagtgtttggcagcatgtggctatttaatcttggaatatggccagtccaaattcagaggtactgtaaatttaaaatgtatgtgaaatttcaaagagttagtatgaaaaaaattaatgtaaccacttcaataattttatagtaattatatgtgaaataatgcttttgatatattgggttaaataaaatacattattaaaattatcttacatgtttctgtttactttttaaatgtggctactagaaaattcaaaactgcatgtgtggctcacgttatagttttattggacattgatggtttagagaatcacaagatatattagsatatctgaggctttaaaatacactgcaataaagaaagctgcttaacttaaaaagaacttatttgacaaagtggtttgattacagaacatctattaagctctaatgatatarggttctgaggattaatttttaggaaattaaagtctggaagaaacacgtaaataaacctagaattccttttgcttgccctaattaagttgaatatgaaatgtttttttttcctcttaaaactccaaacatttcaacttcccaatgttatttttattggttagtaagaattaggttgagaatagtatttttgttttttggtttcctattttttgagagattaaattccatggagaataaattatatatttattatggagtctattttcagttagttgaaccttctagctcttaaccagaaagctgcactctttcataatgatttaagcattgctgtagatcctctacctttttctgagtgcaagctttcctcctctcggcctagactaccatgatttcctactaattagcttcctgctgccatttttgccttgctctaatttatatcccatatttcaaaattatatttttaaacaaaaaacaagccctgttgctttcctgcttaaaattcttcagtggcttcccattgaatttaggtaaaaaaccctaaaatctctagtatgacctacatgatcatcagtctgttcccctttcttttttgatcccagaatctcagtctggctttcctcagttactccaatcctttttcatttccaggacttccatacactttgctatttggaaaggcctttaccaaactcttgtgaagattccaggccttccctcttgatcagattggcaattgtccagaccaatatatttttctttgtcttggtgagacatagttcattcctaagcaagggttcttcagtccaggaaaccacatcccatttcactgccatcccagtaactagtgcttcacttctcacatcttcctttttcttccaaagtcttattccatatcttcattagtttcttgtctaagacttcatagatwctagttactctctggggtccctgaagcaatagtattaaccctcacacaaatcagtaaatgtgagtagtagttggttagacggatcagtcatggtagatttttgtgtattttaatgtagcagataggagattcaagctttttttctctcaagcttgagaatacagagggcataggtctggcttaccttgtaaaaaatgccagcagctaacaatgaaattctacccaacacaggctgggtatttctctgattttttgccttgggtttacagtattcctagagttaccagaaaactatagtggacaattagcggtggatgccaagagaatgcttggaactttgagaatgttggggtggacattaatcaattgatataagctttgggtatggaggacaacgttatgttataatcattagaagaaatttcaaaggcgataaagaaaaactatttcagaaacgctcttccctgaaacaccaagaaagtgacctattatgttaatatttttgttatatgcaatgtgccctgttagttttgttagaaaatgtacattttattatatccattttcaaatcgtttctggtagtggggttttaaaatgataaatgaggttcaaaattaattccagcctcctttcttttagaaacagtgttagattgaatctgcatcaggcgtgttttcacatgcttggcttcataatctctcttcctccccctatattgtttgcctggaatctgcactaaagataaggcagagtgcaaacctgactcattggcaaccaatcagaagaactttatgtggaaaactcccttcgaggaggtacaggcagcatgaacaaaatttttgaaaaagtggaagcaaaggtagaaaaatatggttgaaatggctaaaacaattggtacttgttttaaaactatatttcatttctgatatgaaaccttatcttttcttttaaagaaacacctaacaaaatatttatcagatcagcaccacagtaaagggaaaaagacattaaaaattaaaaaagataaaataacaaatatttatcagaaatgctcacccttcaaaaaatctggaagattttgattatatatttttccaattatcttctgtttggtaaatttccaagtaattggataaatagtttatatttactttgttttaaaatgactcaaattttcaattagagcataagctttcaaaaacaatctggtcaactagcagacttttagcaaataagacatatttcagaaacagaaaattaattgttatattatttatgatagttatacctaaaacctaggtgttgttaaatatttacatgtttaacacccaagtatacttagagatcatttattgtactcagtgatttctaacaacatgattattttggaacttgaacctatactatttgttttcatttttttgaaactttaggagaataactttattttaaacctctatttttcaatatcagaaccagaacaacctgagaaacttagagccttcaatatttccacacattccttttctctgcactggagcctaccctctggtcatgtggaaaggtatcaagtggatcttgttcctgacagtggctttgttactatcagagatcttggaggtggagaatatcaggtatagttttcattattgtacttgccgagcctacttgtatttatattttgctcctaataggaaagttctttattttatgaaacccatctaccacaaaaacttactccttgttgggtttttgaaagcataagttgaagacaaaaacgttgatgtcaaactgatgagtgttaagtttcagcattggtggactgttaccttagcaacatctatgctgctttttttttttttttttttttttaagttcaccctgaacctacagccagtcatccaagggttcatgaatagtttaacaaagaaaaggcagagctattgagtaatacgggctcattaattgtgtacttgccagaaggatctgtctttaaatcattaatgcaggcaacatttctctctagagccatcaatgtgattctactggctgaaaaatgtaataaagatggattttcttatcatttttcttttactttttattgggacttcagagacacaggtatttcgtatacactctttaaaaacaagggctaagtcatgggctgtagatttctcaagacttgaatagttgttccttgtgacagtgaactaggatagatagaaatgctgacttaggctgtgataacgcagtacgttttgtaagtttttattttaaagtcatttggtaaaaagttatataacatatttgtatcttacaataatatggaacttattgtgatgttataaacagtgcagagttatatagtgaagagttaatttttgttatagtgatagatttattttagcttgcttgctttccagaaagaattttaatgcaactatttgtttgtggtgttctaggttgatgtttccaatgtcgttcctggtactaggtacgatataaccatctcttcaatttctacaacatacacctcacctgttactagaatagtgacaacaaatgtaacaagtgagtatatgttttaaattactttgtaagtaaagtatttggagtcagtataattctactggatggaaatacttatactggcaacatgtacattaaattcatgaaaacagtgtagaataaggcaaaatggaaacaagaaagtgatctgcttagaacctgcattctgctgtttcttcagcttcctttactttcaaagtgcaaagataattactctatacttgtttgtgaaatagatcagagagactgttaatgctaacatttaaataatacagaaccatgaaaatgaactggctacatttgctcaggaaggattattccatttgtaagattatttcttgttttcttagtttttctgtgtaagccttgcgtaagtgaatttcttttaaaaatgatttggcaacaaaagtatattcggcatgtagtatttatttagtagcattccatttttcacattcttataaaggaatgcttttggtattccacatagtatttttttaatagtaacagagctgtagggagtgtgaactcatattgctctttggaaatttcaaattttacatttataaatactgttattatgtatttttgtgaaaatgcaataattatttgaccttttaacaaaatggattttttaaaaatagaaccagggcctccagtcttcctagccggggaaagagtcggatctgctgggattcttctgtcttggaatacaccacctaatccaaatggaaggattatatcttacattgtcaaatataaggaagtttgtccgtggatgcaaacagtatatacacaagtcagatcaaagccagacagtctggaagttcttcttactaatcttaatcctggaacaacatatgaaattaaggtaattattttgtgtatgactacttagtgttcaaacatttcattcattttaaaagtgtgggaggtttttctcaccttgtcaagcctttacagctgaatacagtcagtgactgacaacgttcacagtcatggcctcacacccacctgagattttaaaacttggtaaaatgttattgtgtcttttcatttcaattttatgcatatttatatattacctatttcattttttctatgaatatttttgcatatatttatatacatgtatgaatataatacaatactctaggaaataaaaattatgtaaagttaaagaaggaaaacttaaatgcaaacaagaggccagggtagtttgaatgcaggtatgtaaaccacaggatgttacacagttattaaaaattgacttgcaaactttattctccaaattcctagaaaccacagtaaaaagggcaataaatctgttatacaatttacgtatgaaaattgtataataattgcatatgggagctcaagttttttttttttttggtgctttagactggaaagaaagtcttcgttgaaggattaatagctgcaggactggattttgtaaacttctttccataacagtaaaataataaaagtatacttagtaaaaataattttgccaggttttgagatattgtggtctaagaacatggccttgttctgtatataaaatttagactccaatgaaatgtcttttttttaaattatttttgattcaggggacatgtgtgcaggtttgttacgtgggtatattgtgtaatggtggggtttgggcttctagtatacccatcacccaaatagtaaacattgtacccaataggtaatttttcaatcctcaccctctcctaccctccccatttttgaaatcccgtgtttattatttccattgttatgcccatgtgtactcatagctcccacttgtaagtgagaatgtgtggtatttgattttctatttttgaattatttcacttaggatatgttctccagctccatccatgttgctgcaaagaacatgattttattttttatgcctgcatagtattccatggtgtatatataccacattttctttacccatatgatagatacttaggttgattccatgaccttgctattgtgaataatgctgtaataaacatgagtgatggtgtctttgtgatacaatgatttcttttcctggatagatacatagcagtgagattgctgggttgaatacggtagatctattttcaggtctttgagaaatctccgtactgtttctcatagaggttacatttctagcaacagtgtattagtgttcccttttctctgcatccacactgccatctgtttttttgactttttaatagtagccattctgattggtataagatgatgtctcattgtggttttaatttacatttctttgataattcctaatgttgagcattttttatatacttactggccacttgtgtgtcttcttttgagaaatgtctgtttatgttttttgtccactttttaatggggtttttctccttgtattgttttcattccttgtagattctggatatccatcccttgttggaagcataatttgcaaatattttctccagctctgtaggttttctgtttactctgttaattatttcctttgctgtgcagaagctttttagtttaactaagtcccatttaagtctattttagtttttgttgcatttgcttttgatgtctcagtcataaattatttgcctagtccaatatccagaagagttttacctagtttttcttactagtatttttatagtttcaggttttatatttaagtccttaatccagaatgtgctaatttttgtatatgctgagagctaaggatccagtttcattctcttggatatggccagccagtttccccagcaccatttattgaacagaatatcctttccccattgtttatttttgtcaactttgtcaaaaatcagttggttgtaggtatgtgactttatttctgggttttctattctcttccattaaagtatatctgtatttttctatcagtactgtgctattttagttactatagctttgtagtataattcgaagtcaggtaatgtgatgcctccagatttgttctttttgcttaggattgctttcattatttgggctcttttttggtttcatatgaactttaggattgctgttctaattctgtgaaaaattacattgctaatttcataagaattgtgttgaatctgtagatttctttgggtggtatggtatgttgattcttccaatccaagagcatggaatgtttttccatttgtttgtgtcatctctaatttatttcatgagtgtcttgtagttctccttgtaaagattttcacctcctttgtaaaatgtattcctagatattttattttttttgtggctatcgtaaatgggattgaattcttgatttcattctcagcctgaatgttattggtgtatagaaattccacttatttttgtacactgaatttgtatcccaaaactttattgaaattgtttatcaagtctaggattattatttttgagttgtcgttagagttttctagatatacaattgtgtcatcagtgaacaaagatagtatgcttcctgttttccaatttggatgcctttttaaaattattgtactttaagttttagggtacatgtgcacaatgtgcaggttagttacatatgtatacatgggacatgctggtgtgctgcacccactaactcgtcatctagaattaggtatatctcccaatgctatccctccccactccccccaccccacaacagtccccagagtgtgatgttccccttcctgtgtccatgtgttctcattgttcaattcccacctatgagtgagaatatgcggtacttggttttttgttcttgcgatagtttactgagaatgatgatttccaatttcatctatgtccctacaaagggcatgaactcatcattttttatggctgcatagtattccatggtgtatatgtgccactttttcttaatccagtctatcattgttggacatttgggttggttccaagtctttgctattgtgaatagtgccgcaataaacatacgtgtgcatgtgtctttatagcagcatgatttatagtcctttgggtatatacccagtaatgggatggctgggtcaaatggtatttctagttctagatccctgaggaatcgccacactgacttccacaatggttgaactagtttacagtcccaccaacagtgtaaaagtgttcctatttctccatatcctctccagcacttgttctttcctgactttttaatgattgccattctaactggtgtgagatggtatctcattgtggttttgatttgcatttctctgatggccagtgatactgagcattttttcatgtgttttttggctgcataaatgtcttcttttgagaagtgtctgttcatgtccttcacccactttttgatggggttgtttgtttttttcttgtaaatttgtttgagttcattgtaggttctggatattagccctttgtcagatgagtaggttgtgaaaattttcccccattttttgggttgcctgttcactctgatggtagtttcttttgctgtgcagaagctctttagtttaatgagatcccatttgtcaattttgtcttttgttgccattgcttttggtgttttagatgtgaagtccttgcccatgcctatgtcctgaatggtaatgcctaggtttacttctagggtttttatggttttaggtctaacatttaagtctttaatccatcttgaattgatttttgtataaggtgtaaggaagggatccagtttcagctttctacatatggctagccagttttcccagcaccatttattaaatagggaatcccttccccattgcttgtttttctcaggtttgtcaaagatcagatagttgtagatatgcggcatgatttcggagggctctgttctgttccattgatctatatctctgttttggtaccagtaccatgctgttttggttactgtagccttatagtatagtttaaagtcaggtagtgtgatgcctccagcttcgttcttttggcttaggattgacttggcgatgtgggctcttttttggttccatatgaactttaaag

SEQ ID NO: 97610 - DNA, 18150 bp, Homo sapiens
cactcctagcattctctctcagggctcttttcatttgaatgacctagaggattgagctcatgtaggcactgaaggcttccacctctcccatacccgcaaggccgatctgccttcagctcccagcaagtgtggggcagcgcgggccacagagtagggtgcagggatggggcccctgcagcacccagggtctctggtatggagacagcagtgtggagtctggaaactcagagtccttctggctgccgccgcggctttaccatctggagagccaccacgctgaagcctcctccaccctgagcgcttggctggcttcaggcctgtctcaagatgcaaggagaggatacaccaccatcctgctggctgctctgagtgtcacccccctgaaagcagcacagggtgcccctcccatcctggcaccccctacttctcccccagtggatgcagaatgtgctgggccaggtgctggacgcgctggaatacctgcaccatttggacatcatccacaggtaagtggggcccctgacctctgcggactggctggctgcttcgggagaaaaggcactgaggccactcgggtgccagtgcccgtgggcaggatctggggagaaaggtgcaccgggccagtgcagccaggataggatgggaccttacagagctcctcccgggcttgaaagaggctcttccaagtggtctcaagccatgtgcacacgcacagctgcatggggtgtgcgctagccaggcgggctgctctagagttcgtggaaaggaaggaggcaaaagccctgccaagaagagagaccgggttgcctgccgtggggccagtgtgggctgagtgggccctgctgagcctttgacccccagcggcacaactttcaggctggagaatccatggtctgaaggggctgggagatggctccaattctgaacaccaatatcttatttaaagaggaagagggaaactatgcagctgggcgtggtggtgcacgcctgtggtcctagcaacatggaggctgagatgggaggattgcttgaagccaggagcttgaggctgcagtgagctatgatcgtgccactgcacttcagcctgggcaaccctgacttaaaacacacacacacacacacacacacacacacacacacacacacacaccacgcagaccatacgtacaaagggaatgctcacattccacatccagtgttcatgtcactagacgtcgcacaatggccaaaaatcaatccccaggcaaacgtgtagctgagatatctaaggaggtgaatgtgtcaattaaggggcctcttcggagtgctgggtgtgttcctacttgtggttgaggatttttcccccgatttaaaataattgagtatatttctgtacataggaaacaactgcttaaaaagtaggctgagatggggcattttgtggaggagaggaggatgtgggctgctgctgcagaaccaggtggggcagggagcagagagtcaggctcagcacacacactggtcccacctggggttgtgggtggtggctgcccaggtggccccttggcatccagaggcaaacccacctcttggtttcaggaatctcaaaccctccaacatcatcctcatcagcagtgaccactgcaaactgcaggacctgagttccaatgtgctaatgacagacaaagccaaatggaatattcgtgcggaggaaggtggcaggggctcccccaggttgtgggagagggggttggcgcctagaatccaggcggcgttggccactctgggtgctggagtgaggcaacatcaaacagctgtttgctcagaaggtccccacaaagccctggccttgtgtaaactccaaagagacctcctttgggttgcaactgagcaggcgtgccaccaccagggcagaggcagggccccacagacacccaacatttgagagaaacaaagtcgtggttgtttgtggtaccccagaaaatgttgcctctcatggagggaaaagaaagtgtcagaaggaaggatatgaaaatgcccaggacggagggaggtggggggggtcagccccccgcccggccagccgccccgtccgggagggaggtggggggctcagcccccccgcccagacagccgccctgtccgggagggaggtgggggggtcagccccccgcccggccagccgccccgtcagggagggaggtgaggggcgcctctgcccggccgcccctactgggaagtgaggagcccctctgcccggccgccaccccgtctgggaggtgtgcccagcagctcattgagaacgggccatgatggcaatggcggttttgtggaatagaaaagggggaaaggtggggaaaagattgagaaatcggatggttgctgtgtctgtgtagaaagaagtagacatgggagacttttcattttgttctgtactaagaaaaattcttctgccttgggatcctgttgatctatgaccttacccccaaccctgtgctctctgaaacatgtgctgtgtccactcagggttaaatggattagggcggtgcaagatgtgctttgtttaacagatgcttgaaggcagcatgctcgttaagagtcatcaccactccctaatctcaagtacccagggacacaaacactctgcctaggaaaaccagagacctttgttcacttgtttatctgctgaccttccctctactattgtcctatgaccctgccaaatccccctctgcgagaaacacccaagaatgatcaattaaaaaaaaaaaaaagaaagaaaatgcccaggacggagggtctgtgggtgccaggcactggctgcgtgtacatcactgagtcctacaacaacccaggagatgaaggggtgggtggcaaggggagacgagttctcgttcctttgaaaagatggccagagaaagggggctggagagatcaaccacagaggaggagtccagagtcccaggatggcagttgctggttgcactctgtccttttttttttttttttttttgaggcggagtctcgctctgtcgcccaggctggaatgcagtagcgcaatctcggctcactgcaagctccgcctaccgggttcacgccattctcctgcctcagcctcccgagtagctgggactacaggcgcctgccactgggcccagctaattttttgtattttttttagtagagaccgggtttcaccatggtctcgatctcctgacctcatgatctgcccaccttggcctcccaaagtgctgggattacaggcgtgaaccaccgcacccggccacactcagtccttggtagacagaagatgaatgagtagatgggtgggtgtgtggtttggtgggtggtaggatggataggtgggtgggtaagtggatggatgatgggtgggtgagtggatggatggataggtgggtggatagatggatgaataggtgggtgggtgggtgagtggatggatggatggatgagtggatggatgaatggatggatggatgagtggatggatggatggatgggtggatggatggatggatggatggatggatggatggatggatagataggtgggtgagtgaatggatgggtgggtgagtgaatggatgagtaagtaagtgaatgaacgagaggaaggaaggaggagaggaaggaaggaaggaaggaatgaagaagaggaggggggaggagaggaggggggggccaccagggggggggaggagaggaaggaaggaaggacgagaggaaggaaggaagaagaggaggggggacgagaggaggggggggccagcagcacgcgccactacaggcgacgtggatggatggttgggtgggtagatggatgggtgggtgggtgcatgcagatggatggatgggtgggtaggtagatggatgaatgaatggatggatgagtgagtgggtagatagatgggtgggtatgtggatggatgggtgagtgagtgaatgaatgggtgagtgagtgaatgagtgtgtaggtgggtgaatggatgggtgggtgggtggatggatggatggatggggtgtgcgtggatggatgggtggacagacgggcagatggttggttctattggaggtgtagatggcatgcgtccttggagtccagccctttactgttgggctggggaatggaggtccagagaaggaggggctgcctgaagccaaccagggactgatggactcagaggagtctgctcttttgcctccctgtctggggttccagttgagaaagtagggcagagcaactgtaactttgcccccaaggtcctgacatttagaaggggcaagaagtttagaggggtgcacagtttcttggcacgtgcctcttccaactccttctacagccatccagggcacacagacacaccacctatatgggccagcctggtgggcacccaccaagatggacagcttcagtggctccagatcaacacaaagctcccgctgattggggcctcttcctccccacagttaatattctccacctcttctgagaagaggacctgcagggcttgtgtttcaagctgcttgcggggggccaccaaaggggatacagtgctgggcagggtgactctgtcaagcccctgcccccagggagcaaaggactcagggatcccaccttgcttttaccaacagacccctttcgtaagtcctggatggcccctgaagccctcaacttctccttcagccagaaatcagacatctggtccctgggctgcatcattctggacatgaccagctgctccttcatggatgtgagccgccctccctcccccacaccccacatgctgttccccacgcgcccaggcctggggaaaaggcttggcctcaccctgcctcccctctgcatcccttcccctggctctctgcaggctgcacagagccctcttctccacctgcgaggggcctgccctcctcagaacccctcagcttgcagcacctgctgggctctagcaggataatgacagcagtggtaatattcagaccatcccacgcgaccctcgcagcagccctccaggtggtgtcactgactcttgatggagaaaagccaagttcaggtgcccttgtgagcatgaaggctgcacggagttgcaagcaacgggaacccagtgtgggcctgaacacacctggctgtctcatgcacaagccccaggctggtgtggaggtgccttctctcctcctgcacatccttagcatgcagctctttctctcatccctgctggggcccctgcaccatggccacagcctgtgggcaggaaggaggggaggcagagggccccactggccccgcgagcactccaaggtcactctggctgcagggaggcagggaagtccagcctgtcgcttcctatcctctatatgcagaagagaaaagtggggaaggcctgccatgcccaaaacaaggaagctccccttctccgcagcaccacctgcaggcaccgaggtccccagaaaggacagacacctggctggacccaggttccccatggtctcccagacccccagactccacctctgagaagcaccttgccactcccttcctttgaaagactcccagggaaatgagagccttcccacttcggaggctgtgtgacatcctggaaattagcctgagctccagccccagcccaggcagtgtgaccctgggcatgctcacactctgtgaaatgggcatgctgtcttactggctgggtctagatcagggggctttcttggcaggactccaccccgggagacaacccgctggcttctctgaaactccatttcttcttatggaagagcttggggcccctggggtctctgggcattcttgtagacggtggccacacctggctctccctggtctcctcctggatttcttggtccctggtcgtcccctgcccatgctgggacctagttttcatttacttaagggaatacacagagctgtcctctctccgtgcagggcacagaagccatgcatctgcggaagtccctccgccagagcccaggcagcctgaaggccgtcctgaagacaatggaggagaagcagatcccggatgtggaaaccttcaggaatcttctgcccttgatgctccagatcgacccctcggatcgaataacgataaagtgagctcagggtcggggtttattttaacctgtggatttatctttcaacatctctccaccctaatacaagcacagctagttggctttgtaacgcctcaaagaactccatcacagatgccctgattatccctgcacagctrggctttgcccagttctggctctcccaaaccgtgctgcggcgagtaatcccgaatgtacggtggagtgagcagactgacccccaggaggcacaggaggcgtagcccccaggacccacgacacttttagggttccagaaaaaagttttcattctacataaaaaaaaaaattcctaaagacaatggtcacctttaaatttttcattctaacttactttaaaatcagaagacaaaagtaaatacataacactggccggggcrgtggctcatgcctataatcccagcactttgsggggctgaggcgggtagatcacttgagctcaggagttctagtctagcctgggtaacatggcgaaacccctgtctctacgaaaaatacaaaaaattagctgggtgtagtggtgcatgcctgtgttcccagctactggggaggctgaggcaggaggatcgctcgagcccgggaggcagaggttgttgcagtgagctgagatctcgccactgcacttcagcctgggtgacagagtgagaccctgtctcaaaaacaaaacaaaaacatataacaaagaatccaggccggacacggtggttcacacctgtaatcccagcagtttgggaggctgaggtgggtggatcacttgaagtcaggtgttcgagaccagcctggccaacagagcgaaaccccgtctctactaaaaatagaaaaaaaattagctgggcatggtggggtgcgcctgtagtcccagctactcaggaggctgagacagaagaaatgctggaacccgggaggtggaggttgcagtgagccgagattgtgccactgcactccagcctaggtgacaagagtgaaactccatctaaaaaaaaacccaaacaaaacaaaacaaaaaacccaacatatagcaaggaatccagcctgggtcatattcatctttataccaacgcagttgtaaaatctgggttttcatgtttctatggaggcaggggacaagagcaaaagtgccagggccccggactgtcccccagctctgtgagctgaggccctgcctccatggagtacgtccctgggtgtggaattgctggggtgcttgccggacacactggggacactatgagagaccctgccaaatgaatcccaaaacagggagttcagtgtccagtgtccgcaccaatgggcagcccggagccagaggcagagggagagccccacggggaggtggcagggggcgctgctgggttactcagccctctctgctcctctgctagggacgtggtgcacatcaccttcttgagaggctccttcaagtcctcgtgcgtctctctgaccctgcaccggcagatggtgcctgcgtccatcaccgacatgctgttagaaggcaacgtggccagcattttaggtgatgctggggacacaaagggggagcgtgccctgaagctcctgtccatggccttggcatcctattgtttagttccagagggttcattatttatgcccctggccttgctccacatgcacgaccagtgggtaggaacagtttccctccatccatccctacacactgcccaggacaccgctctgctcaaatatcctccatagctcccaactacctataacacaaagttcctctccatagcctggcccccacctgttttccctccgctcctgctacacaaatcctctatgtagctcaatggcctagtcactgcccacgcctcccacaaccctctgcttttgcttccacagcctgggtggcacacagtggtcccaggacatcttcctcacacagcaccacttccttcctgcgtgcttctatgtgcccaggatgagcagaagtgcgctccatcatctgtgtgctccaagacagagacttgggttctattaaggaaaagtygcttggtctcagtggcctcatctgtaaagtggggatggtaacagcccctccctctcatcctgaacctgtggatctgaggaggggatgcacacacagcagccagcccagtgtggtgccgagaaacagagccccgaggccctggtcctcagaaaggtccctcccctgccttcctgtccctgcagaggtcatgcagaaattctctggctggcccgaagtccagctcagggccatgaagaggcttctgaaaatgcctgcagatcagctaggtaggccccaccctgcacccctttcccagctgctcccctaggggcagaagctatggtccggcctgtggggagctgaggctggccctcaccccgggctctcctcgccagtgctttattgcagcgtggaggcgtgcatgtgtccccagaagagtcccgtgtctctgctatctgcctggggaagacagcagagaaggggaatgggtggtgtggcagccctcacatgattttaatggagccacagacatcccatcttccccactgtccctatgaggggtatctgagttgtttctcagtttccactattatgaatgatactagaacggacaccctggtgtgtatgtatctgtgcacttgtttccgtagcacagattcctagatgttcaagagtgtgaatactttaamttttcacagatacaacttgcccacctattaagaatgcatggcctggcgcagtagctcacgcctgtaatccyagcaccttgagaagccaaggcgggaggactgcttkagcccagggatttgagaccagcctgggcaacaaagggagagcccayttctacaaaaaataaaaaaattagccaggtgtggtgacacatgtctgttatcctagctactcaggaggctgaggcaggaggattgcttgagcccagggaattgaggctatagtgagctacgcttgcaccaccgcactccagcctagaagaccctgtctcagaaaacaaaaccaaacccaaaaagattgttactgctcattcatggagagtgttgggaaaagcagtttttttttgtttttgtttgtttgtttgtttgtttttgagacagggtctcgctctgtcccccaggctggagtgcagtggtgcgatcttggctcactgcaacctccgcctcctgggttcaagtgattctcctgcttcagcctcccaagtagctgggactacaggtgtgtgccaccacacccagctaatttttcgtatttttattagagagggggtttcaccatgttggccaggctggtctcaaacgcctgatctcaagtgatctgcctgtcttggctttccaaagtgttgggattacaggcgtgagacaccgtgctcggccaatttttaaaacatttgtgccaaaacatgctttcataaaatctttccattcaacctttttcacctgcctgaacattaccttcacatatccatccatccacccatccacccatccatccgtctgtctatccatcagacctggattaggaatccactgaggtttgttgcagtggctcgggcctcagaggtgacaaggcccagccctggccttygagtaggtagcagaggcctcatatgggcctaatttaccattccctccctcccctcctcctcttcgaccccttttgtagctcagctgtgaccaggacagagtccctgggaagagagactttgcctccctggggaaactagggaagctgttgggccccatcccaaagggtaggtctttcccaccacccggagccacacctccctccacgccttgcttagaaatgggcttgcagcccagcrcagtggctcatgcctgtaatcccagcactttgggaggggctgaggtgggcagatcacttgagatcaggagttcaagaccagcctggccagacatggtgaaaccctgtctctactaaaaatacaaaaattagccrgacgtggtggcgcatgcctgtaatctcagctacgcaggaggctgaggcaggagaatcgcttgaacccaggaggcggaggttgcagtgagctgagatgatgccactgcacaacggcctaggcgacagagtgagactctgtttcaaaaaaaaaaaaaaagaggggggggtcttgcttcgctccacactccaggtgccaggacttcatccttgttgctctcatgagcctagagtggagggatggctgcctggccactgcccctcacccagtccccagcccacaacagtttctggcacagtggcagggtggatggagcccacccacccatgtccaccctcagggcagttgcagccaagggctctggaatagactggcyaggttcaaactgctgaagagcaggtgctttcatcctgctgaccccaggttcctcatctgcatatggagggcagccttgggaggggccacttcacagggctgtgggcagcacagagcaggacacccgtggcagacatggcatgcactccatggacctagcgctaatcctcattgtccttcccccttctattcacccacmtagggccctgcaggctcctaccagcctctgggggccctggtcgggtctatatgcccccgatctggcccaaaatgagtctcccctgtgccgcccgccctgccaggtctgccgtggcccccggagctggtggaggtggtggtcacgaccatggagctacatgacagggtcctcgatgtccagctgtgtgcctgctccctgctgctgcacctcctgggccaaggtgggtgccaaaccaggccagatggggtcggggaggctgtgcgctgcttcctgcagctgtgcctcctgggccaaggtgggcaccgggccgggtgggttaggggaagccatgccctgctccctgctgctgcaccttctaggccatcttctaggccaaggtggatgccagggccaggccaggagacactcctggtggcctagctctgcccccaccacctggttggcatctaaccactggagagtccatgcyatcctgtgcccatcagaccccatcctggatggcagagagggcacaggccaggagcttggagacgcggatcccacccaggcctgccttttgcctgctccgtggccctggacaagttcctgatgatcctgccagttttcccagctatgaagcgaggagctggacacgaggtcctctggagtsaccctcagggaggatgggttgtgtcctctgaagagggctggtaggagggcagtgctgagttcatttcactgtcctgatggaagaggttggagctgagagatygagcctcctatgagagacatgggttgttaaaagagttgaattagctttgatgattttttttgaaacaaaaagtatttagttacttttttttttttttttgagatggagttttgctcgtcacccaggcgagtgcagtggcgcactctcggctcaatgcaacctccacctcccaggttcaagcgattctcctgcctcagcctcctgartagctgggactacaggcacccaccaccacgcctggctaatttttgtatttttagtagagacgggtttcaccatgttagtcaggctggtcttgaactcctgacatcgtgatccacccgcctcagcctcccaaagtgctgggattataggcatgagccaccgcgcgcggccacctttctagtttcactgttggaagtttggagttccatgcaatgttgaaattgtgttcagtgctgcctgacyggctcccagggaccaggatgcgtggcctggccgggcagggctcccttccggtccttcactccattaggccacagggattcatggaggcctgctctgggtcagaacaaggcagacctcggtttccttcatgcaaagtggagatgctatcccccagcctgtgagccttgtgtgtctggccccatgcctgagctgtggggctaaccccaggcgtcttcctctggcttgagcagcgctggtgcaccacccggaagccaaggctccctgcaaccaagccatcacctccaccctgctgagtgctcttcagagccaccccgaggaggagccacttcttgtcatggtctacagcctgctagccatcaccacaacccagggtgtgtctgccagccacctcctgccccacccacgctccaggacagcccttcccaggggtcttggaagggttggtttggggtataggtgggttggacaggacagtgctgggcctcctcctgagatacatggtggcatttggccgtcttcatttggccaccccaaatgctggtcgcatccttttccatcttgatgacaagcttccactcttgaagtcactggttccctctacagacatgctaggcgcagctgtgggcttcacaccaatgacatctctttcccacacttcctgccccttctgggaggctggggctcaaatgccctgtgtgtctccattccatagggcccagtgggcttccgaagcctccagccaggactgtgggaaggagagggccatacagagcgctcacaccttcacccacaaatcgggtgggcactgttctccccaacaggaagctgggcctcgagagagcctaaggacagttgccaggagtccatgcagcagggttcagggctggggtctgggccccagcaccctctttactgcacagactggataactgatgatacatggctgatctcactttggggagtgaaaggaggcactaggaatagatgtcaactggaaccctcaggcaaaatggatgtcagttcatcctaccgggatagggccccgtcatggttccatcctggaaggcacaggctggctctgtgagcccaggaggcagggtcaggccccctggatgggaagctacagaggtcagacccagcctggtagtgggatggcagctattgggactggtggcccacgagatggacagactcctctggggccagtcccacatcctcctgttcagggctccattgagtgcacacgacttggcccagagcaggcacctaggattgcaggtcaaatgggactgcagtgcccaaggacaacagaggcaggaaggcttcctggagggaggggccctggggccctcattctggctcacccacagagtcagagtcactgtcagaggagctgcagaatgctgggctgctggagcacatcctggagcacctcaacagctccctcaaaagcagggacgtctgcgccagcggcctgggcctgctctgggccctcctgctggacggtgaggggccctcctcctgctgtcccaccggggctggcagccctcccccagcccctccctaactgcccctgagagccttcgaggacctccatgtcctgtccctaaaacacaacagccatagtccgggaaaggctcttctgagagcttccaactccaacagaagaaaatcaaggagcagagagagaaaaggcaggggagaaaggccttctggcagaggccgggtttcaggacttcttgcccagtgggcagacccctcagttttaagtgcctcctgcccagggaaatgtcctgggattttccgggcagtcctggttccagagggcagcggtggtgctggatgccctgtttgttttgatttttgattcacagtagggggccccctggcctgtgctgcttcctctcctctagaccccatcttggcactccagcgccccaggaaaaagagagctccaaaccacggaaagcccgggaaacccaagaaccctgccagcacccaaagtgtgggattctccaagcctctcctgggctaacccctgcacccgtctctgaggacagttgacctttcccaccccatttctgctgttgtcgttagctggaggaaggcagcagatgggggatgggaaggcccccctgcacacacccaaggcctgggtgtccccttccatccctgtcctcgttccaggtatcattgtgaacaaggcccccttggagaaggtcccggacctcatcagccaggtgttggccacctaccctgcggatggggaaatggcggaagccagctgcggagtcttctggctgctgtccctgctgggtgagctgggtgggcgccctgggcccctggggctgggaggggtgggcctcatggcacagcaggcacaaggcagcccggcccctttctgcaggctgcatcaaggagcagcagtttgaacaagtggtggcgctgctcctgcaaagcatccggctgtgccaggacagagccctgctggtgaacaatgcctaccggggactggccagcctggtgaaggtgtcaggtgagcctggggacaggacgaggctgccacctagaggtgggggcaagaatcagcccccatcagttacatctgccaggtgccacaaaccaaaaaacagaagcaacaaatcaaaaaggaaaagaaattaaaaacgatctgaagtccagtcatccagaaatcaccatcaagactttcacgcacacttgataaactcttgtctctgcgttatgctaccctgtgaccctctctctgtccataaacacatcacatctgcacaggtttcctaacatgcaggcacaccgtgactgatcaaaacagctctgcaaacagtgtctccaattccccacaacacaaaccctgcctgttactcagctagacaggctgggcccagcgctgagcacagcacaaccgacgctcggcccacagcacagtccttcagagagcatcctgggcctggccaagacactagctggtgcctggcaactccgggctcatggtcttgacctctgtactacctaatcttccccagagtgacaacgacccctttggctctgggggggctgcctcctctgttcttgcatggtcctgttcaggtcatgccagcctactggtccgcccaagctgatggggcctcctgggtcccgtctcttgtcctgtcccaggcccctgtgtgagctctggggtcccatcccgtcctgggcagaaggctcttccctttcaggggaaagcagggaatgaacccactcccacccatcccccagagctggcggccttcaaggtggtggtgcaggaggagggcggcagtggcctcagcctcatcaaggagacctaccagctccacagggacgacccggaggtggtggagaacgtgggcatgctgctggtccacctggcttcctatggtgagaaccccttctcacctcacactccctagagcccagcggtcaggggtgccccgctccccctataactgacagggaaggagcacatggaaggtgggctcaaccccacttctcggcccacttaaacttcccactcatttggcatcttctgagcaccaggggttgtcctggctgagggtgacgcttggggctccggaactgcaaggtggctctgtgcatgccaagcccaagggggaatgtgacccactctcatccttctggggcttctggcaaggggcacaggaaggactctggcctcaggaccttcctgctccacctgcagaggagatcctgccggagctggtgtccagtagtatgaaggccctgctccaggagatcaaggagcgcttcacctccagcctggtgagtgacagcagcgccttcagcaaaccaggcctccctccaggtggaagcccccagctggggtgcaccacgtctgggggactggaatagatgtttgtatggaactgaccttgatctccacgtgtatagttttcaagactgctctcctgcctgcctattatcccatctctatgactgggccaaaatcaatcttaaacgggaggggtaatcagacctctccaaagagtttcctgtccatgactgctggattgagtcacatgagtaactgctcctggacccggggactgtccacgaaaactgacttgcctgcttcctccttccaggaactggtttcttgcgcggaaaaagtgctcttgaggctggaggcagccacctctcccagcccactgggtggggaagcagctcagccctgatgcgggggagaagacagataccccacaggcccctccctccacgtgtgccctctccctgtccttcctttccatgggccactgtttcccttggggtggggggaagggtcatccagcaccagaatgcgcacctcacactcctcttaggtgactaataaagaggcccaaggccagtttctgccttaatcatttctggcaagaggctgtgactggccagtgggatacttaattctgcagtctctatagacctcgcccctggacagagcagtccttccagaccattctagatgagagtcaacactgagcctccacaggctccattccaagtaaacatctgcatttattttaaatcgcatcctcggtgtgtctgccccttttctgtccagctgtcaggtggcccaataacgccttggactccgtccccttgtcagtgccactggctgttcctggctctagttcccaggggagcctcaaactggggcctagcccagaaagccaccggctagcatcacatagcttctccagctcaaatagcccaaggttggcatgtctgccgacctccaggaataaccgcagtcaccgtgcccaggcaacacatcctcgtgctatggggagaagcctctgctgggtgacccaccagccaaccctgggccaatttaatttagataaatgctcaaagttcaaacggccacaggaaacccctgatgtaacacctgttgtgccggccagctgtgtctcaggagctgactgcagacacctggtctgggtccctcaagcccagcagagcttgttatgtcccctaacacaaaggaggaaaatgtggctcctcgagaggaaggtgctgagcacctcaccccagggtgtcaccgaagatgggcagtgacagcaccgtatggactggcggcccacaggccccaacctcacctggcccagggggtcagcagtcggtaaagcgtggccaggcgtgcccatggccgtccctgctccccaccctgaccatccgggcccaaacacacatggacagtaagaccaggtttcagaccacaaagtcaagaggaaggaggaccttctcagtagcaccacgccacgcccctctgccatgattctgaaaaggtttcaccagagttgccactctggggagatgtgatctgtccctgtgactggtcacattgcctctgtagcggggcggcagcagcagcagggcaggactgctaggcgtcgtcactgcagtggtctggagcagtcagcagggggcgcctgtctcgggccatgctctcccactccttcttcaccatgacgtacagcctcattgctgcctgggcatcctgaatctagacgacatgaaacatcccagcaggtgacgaggcatagccgcagcccacagtcaaccccacaatgactgagccctcccactagccactctgctacagatgtactgagtgagacatggacctggccacgagatgtcaccaggacggggagggaggacacaagagaagcagagggagcaacgacctgatggtccccacacttctgtgactcagacacccctcccaggagaagaaagggaaacccaaagaggagaagcaacaaacacgctgcctttttaggtctctgagtgcagggtgatggcaggttgggtgctgggcacaggggcacaaggaccaagcagatgggcaaaaagggcccaaagcactgaggccacgttggcagggggtgactgctccacagaggcagagccagctgctcagcagggccgggcagggcagggctggagggctgcgggggtggggggaccctttgtaattatttggcaactttttctccaaataacgagaatgcagtacttttgtgttaagtgttaaattcgttaaatgtgcatatttagaatttaaccaaaattccgtaactccgctctaccattttttttttttgaccaatagcctcgtaggataagtaggtgcccaagccccacctcccccatgtctgtgtcaggtgactcatgtctggttccaggtgggaaaccgccccaaaccccatgaactaccccacaggacacacttactgaacagt

SEQ ID NO: 97611 - DNA, 15932 bp, Homo sapiens
ataaaatatgaatagtaataacgtataaatttcaacttattcttaaaaatataccaattataaacttttaaaggcattatgtattgttttagagaatacttagaatcttgtgatataataatattaatctaacacatatctacactgaattagttgagaatcatagaacatgaaagtaattacatgattcaacattcctatttggtaaaattccccaagcatttattgagtgtccacttagccactgaggatataaaaaaataaggcacattttttaccttcaaaaaaggtaagagtctaaccagtgagaaagaatgaagtataaaattaagaatcagaagtgatagagggtaaggcagccacagacggccttaaggtaacatactaacgagcttagtaagaaaggcttggtaagcctttgtgatgaatatagaaggagggagagaagtggggagagagagagagacacgcctaggatgactcctaattctgatctggatgcctgagtggatgatgctgctatgaagactgggaatgctgaaggacaggtttaggaatggggaaaagaacaactcagggtgggttttttttttttttttttttgcgggggtagaagagggaaggggagcatctttttattaatctaaataatatacacatagattattaaaactaaaaagtatcaaagaacttacgatgaaaaactattctcctgttttaagtccaactcctcaaaggaaatcttaggtatttctagaagttacctctatagttctaaatgtttatgcctctaattcttgatttatcaacttcacatgtatctactgataccccaaagggaaacacgggaagatctagcaatacttaaaattccccttaccctgttctttttcctcccaatgtttgatagctctgttattaattttcacttctgtctaaagcttgcagctttaaataatatgcttaaacctctgcttcttacttcaccaactttagtcactacctgactccacttaatctaagaaaagatatcagcattcctactcatttcttccacctttctcaactcccactttctgtcatctgtactttgattctgtcaaatttgttaacatttactgaatccagttaataagtgtgggacagccaatagaaaggtccagcggacagttgtgcaaacaattctagacctcagtggggaagtcagggagggagattcaggtttgggagttaggagcatgcagatagtcactataaacggcaacaatgcatgcagtagagttcagcaagggagagcagcagtgggctaaggacagaaccttggcaaataccaacatttactagcaggcacgagaagagccaccaaaggagataaagagacaagggttagagaggagaatcaggacaaactagtgttatggaagaagccaagggccagttttcagaagtacatattcctcgaatactcactcagatatcagccagtattttttgcaatgtcttctccacagcggatcatgacttgatagctggctaagtcttcgactgacataacaacagctggcagtaaccagattcaccgatagtatttaaaaaagtaagaaaacaatttaaaaataaagattaaaatattcattgttttgttttatgccttttgtttctcttacttttcacttattacccttataattacaaaactattttctaaaacctgtttaacatgttaagtagtataattgccttgttagtagtgaaactgagttcacaaataaaccctgaaacatctacaactgtaatttttcacaaaaatatctacagaccatatatgccattggagttaatctcaagtcaaggagttgtcctatgcttattatcaggacaatactcatttctacatataggaagaaagttatttagtcataaacaaagggacttggggttttttcccaagatctgtaagatgtatgctactaaatacacagactttttatttttgttttttaaaattttttacttaaaggaaaaaagtattgccacaaaaaccacgttttcattaaagcaactactggaaagtccacctatagagggtgcctgaatcgtaacagttctgactcaatagtcatggctacacaagttatcagctgccccaaaacatcgaatgttagaagcaaataactttcttactatataaagatttctaacacaacagtgttgcaatcctgtaaattctaccctacataattaatttgtaaaaagaatgaacctaagattaggactctatcctttccagagagaaattacaagttatattaattgaaagtaggtattcaaagatctcacttgggcaatagctatcaacagaatcttaaatcacatcaggtttgtcaaggccatgactaaggtgtgttaaaaaccatctatagtaaacaaaattgcctttgtttgattttcagattttacagaaacatcatcctcatccttttctgccaagctcaggagatgcccaaattaacttttgtaaacataggaatccctccagttttgtgcattcagtttccataccctcttcttgattcctgtccctccactgccctaggagctaaatgacataaaagaatctggaatatgcatgaaagatgaattcaatgcacatcgagagtgaaaactactgttctagagattctgatccagtcggtttggactgagatctgtacctcaggcatctgtatgtttaaaaagtgccacaggccattctgatgcacaggtcattctgacgcacagtgtggcatttattcactccatttcagaataaatcactctgaaatggagagggtatcagatcatctcaattcaaactaggcaactgatgctacatgattccagtgtactaatccaatccaacccaatccagttcagcaaataataccaaaaacttcagagcttatcactagactagacccttgacaaaattgggctgtatggtgcaggaaaaaagctgcaatacactggatacttttctgtagataaaattcaaatggtattcaactcaatttatttccacagacatttacagagggatcatgtcacttctgtttaaaattgtgattactacctaaagcatttaaagtaaactcttacttcctcaccttggttcccaaggtcctgcatgatctcaccaccctcatctcatcactgtctgtgagtcactccctacctccagcaacgccagccttctgtatcttccaccaggccatgctgttgaacagtaccgttcagcagtcccgtcaatctctgaacatacttttccctctgccagaactgcatatgccctgcttcatatatggcagctccttccgatttgatcacttctcacttcctattccttaacagagcaatctatttccttcacagcacttagtacctcttgcaattatgcgcttgcccactggactgtaagctccataagagttgccttatctgcgttgttcactactgtaccctcaacacttaacagactggcacatagcaagccctcggggaaaaaaaaatctttgaataggaagataagcaaggcagcccttacaatcaagaagcacgccatctacctgacatggcaaatcaattctgcaggaagaaggtagagagggcatcttctccaccttgccaagttgagaagaggtaggcaaggcattccaggcaaggtcgagagcttgagccacaggaaaaaaaaaaaaaaagaaagtgcaagtgtgttgtatgctggcagaggtctgatttggttagaatggatggtgcaaatgtgatagtggtggagaaataagtcctggaggaccttagatatacaagccagatgataagagctttcaatgccccagaagtttaggttatagtctataaacataggggtgtcacaggttttaaggagaatgacaaccagatgtgtcttggaaagattactctggcagcaatcaaaagttggagactgttagttaaattgtaagtattttctagaaaaataaaattgctagcaggtacaggtagcgaccagtacaggtagtgaccaaaaacttgaggtatctctctatcaccacttagctaggccaacaactatctgtagctccaagaaatctgtatttataaaaagacctctaataacacagggcacaatcatcaaatggctagaatctaatggttaatccaaacacaaaacaaatctcgcccacctatcctaagagggcgactttgcatcctctgcaaatatatacggtagcacaggaaactcacagccatgccaccccctgtcaagggtgtaaacaatcctgacagctggggggcgggctggcagcgccatttcttccaccaccccagacagtcccaagttctgaagaaactgggcattgaaccacccttatcagcaaccggtgtttatttctggaacagatgctagtaatgtgggaaacccaaggtgtccaggagaaaagatagtcaccggtatggcatcaccggaagtcagtaccaaaacataaaatccaacatcgaaccgtaaggagcaatgctgacagcaaaacaattctcacgcactgaagtccgaaagtgagcccggacagcgattctggcgctggggaagtcgcgccaggggagtaaggggttgcctatcttctcctctcgctcacccacctgcccaccccggcgccagactccgcaggccccggacccagcagagaagagcgcctggccgggacaggggcttttacacagcagcagggactgaccccaaccgggcgggcacctgcggggccagcgggggtccgcggagcgcggcggtgcggcacgagggccactacctccttctcttgcaagtgggcctcaccgaggcctgggagagagatatctcgtcgcttctcatacctgggcccaggacaggaggaagactcagggcgaggccctttccgcccccgtctcgccccggtccccggtggctccgcaggatgagggcggccctggcgtcaccttctggtgtcgcggaagctcgggtcctgtcagcggccccgaccccctttccccctgcctcaccgcctcctctccccatgcccccacccctgccatgcgtgtcgtcccattacttgattagatcccgatagtccaaaaaggataagatgaggagcaggggatcggtgggcagcgactctagggtcagcggcgccgtctcggtctccatggccgccatcttgcctggcccggtgcaggtctggccccgccctggccccgcccctgccccgcccccaccagcgcccgaaccgcccccagccgctctcacaggtttgttatgtaaccgccgggccagccccgccctcagggtgggctgaggtgcggctccctggagaccccgcccgctagccgggagccagcggcgcagtgcgagttcagcccgctttcttcgcgctccgcgtcaaatctctccagctctgttctcgcatcccggttcgtaaacttgcccagcccgggacccttttgttgccaaatctgcctcggtctgcccaactcctcctgcgaaattttacactcagtatgcaggaagcctcgctcaaaatctgacactcctccacgcccttggtccccaaatccattccttctctttgttttccaacccgagaacccctcgttttccccgctcagccttccccaccccgcttgtcccccgcacacagcagggccgctccgagacttgtccactcagcaagagcagagctgagaatcagccagggacgccagctgaaggcccttctcccaaattaaggaaataattgttgagggcttaacttcacgcccctccccgccttcctaagtaaaatgtgtacaaggagtgagtctgagtctcagccgctgtcccttaatttggttatcatggctattttcagcctattagggcaatgcaaagggtacagtgtggattttttccagctttaaaatttattttggccagggtttagatcccgcagagttaagtatcccgcgtgtgaagggatgaactgagactcccagagggcataactgatggaggcacgaagatgtctgctcttcagctttgccaaggtgatattaaaatgagagtgggggaagtataatgggtccatacatcacttgcctgatttcttcttttccatkgcttttccaaaggtagtatggtgtaaggggctttgrggaatccagacagacctggacttcacacgcccgtcatttatttcactactagtgaaatgctggcgtagttacrcctaagttctctgagactgtccctcatctctaaaaccacccctcctstggtgaactaaggatggcgataacdctttatgtaaagtgcctggccagatactcaataaatgttaattttccaagcttatacatgcatcagtcactaagttctccaaacatttccatatcctggagaaagtttctctcaattatttggaagagtggaagtgatatgccccgccccaaaaaaatccatttcctccattcttcataccattaatgccttctatttatggttttgcttaatagttataacccctgccacccagccaacaaaacrgaacaacagcaacaaaaaactctgcctacatctctgtgcttccaaattgtttatgcatatgcttagaagaacatttattgaattggatttcaagtacttgttctgtgtctctctcgtcaaactgtaaactctcagtctgactcatctttctaatttcagggcttagcaagttattcaacaactagaaagtttaaattcaggttgaatggatgaatgaagacagaataatcatttctgtttacaagggaaccatacctttttacatagacaaatgcttgtaaargtatttgatcctgatttatgtttgtctccattttctacttcagatgggccacctgttttaaatccaaaagctggtaggagtttcaggtacactgcatttgcttctgctgtcctattgcacttggacttggtgcagctatgacctaatgcagaagacaaagtatgaagctaccaaactgtcagggccagaactaaggtgaggcaagaaagctacttgcttggggcacaaatttaagaagaggtgccaaaaaactgaataatcaaataaataacattttaatgcaatatttttaaaaataaaaattaatgcaaaaaaaattcacagtgaacaaaataccaaactcttaaacaaaaacaggatcccacagtgccatgtaagccatattagagcytgatgcaaaaagaaaaaacaatgcgcagcactaaatacatgctttttatggttttgttagtttgttttttgaaacggggtttctctgctgttgcccaggctggagtgcagtgacatgctttcggctcactacaacttctgcctcctgggctcaagccaatttcctacctcagcctcctgagtagctgagactatagctacaccacaacacccagctaatttttgtatttttagtagagacagggtttcaccatgttggtcaggctggtcttgaactcctgacctcaagtgacccacctgcctcagcctcccaaagtgctgggattataggcatgagccaccgcgtctggccaggtggaagacttgcttctcccatgtggctgggcttayagcttctgccatgcgctctcagcacctcttttccaggctgctaagccctgccacttcctaccttgcaaagtgccatcaggttgccatcccctgctgcactagcccaggcccctctggagaggtggctttggctcaggctccacttttctccccagcatggtatgaggcatgtggtagaggttgggggagcaatgcaggtaggcaggacccaggagagccctttcctgggccggggcttcctattgcccttcccccaccccctgccaccctgcccccaatactggctggaaaaggggtaggtaggaagagagagtccagaatttggctattcacatccccagggctaagcttgggtgraagaaacagtccctccaagtttgctcattgttttggaagctggtttctaaagagtttcactaaaatagtatttgcttatcattttaatttmtatggtagatcrgaaagcagaaggttttaaggccaggcgtgatagctcacgcctgtaatcccaacaccttgggaggccaaggtaggcagattgcttgagtccaggagttccagaccacactggagagacccygtgtctgcaaaaaaaaaaaaaaaaaaaaaaagccaggcatggtggtgcatgcctatagtcccagctactcaggaggctgaggtgggaggatagcttgagcctaggaggtcraggccgcagtgaaccgtgatcgtgccactgaactccagcctgggcgacataatgagaccctgtctctaaataaataaataaatgttttttaaaaagaaatcagaaggttctaacagaagggttcagatgtagaattttttttttaaaaaaaaggtttctccttttctcaggagtagagagggacaatgcttgagaaatacacagtcttacgtgtttcctttagaaccccagtggcatcttatttatgatgagkagctcctagcaacaacaccctacctcttggtaatcaatcgtagtttcatcggctttgargttcccactggctgtttaggtaaatccttcagacattaactcctatcaagtacaagcatccgggctcaggactgtgagagatcaagctgaacacrgtgccatacctgcccttgagaaagtgacagacactccctaacggtttggttggggagaggcaaattcaaatggccctggagactcattttctcacctgttttcatggtttagcaactcgctgcctcagcagatctgagttagcttggaggcaaaacaggatgctctagaagttcctactaaatggcagcctagaggtgccccgaatccccggcttccacctcagcatttgtaaaacagagtttaagatccttctgtattgaactctgcgagatgaacccagcctaggcacatttctcagcgggacagggaagctgggggctgggatggatggtgggatggggaaatggggttgcttacatgctcctccttctctgcttgtatccccctcccccacccaagttgtatttataccacatggcattggtagtgtgtgtctgtggcccctgaaaggcagtcgcacgcatgaaggttaaactccactttgcctcggtgctaagtgtttttggaactgcccattgtccaactgggccttcccagggacaaaagcattctctcccagggggccctgtcacccaagccccagtgtcagcaatcctggttgtgctgaggcagccctcgcatttgggaacscagaagataaaagggtgggaggatcatggtgggactgctgggcactaattcccccaaacaagtgtgacacccaaggaaaaccctgggccgcaagactgccagtgattggtaaaaaggagacccgcccctgtggagcccaggaatattcaggagaattacgctttatggctgaaaacagggagaaggataaaattgcagggatgagtggagattaggggctgctactgctactcactcagaaaagcagccaggctgatggggtgacacaaaaatctggaatggatttagctgctcttatgcagcaaaaccacagacaaactcacggctaacgggawgcctggaccagatataagagatttataggcacagttccagcagctatacacactaagttctaggacttggttccctgctccttccttaagggatactttaaatatttctgaatttgcccaaccaatgtctggtttctttgtttttgtctgtgacatgtctcttgcttttttgcagcctgtataattgataggaaccttctgggtgcatgatgagtggatcttctgataagatacatttaaagtgtcccctgttggtggcttctaatatggggctaaggatgtgaccaagaatggcctgtaatcctgaagcctgccaagattgcatcattgaaacaatgcttcctaccaggtggagagaaaatgcagtattcttatccgagacgtaatagaggccagagtgctgaacaacactatccaccagttccgtagccccatagggctggggaagccactggtatatggaaccttactgtaccctgttgaggcttaaacatgtcagtggccactattcttatagtgtctgatatcatgagtggctgaactagaattgtgccattagtggtacttggcatgcaggcttggatagattaatgctggggtttgttttttgttttgttttgtttttgtttttaaagacaaggtctggctcagttgtctaggctggtctctatctcctggactcaagcgatcctcacaccccagccttctgagtagctagaactacaggcttgtgccaccacatccagctaatgcttaaaaaaaaaaagaaaaaatactctttataccttttctacccttctccatgccctaggaggctgatctttaggtactccttcacctgggcttctttgttatctggcttctggaagagaaagccagataacaaagagagaacaatggcagagaaaagtgacattcaggtatttatacatctccacctcctgggattttggttggggctgtgttcctcggtggagacagctcctgtcagcgccctctttcctacctccagctcactcagctctgatgatactgttccctccctccagctgctagaactgtgcctcttgctttttcagggttggtaacggcttccctcccccaccccattactaatccctgggcacctcactgtcccgcattggttcccttatctggttcataactctcttagtattgtccccactgaattctgtttagttatgttcctttgcatgttttgtctgtttcttgagaggtctctgactgatatcacttgcccttatccaccaaggcaagcagtactgtaacaaactccccaggagtacattgtacattgtcagagagctgaacaaatgctgacaaaatgagaactgctggttggggccaaacattccactctctcgatgacctcaccaccgaatgtactacatgaactccactgcattccagcttagaaaagctgaccaaagatgaatgggcttccaaggaagaagaaacaattcagccacccatcttttttgggggcttcttgtgcgacagcccaaaaagacattctatcctctattaaagtcaaagttctaatcttgtggccactagctgctgttgggatgaatgcctaacctctgattggcctgttttggaaacatcaccctttatacctggaaattccacaacaggctttatatacccaataattaactatatttgagaaggggacacctatggcaagaagccttgaaagtgatccaggcatcagtaaagcaaaccttgtcctggagcctcctatcttattcagatggaattacagatatcaatgatcaatcacacagtgattacaggctttggaaatgagactccaccttcttaccaaggacaagcctgcaaggactttcttctgctgctgtgcctgaaactagccccttctggaaaaagagaatgtcactgaaaggaaaaatgatgactttgccacctgacattgtcactttgcattgggtcctgtccgaactgagatacccagaaagttctgtagcaatatggaaatggcacttacaaccaatggcacctacaacttgaacctacaaggttcaagtctggtccccaataccttagccaacttcaggaacaacaggtggctgcccacccattagacatggagagacccacctactgttaaacctaagctgttggcctattggggcctctttgacaagacttgcatctgacaagaagcatggttcactgttgaaatagcttgtctctgagatgggcaaattccatggaataccaatgccataaattgctgaggctcacaacgcttgcatgctgaataattggccaaacttcaggtgctgttcttggctgtagagcatactgctcccagattgatggaaatgaacctttacacaatatgtcaattaggattctccaaaaaacaaatgtgaagataggattagattcatgagagatatattcgggggctgggcagagggcaggaaagtcttatgaaggataaaagagaggaagcaggagtaggcaaggagtgccttcagaccacgatgcaggtctgacacctgtgaaaagagaagatgaaagaaggcggatttggcagggagagtctcgggttggactgcagctctgagaatgtctcagacaggccagtggagagtccttgagtcaaagctgcctggtagaaagtccagagacacacagaattggcctgcactaatcccctgccatgctcagccattggctaggagcagcccaggggaggtatggttttgatgcaaaagcatggtgagccgcagactggcattgtctgtcaactgtgctacctgcagcaggagatctgagtggcatattcccatggccatcacacacagaaacatcagtaatagcctagctatttagtcaggccatgggccacctaaagactgaattaataaaggcacatattaattatgtgcctttgggacataattatgggatctccccattgaaaagattataagtgacaaaatctagaggaaaacagctgcctgaaaagactgatcaagcatatatgggcatcatgtctacctaccacagcccattgaatctatgctctaactcaccacagtaatggaaccacccaaaagaccagggatacccaaccaggaattctttcatcaacacacatagtagccactgttactgaaaaagctcatactcttggccaactgtgccagtctgtccatcggtgacctgatgatgtctacaagcctagtaggtttagctgttttgggctacaagttacacagcaccatactaccttctgccttggccaaacaactaggcacccaggacttgaggaacaggcagaggagagtataatcagaaagaggacactctctcctcacactcttttttggaatagcacacagttgagagtatccaagtactttaggggaacagaaaccatgctaggtatttcaaaagagatttaatacaaggaattgttaaacatatatgggaaggttgaaagagcaaaggatgaatgctgagctaatccagaaatcaagacagtgctatggtctgactgtttgtgtccttccaaactgcatatgttgaaatcctaacccccaaagtgatggttttgggagatggggccttggacaggtgattaggtcattaacaggattagtgcccttataaaaggaactccagaaagctgccttgcctcttctaccacgtgagggcacagctagaaggtactatctatgaaccaggaagtgggccctcagcagtgaatctgcttggcaccttgatcttggacttcccagcctccagaattgcgagaaacagatttctgttgtttataagctatccagtctacagtattttgttacagcatcctgaacaaagacagactgccagaaatagttctcaccatagggctgtggaagcaaaggggaaaagatctttggttatagaacctcagggctaaaaagaggagccaccactggctggtgctccatgggctccctgagggcctaatgctctgctctctcaagagaggtcccacgaagttggcgttgagatctctgaaagaggacacctcacagctggtgcttgtatctcatggcaggtaacacacagcagatgctcaaaaccttgaaggtagggttgccagatttagtgcacacacacacacacacagacacagacacacacacacacacacacaggcacacacaggctcacacaccaccactgccatcagcattaccaccaccaacaaaaaacaagggaaataactgaactaaaatggaaaaaaaaccccaaaaaaattaaatttgaattatttgtacttgcctatgcatatatactttgaaataaaataagaataccacataaagcatgataaaaatcattctttatctgaaataactgaagaagcacataaattacctacctctttatttaattatacttccctgatgatttggctctccttaagttttcttagttttgcagaatttgtttataaaattccttgcatttactgtctatattgcatttacattgtaacagtttatacagtgttcatagccaacttattcttttgcccactgaacattcattattgagaaaacatgctcaacatagcattatgagctggtatactgaatatctgctggctgtcactggctgaatttcacaagcttggggctatcagtgatttactgacttttagatatgtggttattagagtgagtctgtcactggttgatttttcagaccataagtgatctctaattaatgctggttacttgttcatgacttgagacttggaccaaataatcatctttgcctttctttcctttttgagacgaagtctctctctgttgcctacactggagcgcagtggtttaatctcgaggctcactgcaaactccgcctcccgagttcaagcgattctcctgcttcagcctcctgagtagccaagattacaggcactcgccatgatgcctggctaatttttgtatttttagtagagacggggtttcaccatgctggccaggctggtctcaaactcctggcctcaggtgatccacctgcctcggcctcccaaagtgctgggattacagacatgagccactgcaccctgcctcatcttttccttccttgaatatgaaaaatcagtactttttcctctgaatccccacttttggtctactctcagccaaatctgcagtagagaccatatggactttatttgcagaggtatgggttttagttatgttgcgtttaggttacttaagatttaactactatggcagaaaagtagctctaactggcaatattttgttgtttactgaaagatatgaatagagggcatttagggcatcctgacaaagtcaacacaggatacaggacacaatcagtaaatacaggacatgtcctatgaagagaggacctacttgaagagggtgcctcttttttggtacttggacctttgatatgggacaacctcatacctaatgctttggatactgaaaggggactctggggctggggttcagaatgcctgaggaccttcagaggaaggcctgcagaagctgaaaaacagcgagagaatcctcctcgctccctgctttccattcttctatgagtacctcccagtatctaaaagcaactcagcttgttaaagcatcagggaaatgtagtgttcagccttccaggccccacatcactgagattatgcaagggtaggcccaagctaagacacaagaaataattaattaacacaagcaacaataccctcctcccatttagacttcagggaatggatggagagttctcataactcagatcgaggacaccttgatgaacatggacgctgactttgctttggatagctcccatggtgccttattccttatatcactcagttttttttttttttttgccaaaaagaaaaagacagctttattcaataaatggtatatggaaaactgaattttggcaaacagaaaaataaaattggacccttatttcaacactatataccaaagtcaattcaaaatggattaaaaacataaagattcctgtattagtttgctcaggaaaattgtcaacaagaaaaagaaagagagagagagagaaaagagaagagaagagaagaaaagaaaagaaaagaaaagaaaaaagacttaaacataagaccaagaaccctaaaactacttgaagaaa

SEQ ID NO: 97612 - DNA, 14703 bp, Homo sapiens
tcactgtttgggcaatcaactagaacttccttgtaacttgtctggctgcttcagctttagctagttcaccaatatccagtctggacctgttatgacagaggccaccttcctgttcagattggtgggaattccattttctttctttcttttttttttttttttttgagttggagtttcactcttgttgcccaggctggagtgcaatggcaccatctcagctcactgccacctctgcctgccgggttctagtgattctcctgcctcagcctcccaagtagctgggactacaggcacttgccaccacgcctggctaatttttgtatttttagtagagagggggtttcaccatgttggtctggctggtctcgaactcctgacctcaggtgatccacccacctcagtctcccaaagtgctgggattgcaggcatgagccactgtgcccggcaggaatttcactttaattttggtcaagtatcatgagtttagtaccttctgattcaaggcagaaggcacttaagctcaatcctcaacagcttgaaatcaaaaccagaaacccactctaagaggtaatccatctaaatgtttgctatggaaaggtagcggacacacaacatacaggagtcaatggcctccccacatttgggtgagatggggctcccggggtgcatgcactccccacactgagaatctccccacaggcagattctgtgaccagaacaggaagaatcattgcagaaacgggatttcatgcatatcacatcttctacaggttaaaattattagaaaaaaatagctcatccagatagcagaacccaagaaagagaaactagagggggggtttggcatgggggaaaaagaggcttctagaaagcctgcaagggcagaatggcagtaacagagacctcgggaaaaccagctaaaatccgaggcttctctgactaaggctgcagggaggcgtgtctggagcgctgaaaccagaacactatgatgatttctgtgaatgtgatgctaaggttgttcggctagaattttacggaacaccatggaggaaatattttcagcctgatatcaaatctggggtccagagagaaaagtctcagcttgctcatggagaagagctacaagagaagcccacatctgtttgccagggtgggagaaccagcaggagatgaaatagaaaagccacaaaagaaaaggcatcatggtaaaagcaagccatgttctactgccctcagtgatgtactgtctgcggtcacttacactcaacattggcagagaccacgtggtccacaaagcctaaaatgtttacttgctggccctttacagaaaaagtttgctggccttggtctagaccctgcctctgatgctggcctgaccctgggcagaccatatacatatatatatatacacacacacacacatacacaaggatggttatttatataactcataccgccaatttaacaatactaatagttaacatctaagactgattgatatgtatcctttaaaaatttctgggtgcagtaacatgcagattcttgcccgcataactccattttaagaatatatacactggctacgcatcgtagctcatgcctgtaattccaggagtttgagaggttgaggtgggcagatcccttgagctcaggagtttgagaccagcctgggcaacatagtgaaataccatctacacacacaaacacacacacaaatacaaaaattagttggacatactggtgcatgcctgtagtccagctactcaggaggctgaggtaggaggatcacttgagtccaggaggtcaaggctgcagtgagccgagttcacaccactggactccagctggggagacacagtgagaccctgcctcaaaatatatatatatatatatatatatacacacacacactaacaaagaccttaatgtattttctctgcagaacttgtcagatatgctctcccagcccttcttactaaggacaatgggtacttgtccaagcccatccaccattctgtcagtcgcatcctaagaagagatcagagaagattccctcctagaccacgcaaaatagaccgatcatctttggcacgtgtggccatgacccacatgaggatttataagcgacctagtcaccgggacttcatgtggttaccttttctgaatggctcccggttctcctctgcttccctgttgactcggttttgttctggttcaacagcagacccctggtcatcaagttcatcttctgtttcatcatcactgtagggaaccacttcgtcattaggctgagaatcctcgtcaaatgtcgtttctgagtctctttctgtactcattctgctggcaaattggaactacctgcttaaaaggaaagagaaaccagagtgaattatgactcttgcccagtttttggttgaatactgcctgcatgctgctacaatgccccttttacagaacattgtctaacatgtaaatattctggaatagtacccccaaattcaacttgacatgaaaacaagaacaaaaccattcagtactgattaaatgcttgggtaagatttttttaaaaaatatggagctgcaaaccttttatttttaaacaagggtatatatatatatgtatgtgtgtatatatatgtatatatgtatatatatgtgtatatatatgtatatatgtgtatatatgtgtatatatgtatatatatgtatatatgtatatatgtgtatatatgtatatatgtgtatatatgtatatatgtgtatatatgtatatatatgtgtatatatgtatatatgtgtatatatgtatatatgtgtatatatgtgtatatatgtatatatatgtgtatatatatgtatatatatattcaaggcaatatttcaaattagggggtctcaatgaaataaatttagtgggtaacaatcaacattaaaataaaatgaaacaggctataaaatatcagattacagcacatataataagtactgcttgataaaatagttgtatacattcacacgtttatttgcattgtgggtgttagtggagttgaatttcttttttttctttttttgagatagagtctccctctgtcacccaggctggagtgcaatggcatgatctcggctcactgtcacctccgcctcctgtgttcaagtgattctcctgcctcaacctcccaagtagctgggattacaggcacacaccaccacgcccggctaatttttgtatttttagtagagacggggtttcactgtgttagccaggatggtctcgaactcctgacctcaagtcatccacccgcctcggcttcccaaagtgctgggattacaggcgtgagccaccgcgcccggccggagttgaatttcttactgtggattgctggcaaagttgacaaaccactgctctaagatatctggtttctgctaacactaacgtcctgagcctttgttctgatacaacatttttaatataaccttagatcttccaagtttactgacttcccaggaacactccctagcctttctatcttcctaactaccactgcccactctgtatctggaatttgtgtttgagcatctaccgcataagatgaccccatacaagtgagaagaacaaccttagttagatttattttaggaaaatatttacacaaatacctcaggttacagacacacagcctggcatttacataagcatcacagtgccgtgtagtcagtattgttaatgacagcagctcgcatttattttgtgttaactgcatgccaagccttgcactaagcactttatagacatgtgctctttgaaacttcccacaccaccatggtgaataacagtattattgttattcctacccagcagaggagaaaaatcaaaacactggagtgctaaataatttgcacaatgattattaaaaatttaaggcagccacgcacggtggttcacacctgtaatcccagcactttgggaggccgaggtgggcggatcacgaggtcaggagatcgagaccatcctggctaacacagtgaaaccccgtttctactaaaaatataaaaaattagccagacgtggtagcgggcacctgtagtcccagctgctcgggaggctgaggcaggagaatggcgtgaacccaggaggcggagcttgcagtgagccgagattgcgccactgcactccagcctgggcgacagagcgagactccatctcaaaaaaaaaaaaaaaaaaatgtaaggcaaaaacaactgcttcacaaggagaggtctatgctctatttttgtactatggtttatgatatattttgagtgaaaattgcctcaagtagaactatgtagctgattgcaagttttgcaccaaatcttagatctctaaaataatttttacattcacaaatggagaaattttcaaatatttatatgaggatttttaccaagtattatgtaaaacagtaaaagccaaaagcaagctgggttacaattgtcgactgtgtaaataaattgtggcatctcatattataggataatgtgcaacaatctaggtgatccgaagagtatttgatgacattgcattaatgaccttaagttaataggtaagttataaagccatatgtatagaatacacccagttattcacacacacacttgttcattttccaaaatttcaacaattgacatacattattttattattattatcttttgagacagagtatcgctctgtcacccaggctagagtgcagtggtgcaatctcggctcactgcaacctctgcctcccaggttcaagcaattctcctgcctcagcctcctgagtagctgggattacaggcatgtaccaccatgtctggctaatttttgtatttttagtagagatggggtttcaccatgttggccaggctgggacatacattattttaagtgagatgatgcatgcaaaatgctcaactcagtacctagcctgcaataagtattcaatgaacattaactgttaatttttcatatacttcttggcgatttgtatgtttccttttgaaaaatgtctattcatgtcctttgcccactttttaatggtattattattattttaaaatattgctggcattcattattacaaagaacaacttagattctactgcatgatgctgtactgtggcacagttctaaagagccctatagtcatggatgcaaagttcctagcactactggtcctcagcacctcaggccattatcttatggcttcacagaatattcattccccaaatccatagtctttacctctggccttagcttttcagtagcaagcacaagcattcctggtgagagacagggctagctggatttcctaggccgactatgaatccctaagtctagctgggaaggtgactgcatccacctttaaacaggaggcttgcaactgagctcacacctgaccaatcagagagctcactaaatgctaattaggcaaaaacaggaggtaaagaaatagccaatcatctattgcctgatgaactcatctattgcctgatgagggacaaggatcgggatataaacccaggcattggagccagcaagggcaaccccctttgggtcccctccttgtatgggagctctgttttcactctatttcactctattaaatcttgcagctgcacccttctggttaccgctagaactgagctttcgctcgccgtccaccactgctgttttgctgccgtcgcagacccgccgctgacttccatccctccaatccagcagggcgcccgctgtgctcctgatccagggaagcacccgttgccactcctgatcgcgctaaaggcttgccattgttcctgcatggctaagtgcctggtttcgtcctaatcaagctgaacactagtcactgggttccacggttctcttccgtgacccacgacttctaatagagctataacactcaccgcacggcccaagattccattccttcgaatccgtgaggccaagaaccccaggtcagagaacacgaggcttgccaccatcttggaagtggcctgccgccattttggaagtggcccaccaccatcttgggagctctcggagcaaggacccctggtaacactggcagtacttatactttcattggttatacttatamttcccyggttatatttatactttcctggcagtacgtatactttcatggtttatactattttaaaattattttttattaaatggagccaaattttttaaaagtcatcttttccactaaattgrcatcaccatgttaaatctaaatttccctactaagtctttattttattttactttaagttctaggatacatgtgcagaacatgcaggtttgttacataggtatacatgtgccatggtggtttgctgcacccatcaacccgtcatctaggttttaagccctgcatgcattaggtatttgtcctaatactctcccattccttgccccccccacccccacccccaacaggccccagtgtgtgatgttcccctccctgtgttcatgtgttctcattgttcagctcctgtttatgagtgagaacatgtggtgtttagttttctgttcctgtgttagtttgctgagaaagatggcttccagcttcatccatgtccatggaaagaccacgatctcattcttttttatggctgcagggattatttgtttttgagttgtttgagttccttgtatatttctggatactagtccttagttagatgaatggtttgcaaatattttctcctattcagcaggaaacactgttgattgcttcccttgctgagtagaagctttttagtttaatatagtcctatttgtctatttttgttgttgttgttgcctgtgcttttgaggtcttagccataaaatctttgcctagaccaatgtcctaaaacattttccctatgttttcttctagtataaagttttaytagttttttttttttttttttttttgagagragggtttcactctgtcactcaggctagggtgtagtaggacratcatagctcattgcagcattgaactcttgggctcaaggaatcttcctacctcagcatcccaagtaactgggactaccagtgcatgccaccatgcctattttttttttttttttgtagcratgggatctcactgcattgtccagactggtcttgaattcctgggtcaagtgatcctccaggcttgggctcccaaagtgctaggattataggtgtggtcccatttaagtctttaatccatcttgagttgacttttgtgtatggtgagagacaggggcccagtttcattctttagcatgtggggatttatttctgggttccctattctgttccattggtttatgtgtctgtttttagyccatattatgttttggttactacagccttgttatatatatatgtatcaaggtgactgtgaaggtactatatggaaacattttttattgttgtaaaatatatgtacataaaatttaccattttagccattttgttttgtttttctcattgcagcctcctgggctcaagcaattctcccacctcagcctcctgagtagttgagactataggtataagccactacatccgactaatttttgtgtttttagaagagacagggttttgccatattgcctaggctggtctcaaacttctgggctcaagtaatctacctgcctcagcctcccaaagtgctgggattacaagcatgagccaccacgccaggctttgtttctccctacttttatttttttttaatttcttaaagctgtaccattggagaattttaactttttgtttgttggttggttttctttctcttattattgttattwtttttttgcatctcagatgacacaaaccaytgtttgtttcctgagacatggtttcactctgccaccgaggctgcagtgcagtggcatgatcctagctcactacactctcaaatctgagggctccagcaatcctcctaccctgctccccagcctccctagtaactaggactagaagcayragccaccatgcctggctttttttttctttcttttctttcttttttttttaaaagagataggctctccctatgttcctcaggctggtctcaaactccgggccccaagcaatcctcccacctcagcttccttttagcccttttcaagtgtagggttctgtggcattaagtgcatttatacaaacattttgtaagttatccttttcatcattgcttccaaactgccaggcatctggatattaagactgtctccagccctttgaggttgagagaggaagcaagcacggaggaatggatttgacaacccacatgtccgtgactcaaagcaagcaaggccttgcacaaccaactcgccacccacacaatctgcacagtctcagtgagaaascaggagcagggagctctccgctgagagtgaagaaatgtcctcaactcracttctctgcagtgtgcatgtgtgtgaaacrcagacacacacgggaggaatttggctctgtcattttagtgtaccaaagaaaaaaaaacagggagaaatcacttgtttgaagccctaaatgacataaggaagattttcccagatctaaataatgatccctaaggtcaggtgctgtgtatggtatggatttggaaacttcataatgtctctgaccaccactccaggacactgcagacaggtgtgcatttactcagcatccagtaaacacctgcaaggtgcagagtactacactaggcacagggaacagagctactgactgactgccagagtttcgaagaatacagataagtcaactattaaagctaggaaacagaccggatgcggtggctcacgcctgtaatcccagcactttggaagaccgaggcgggtggatcaactgaggtcaagagttcaagaccagcctgccaacatggtgaaactccgtccctattaataatacaaaaaaattagctgggcatggtggcacatgcctgtaatcccagctattcgggaggctgaggcaggagaattgcttgaacccaggaggctgcagtgagctgagatcgcgccattgcactccagcctgggcaacaagagcgaaactctgcctccaataaataaataaataaaataaaataaaataaagccataaaacagtaaagccagtcgtttttgcctcaaatactcctccaattcatcacctcctctctatctccatggccaccatcatctctccctggaaatgctgcgagatccctctaactagactttccacaattaacttccacatgaccaccaaaggcatgccattctcctgcttacacccttcctgggtgttatggattgaattatggcccccgaagtcatatgttgaagccataacacccctcaatgtgactacatggagagaggtcctttaaggaggtagttaaggttaaataaggtcatcagatggggccctaatccaataggacttgtgtattttatttttattattttttagactcagtttcgctctgttgcccaggctagagtgcagtggcatgatctcagctcactgcaacctccacctccctggttcaagcgattctcctgcctcagcctctcaagtagctgggattacaggtgcccgccatgacactcagctaatttttttgtattttcagtagagacagggtttctccttgttggtcaggctggtctcgaacttctgacctcaggtgatccgctcaccttggcctcccaaagtgctaggattacaggcatgagccaccatgcctggccaatttcttattcgttaggtctcaacttcagtgtcctcttccactcatggtattgagcaggattctgccctcctcttcctgctaccactggcccccttgagcacctacatttctgtttccttcctaacacttatcatgatttgtaaacatgcatttgctttcatttatctgcctttcccaccagaccataaactctacaagaacagattggtctgtgaatactcagtgcctactacacagttgacactgaaagatctggggaaagagcaaatcaactttcaataaagtcttcaagggctcagagagttgtcttacaccaaagttctttaccacctttacacaggtcacacctaccacatggtaacagattcacaaagtcattggactagggatgaaagattgagggcaatgatgggagaaaacagcaacagttaaggtcagaagtcatacaagatgaaactttttaggagtctgagtcatttgaggccatccaaaaaccattgtccaagattttaccatgtacgcaaaaccaaaccagccctctagtagggtactgaagatatcaaaggtgaggaccaatctttcttgtccatcactagcacctaccagagtctggcatataggaggctcgtttgtttctgtacttaggaggcttatagtctagacaagaattggcaaattgcagcccatgggccaaattcggcccactacctatttttttagataaagttttattagaatgcacccttactcattactgacataccggctatggtagttttgttttttgttttgtttgtttgtttgttttgagatggagttttgctcttgttgcccagactggagttcaatggcgcgatctcagctcactgcaaccttcgtctcctgggttaaagcaattatcctgtctcagcctcctaagatgctgagattacaggtgtaagccaccacgcctggtccttcatcatttttttttaatggcttttaaagttcacaagaagaaagactatttccgaaatctgtttttcctcattttgtttattattattattaaagacaatgctgtaaaatatttaacatatcgtaatatataataagtatgaattatatttctatatgttctatgctatacgtgtttcttattatatgttccatactaaatataaattactactctaagatggcccccagtgatcccaccttttggtgttcacatctttaatttcctgtgagtgtggcatacacatgaggtggtttgcttcttttttcttcctttttttttttttttttggttgttgattcaagttcttgctctgtcacctaggctggagtacactggggtgatcaagctcactgcagcctcaatctcccaggctcaagtgatcctcctgcctcagcctcctaagtagctgagactaaaggtgtgcaccatcacacccagctaatttttttggtttttagtagagatgaggtcttgctagtttgctcaggatgctcttgaactcctgaggtcaagcaatcctccctccttggcctcacaaaatactgggattacaggcatgagctaccgtatccagccccttttccttctttcttcttcttcattttcttttttttaaaataagcctgagttcctgaaccttgctgctttattttttgagatggagtcttgctctgttgcccaggctggagtacagtggcgcgatcttggctcactgcaacctccacttccctggttcaagcaattctcctgcctcagcctcccaagtcacggggattacaggcatgcaccaccatgccaggctaattttttgtatttttagtagagacagggtttcaccatgctggccaggctggtcttgaacttctgatcttgggatccacccaccttggcctccccaagtgctgggattacaggcatgagccactgtgcccagcttgaaccttgcttctaaccaatagaatatggcgcaggtaatgggatgtcacttccatgattaggttataaaaaaccatgacttcttgttgccagccaactctttccccttccttgctttggtgaagcagctgccctatggagaggctcacatggcaagatgtgaagttagcattgaccaacagccagcagggactggagccctcagtccaatagcccttaaggaatgcagtgaattttgcaatcactacatgaacttgaaagcagatccttcctcagtcctgccttcagatgagacatcagctgggctggcaccttaattgtagccttgtgagaaatcctaatacggagaacccagttaagctgtgctcagacacttgattcatggaaactgtgagataataaatgcgtgttggtttaagctgttaagttttggagtagcttgttacacagcaatcgacaaccaatacacataccattagtcacaagcagtaattctagggtcaggcactcaatgtagccactattatttccaagttattccaaagagcccccatctaaaaggtagcagaaatcttctctattttcctagttagtccagacacatgccacaccctgtttggagtctgcccagtattcttttatttacttatttgagacagagtctcactctgtcacccaggctggagtctagtggtgtgatctcagctcactgcaacctctgcctcccaggttcaaatgattctcctgcctcagcctttccagtagctgggactacaagtgcatgccaccacacctggctaatttttgtatttttagtagagacagggttttaccttgttggccaggctggtcttgaactcctaacctcaagtgatccacccacctcggcctcccaaagtgctgggattataggcatgagccaccacgcctggccaatgctcagtattcttgaaagtaaaatgacaaacttgatgacagttgtaattagataaagaatctcatgaagcaatagtaataaaatgtatctaagatctgcattaaatttaaactttatactgttatagaaacagcgtaattacagttcccagcaggaacaggattacattttttatttcctcccaaggcaggacctaaaaaatctagaagcctgggataaataacataaaactaaggtatcaacagtatcactgtggtggggacaattcagccaggatctttacatatgatagaaaaggcttctctgagtccacagcttcaccccctattcctcagaaaatccgccccagagccctttctcacaaaggaagattggctgcctgggtgtggtggctcacacctgtaatcccagcactttgggaagctgaggcaggaggatcatttgaggccaggagttcaagacgagtctgggcaatatggcaagaccccatctctacaaataataatttaaagaattagctgggcacctgtagtcccagctacttgggaggctgaggcagaaggatcgcttgagcccaggagctcaaggctgcagtgagttaggatcttgccacttaacttcaggctaggtgacagagcaagaccccatctctataaaaaaaaaaaaacaaaacagactggttcttgtttcattctgtacaacttcaatgcggtcattagaaaaggtacaggggaaatctcaaaaccttgacatttcagagatgagcagctttttcattcccctggctaaggttcaaaggatttcttagtccagcattgccatgggctcacagcatttcctagtaatattatatttcttcttatccataaaaggcagccccttccaggacaaaggatttttcatacagattgtctcatgcaattgtcatggaattatgctgaggcatgtcgccaggcaatgtcattaccttcttactaatgaaaaaactgaggtggtttcaaagcttgcccagggtgatttagctcctagctattcaggccctttccacacatatcccagctctgtgctctctgtggtacagtgaacgcatcgtagattcagattggaattcaagctctgcccaggaagcatcagagcctgctctccactcccaacatcacctacttccctcccttccccacacctactaacaacatcattagtcacaagaaaaccctaagcaaaggaagaatttgacaagcaaaaaatatcaaactttgaggtctacaggcagatctatcctacaccagtgaattctaaaatgtaaaatgcttcccaatgtatgccgctgaagagtgaagtgagagcaatcattatttcctagacggtttttgagctgggcaacctgggagtcacagaggtgagcaagaacttggggtgggtgggagagagatattaaggaactaaaaaaacctcagaggcaggaaaatgcaatggaaaggcccagcaccggcgcaggtgggagatctgggggaaagagcagagctggggaaaggtagttttggagtcacctccaaaagtaaggcagctcatgcagccttgagaaggctttattccagggagttagagggcccatggaaggtgtctgcaaaggaaagaaatctgatctgcacagcactcatctgacagggggaagggtgactgggaaggtgagagcctgggagggagactgttcaaaagtcaccctggaaacagcatctccttgtcacagtttcttcacctggaacaccaagtggttctaccttattacctccaccatcacactcagcaacaacactcagtgcatgaatctagccacagcaagaagaaatacaggcctgggccgaacgcggtggctcacacctgtaatcctaacattttgagaggccaaggtgggctgactgcctgaggtccggagtttgagaccagcctggccaagacagtgaaaccccatctctactaaaaatacaaaaattagccaggcatggtggtgtgtgcctgtagtcccagctacttgggaggctgaggcaggagaatcgcttgaaccc

SEQ ID NO: 97613 - DNA, 13476 bp, Homo sapiens
tgacctattttttttttctatgagataaaaagacattcagctctgcagataaacatcaatattttgcctgttttctttgccttttcccttaccagtgacacagtctgggccacactgatgagatcaagggttgcccaacttctcactggtggctctgccctgggcccagccctcacctgtcccctactctgcaaatcagagtgagggattcggggtttgtggccacaaaccaaggaagcctggatgtacagatcaaggcttcaggagcatcagtgggagctttagtgagatggacggggtgggagttgtattgtagaaagagcaggggaatggagatctggaagtaaataaaaaaccaagaatggttatttcttttatcaatcaaggtggaaaactggctgtccagaaaccaagtgcggctaggaaatggctcctatttagcctacctggtgtaagatttgtttacattcattgtttatatttttaaattgtagcatttcacacaaaaatctaggtgctcagcttctcttgaaaaatcagaagatgtgctcctgtgagcccacagcgggctgagcctgagcagggcacccctgtggccgggataggtgttgctcccctcggctcaggcccacctggctcccctggctcatgtatgatgacacctgcctgactcttgcatttgtgacacctcctggggctactgtgtcagggcccagaacagaatggaccctcaataaataggtgttgctcccacaattgctaaatggcagctgttcagcaatgctgacatggggaaggagtaggcagaggggaagtttaatctgaagttcttgattctaacatttggagaaatagccctgccagcccagtggcagtgaccttgacctcagatgccacagggcctccacctcccaccaggcagggaagactcactccactgctcttctccatcccaggcggcctgcatgtggttagcacatcattctccaggacacagtacatctgggacaagaccctgccctgccagcttggtgcctcctgccctgcttgccgttctgctctgcatggactcactgggggaacctttcttgtcttcaagcattttctggacactacctgcctgagtgcactgagggtgcagatgagaaggtacaaccctgcctgcaggaaagtcatagtctcctaggggacacagacaaatgaactgggtcacagcaccttgggacgaatgtcaaggcagacaacaggcagctgggtgcaatggtgtaagcctgtaatccctactactcgggaggctgaggtgggaggatagcttgagcctgtgagttcaaggctagcttgggcaacagagcaagaccctgtctcaagaaacgatggacaataggcctagaactttactctgtctcctgacactaagacatccatctgggactcagctgtgtgttcagtgcctggcaccaagcctgcccagcagcagaggtgcagcaacacctgatgaaggaaggaatgtgctgggtgcaggggaagcagggggactctgccagtgcaggacagaaaagaagtccctgggggcttcccagaggaaggcaacttgaatgagaggtgcatgcaggggaccagcccggtgcacaggtgtggtccatcaggaaggctgtgagcctgcagtacctcagggatggtgggatgtgagctgtcctaggggttggctgggctctggtagaaccctcattcactgggctaggcagactggattattgtatgaaggagacgaggagcttctggggtgtttattcaaggaaatgccaaagtcagagcagagtgtttagagagaggtcctgggatgggtgtataggatgggcaagaacctcagctgggtgaagctgtcagccacctcaggcagctggcatcctcttgcctcttcctgtctcctgcctccacctgctcacatctgcctgcacctgcccgcacctggctcctcttacctcatcttgcctcctcctgcctctacctgcctccatctgcccacatctgtctgtacctgcctgcacctgcctcttcctgtctattcctgcctccacccgcccacatctgcctgcgcctgccctcacctgcctcctcctgtctcctcctgcctccacctgcctacatctgcctgcatctgccctcacctgcttcctcctgtctcctcctgcctccacctgcccacatctgcctgcacctgccctcacctgcttcttcctgtctcctcctgcctccacctgcccacatctgcctgcacctgcccacacctgcctcctcctgcctctccttccagagcctatctcttccttctgctcatcttggccctgcccctgctgggctcagctggggcccacttgccctaaaagccctacccggaagccttggctcatcctgaccatgtggaagagcaacccaactccttgggttgctctttcaatttctgtgtatcagaactagactggaacatgtttttttttctccatgtatcctccagcacacctgcaccaaactggcccttcagatttgtgcccaaattgctaacgacagtgaagaatcctgtgtttgggcctctggcttgtttttattctggaataactagacttaaaatgtgagatccctgtttgaaaagtcacatacttcattcatcttccaaagatgaaaactaatatgcactcgtgtttgccacagcagaatgggaagtttgctacagcagaacgggaagttttaaaagtaaagcatgatgaaaaaccagaggattccaagatgaattctttaactgcgggaatgattcccttttattagtaagaagaaaaatttctcaagtcatgttactgaaaaagctataacatgaaccacaaatgatttcacttgctgaaacgtctggaaaaggatttcaatggcatgttatgctatttaaatgtaatgaatgatgagggttagttcatattctttgttcagaaaggcattcataaaatttttttcaaagggagggaaaaatgtaactgtagtggccagctttgcatgctgggttccttgcgttcttcagcgaagatctggtaacacacatccaaatttactccaatgcagagtgccctgcttcagcgaagatctggtaacacacatccaaactgattccaacgcagagcgccctgggattgtcagggtccaggcagggtcagagaagagagacctgggtcctgaggatgaagatattgcctgctggcaatctctactctaagaaaggtgactggcactgctgctatttaaccaattccaggtagttacaatagcattgatactaattttatcaatttacacactccaaatctgtagcaaaaaaatatatatattaagaagtaatatcgatgtgaaatatgccttaaagctataaaaagtaatatcaattctaaaaatgttttgaattgaagaaaatacaaacttattttttaaaaaaagtcaatttttgtttattctgtctccccaaaattgcccaagctagccttgtactcacaggctcaagcgatcctcccacctcagcctcctaagtagcaggaatcacaggctcacaccactgcacccagctgcctgtcgtttgccttgacactcctcccaaggtgctgggacagggtgagctgagcccaccctgtcagctcacttgtctatgtctcctaggagactataactttttttctaattgttgactctatccaacaattagagtcctgactgatcagtgagagctccctgattggaaacaaagagtgtttcagtgacacagcacactccccctaattaaggggctgctatgctggctcctttacaacgattatctcattcagtgatcttttttatttctgtcaactcccttcacaggaaagaaactgggtccccagtacacaagagattttccacacagtcgtggcagcacttggcaagaggcaaggtctcctgtgacctttaagtcacatcacaccctaattgactgccatcctgaaatataaggaataaatattttccttctttctttttttaaaaaatgtgagagagcgttacctacttgaattattcttacacctttatgaatatatccaggtcacacgccacagagattacacacatgcatgtacacacacacacacacaccccttacgagtagcttattttacttttatttttttaagacagagtctcgctttgcctcccaggcttgagggcagtggtgtgatctcagctcactgcaacctcagcctcctgggttcaagcgatccttccacctcagcctcccaagtagctgtaattacaggcatgtgccaccacgcccatctaatttttgtatttttagtagagatggggtttcaccatgttggccaggctggtctcaaactcctgacctcaagtgatctgcctgccttgacctcccaaagtgctgggattacaggcatgagccaccacgcccagccacaagtagcttattttaaaaagtataagcaaaaaaattcccccttttctctaccgagatattgatcctacctggatcagaaacaaccctggggcctctgtttcttcatgtgtaaaatgccatccctggtgtgggtaatcactagaacctccttccagctcagaaaattcaggattcatattgtcaattccactcatggtttaatttgggcaagtgtggagttgcaaatcacctgattttcaacaattccagtatgagtggatggtacagagtactggagaggaattttaatcaagtgactcatgaagagatgccctttttttcttcctaggggaggaagagatgcagatttataaaaagccattatcatgtgaataaatacaagttaagccacattcttgaaggcttgatgccatgaataaaatgatgcagctaggtcactggcatcaacaccttcaccttggatttatttattgtccaggcattttcaggagtgagaatctcagagttagatctgcagggaatggaactgcctatggagcgagaaggactgagattgggggtgttgtagagtctcagatctcaacatccatatcgattcctagacaggccaccttcactgcagcaagagtctttaataaggccctttagagagcaacagcaacaaacagccatgtttaaactaaattagaattaaaaatcctcagctacttgccaactagaccatcctccaggggacgatggtactaaatattcagtgagtcaggatgggaggttctggtggggggtgggtcacaacatccacgagccccgggtttcagcctctccaatagagttactaccattagaataattcatgacacctctcagccccacggactctctgtaaaatgggacaacgcttcccttatgggattactgcaagggggaagctggggatgctggaaggcttcgtgattctagagccagattctctagagccaggagagcccagggcaccaccttctacccctatctgaagacccctgtggagtgggctgtcacttccagacagaagcaggttgaggccctggaaattctgtgtcagaaagaaaggcaaggaccagcggtccaggcaagcccagacatagaaaatacacactattaattaataccataacatctattcataacatctacaacataaacagctcaaattatgtcaagttccaaagtaccaaaatatgtttttattaaaaaaaccagcccccaaatccatacccatttatgaaacatgacataacctttgctgtggggttgcctctcccatgctgtggtgaatgatgtttgtagctagtggttttgtctttttaaagtgtaagatagaaaatggcactgtccccctttacaagatgacatcaacccctgggatatcttacaaatggagagtgacttccagattttaataagaaatgaaagttgtatcccatttgatgaatgaagggctaggccacagcttggagacgcagagacggtttttcctatgcagaatgctttgccgtgaaaggagagtgcatcccagaagctgcatgcctgagctcagaggcaatcgtcacctgcacattaggaaggcacctgaggtgagagcagagggaagaaggcctcgatggcagacccagagaaatcgctgtatttgcttcacagttagaggaaggaatcatgcagctctgaggcgtagtctraatgtttgacccctttgcatcaccccttccggaagcttctaccttatggtggacttcaggtggaggggtccctgtgaatgtctgggtttgtagcagtgcttgatgtgcctgggcactgaggggacacggcagccctcagggagggactgttcaaagactgatgcccccagcacaaccctgggaaggaacaggaagcgtcatcaagccagggtactccgcagaagaggtcagagaaygtgccctcgggtggagacagggtcctgccagggagatgaaagggtccccgcgggaagaaaggggagcaaaggatggagttgcagggcccagatgccctcaggctgggaggagctgagtcacaaacagctgtccacagagtggccagctgcatggagacacagtggacatccatcaccaatctgggaaaggacaagaaggatcggttgcccctggtaatgggattcaagcctgggatgtgggttgggctgaaatgatctcacacgcccaccagcgctagagcctgagatgccccggggttgattttggtcacaaaagctctgcttactcctgacgcaaccgcatcctgccgccagcaaaggccacgtttgcaccacgggagctggaagccccggcagcctgggcagtgggaggggcagagagcgggctaaggaagaagcagggtggagcccggagcccacacccgacagactcagaggggactgctgggggagacagcactgtcagtcacgcgtcctggtgccagcctctccatggaaacgggaggagagaagggcaaacacagatgggagcacctgctaagaaaagggtttgcaaatgccacagaggtatgtagaggcacggacagggattggggaggagtggaggctatgctcatagcgggggccccaaacgtcagcagycctttcttcacaggcttaaaaatggasgctcccaggggrcgctgcccccagagcyggagccttaagggaacccacctcctgaggccgtggctcacggatgaccaccgttccatggctagaagggtcattccttccttccagcaagttcccacgcacatatgctgaccacctcccaggtgtagacagtgcccagagcccccaggcacagagcggggaaggctcggcccctgcttcccggtgctccacaacctcagcagagcaggccagtggggtggcggcgagcttctcctccttcgccatggaaaggagcatggggttgagggctgggagactggattctaacttccggtccagtgtccacgtgtccagtgtcgaagccccatcatcccccaaagacgtgacttatccttggggatgagtgcggcattctgggaaactcaaaccgtcaccgagctttctgtgaagtacttaggttttcccatgtagagaggtagcccagctcaatttgaggatagcgtcttacttactgaaaggcagatctcaaagccatgtcccaaaaggcagggagtctgactctctcttcaaagcaaatagatattctaacacatgaaggacaagaatatcaccttaatacaacaaggttcacattcaggctctcaacggtgaagcaatacaatgaacaccagtgaggtgtgaactcctctgcagacatggttggtgctctgcaacctcagtgaacacccctatagtgcaaagaaaaaagggaaatcaaacttcatctttttttccaagattgtcctctgcaaagaaccttcatttcagaaacccagaagttttcaaaacaactgtgggaaagagagatgagtgagttacaatcaccagttgtgtgtgtgtgtgtgtgtgtgtgtgtgtgtgcgcggggggtggggggaagggggataatgtatgtttacaggagttgtttagcaagcatctgtgctttataggttacaaagtattttctttgatatgacttcattaaatctcaaatcaggattatcatgcccattagggaaatcgaggtttagggaaaccacaggacttcggtaggggcctggaaagagaaaattcaatccagaccttctaactccaaactccaagctcttccactctgccacctggggtggatttgtcaatcccagctaagagaggtcaccctggacaactgcatggaggaaaataatgatgtatgtttagcataactttctctgttaaatgccagggagccttagatacattcttgatattgtaattaaatagctttttaatattaatttgtgattatgcttgcaaggaaagtcctaggaaacttaaaatatgctatacatctgagcacatttttatcgcacatcagaattctcgcagagtttaattgggcccatggtgtaaacagttcctcattttcatccagaacgcgtggcatgctgttatgttttcaggaaagagaaaattatcttaatttatgtaaagagtattcctaaagatatgtataatgtagtccacgaggattaaacaccaaatgtgtaaatatcacaaacttatctcagcacatattgtctctgaaatggaaacaactttctttgctgcaaacagtcactcaggagagccttgaattttgtcattttgctgtttatgtgtgtatggagggggtggtaggcagaatccaaaaatgtcccccaagatttccagtcctgtttttttccatcaaacagtaatccaggtaccgttgtgaagggactttgcagatgggattatgtttgctaaacggctgactgtaagtagggagattatcctggatcatccgggtgcaccctgtgttaccacatgagcccttaaaggcagacgaggagcaggagagccagagagatgagggagaaagggggtcagagagactgggagcacatggcgggctttaaagatggaggaaggagccacccgctaaagcatcgggacagcctctagctctgaggacctcccccagcccacagcctgtgtggaagctgagacctcagtcctacaacctcaaggaactgcattctgccaatacctgaatgagtttgggagtgaattcatcctgagcctctggaaaggcacatgaccctgcagcccgtcaacttcgtcaagtgagacgatgagcagagaaccagctgggccaggccaggcccaggcttctctgacggtgagccactgagtgagtggtactttgtcactgctgcgtgaggaatctgagcagggagtgttgagtgggagggtggcatgagcacacacagctgcaaaagagcacaggcgcccttctccaccctcctgtctctgttgctgcagggaaagcagagtaaaaaactgcagctgcaatgatgagcctgcgtgccatgcgcaaaaggctggagagaaactccgtgcagcccttcttcgccactgttcttaccgttccacctgtgtatgtcttcatttccccagaagaactgtacacatatggaagggaacaatctttttttatagctcctataccccaaaacataagcacttaacgtaagtttgcatatatttggccacaataggccaaatataaaatttaggacatccatttatcgataaagctaattctaaagcaacaatatcaataattaacacatggcagagttcttcaacgcggcatgttaattttcaatatagactttgcgtgtaatttgctttttcaatgtttttttctttttgattcgaggaggacaatcataagttgaattcaaataaaaataatacagaaccactttctgtgccctatattccttcttatattccttaatagaagaactgcaaaataaaattaatatattcatcataaataagctttatggttccaagaaacgttaaccattgaagacggtattgaaacttgacttaaagaatgagtgatgactaagtcaaaacttggctgaccatataaaagggtccacaaaagtcttttaaaaatatcccaaatagttaaaaaccatttttgctaggagatgagtccctactgggaagctttgatgaaaaaaatggagattaaggcagaaaaatatatcaagcccatggtgttgtggagataaacagtaataaaatgtgcatgataaatgatgataaaatacacaatcagatttttgtcctgcattaagaaaaaaactcctaattcctaaggtggagtggggtcatttttctggaatatgttagttcacattttccccacaacctaggattccttccatttgggtaacgatgcaaagggggcggtagagtttcagaaatcagaatagagaaatggcttgctgctcctgggaagggggcataggaatgcccacacttggcatttggaaatccctcttcatatacgaaaaacagaaagaaagaaagatggggtgggaaatattctatcacaggccagcttctgccttgaggcggactttgagcaaagtagacgtgtcacgagaaaaggcaaaaatgtaaagaacattttaaagtcagtgtgtctttcaaaggttcttaatattttctggaacacgaatcctttgggccatttagggaaatatcatcagaataatgcttttaattgcatacaataaaatatatagcattaacaacccaattttaaaaacaggcaaaagatttgaacagatactattaaaggagataaacaactttatatacaaataagggcctgaaaagatactggacactgtgagtcactagggaaatgcaaattaaaactgacatgaaatactactactcacctgtaaggatggcaaaaacttacaaaggaaaaaacaactggcgggccgggcacggtggctcatgcctgcaatcccagcactttggaaggccgaggcgggtggatcacgaggtcaggagattgagaccatcctgaccaacatggcgaaaccccgtccctattaaaaatacaaaaattagctgagtgtggtggcacgcgctcgtaatcccagctacgtgggaggctgaggcaggagaatcgcttgaatccgggaggctgaagttgcagtgagccgatatcgcgccactgcactccagcctggcaacagagtgagactccatctcaaaaaaaaaaaaaagtaaataaataaataaaaaataaataactggcaatagcaaatgttggcaaagatgcagagcaactgctggtggaaaagcaaatggtgaacccatgacagaaagtagttgggaagtttcttataaagttaaacacacttaacatgtgagccagcaatcccatcctatctacttatccatgtgaaatgaaaacctaggtttatgcaaaaacctacatgcacatgttatagccattttattcattaagtgcctcaaactgaagacaacccaaatgtcccccaactgggaaatggataaacaaactgcgctacatgcatacaacagaatgctactcagccataaaatggaatggactattgatacacacaaggatgtttcttaaatccgtgtgctaagtgaaagaagccagactcaaaaggctataaataattccacatatattacatttcagaaaaggcaaaattacaaagatagagaatagatcagtggataccagggtaggggtggggttacagggtctgacataaaggtgcatgatgacagattttttttttcgggggcagggtggtaaaatgtgcatgtctcgatagtgttactggttatacaactctgcatttgttaaaattcatggagctgtacgccaaaatgagtgacttttactccaagcatgtaatttaaaaaataaaatctaaaaacaatgcttttgttttctttctttctttttttttttttttttttgagatggaatctgcctctgttgtccaggctagagtgcaatggtgtgatctcggctcactgcaaccttcacctcgcctctcgggttcaagcaattctcctgcctcagcctcccaagtagctgggattacaggcatacaccatcacatctggttaatttttatatttttagaagagatggggttttgccatgttggccaggctggtctccaactcccgacctcaagtgatctgcctgcctcagcctcccaaagtgctaagattacaggtgtgagccaccacgccaggcctaaaaacaatgttttaaaggcatagaggatatgtaggattgcaaaagaagccaattacttggaaataaaagtgcaaatgttttctccgtctagatttgcaggccttctgaactctacccacaaactctcaagagaacccacccgctgcagcctgtggctcccaactgtcctgcctacgcccaacagggaactggggatccgtattccagggaaccctctggaaacgtcacactcagttagcagattcttgagggcggtaactatagttttcagatctttgtgtcctctgtacctggaccaggtagagacttgataaatatctgtagttgttaaataaatgaaatgtttatctttgctgatctcttaaaaataaatcagttttacctacttgccatgcaactcacacttccaagtaatttgcttaaaatactttattatattaatattaaggatttatgtaataattcagatgtattaagggatatgtaagttcactatttacacagcatacatcatggaagacattaacctgaaacattacagttgactgaacctaattacataagccgctgtgaatgcaaagtaccccctaattttattttacaatgcatattaaactcattcctccaaatacaatggttccatattgtagcttgaaatgtaaaccagtccaatgtttaattttgcttttaagattaagtagcacgtgtgtaatttaaaagtgacttgaaacagcaagcagtgtcactgggcttacaattaatgaggtgttgtcaattgcaaacaaattgaatacataaagctgttaactacaacctctgtacttaacagacattcgctttccgtagctacacagctaatctttgttttcctgtgtgaaaggcaactgaccatggccttcgtgtctgacatgttgtcagtgttttgttcagctacaaatattgggctgaatgaagattgatataaaaatgaatgctatgatgtttttctaagtgaattcatcaatgaggcctcatctaccagtgtgctttccaagatgttatttggaaggtagatataaatttccaagtaaacacctccaagtttgtacccacagtacgatgtttgctgttcactcaatcagcgttgtagatgagtgcaggattccagataagcctatgagtctaacccagcacagctaatctgtcctccat

SEQ ID NO: 97614 - DNA, 26839 bp, Homo sapiens
  misc_feature (1)...(26839): n = A,T,C or G
gccctgtgaacaggtttatcattcctattttacagagaagagaactgaggctctgaggggttaaatcacttgcccaaagtcacgcacctcataaaaagtgaggctgggatgcaaattcaagtcccctatgtccagctccaaagcctccatgtgtgcatctttaggtacaaatccctgatgtcagattatactttttccattttttttttcttttacttaaaagtaaattttagcaaaaataagtttcctacaatcttttttttttttttttttttgagacagagccttgctctattgcccaggctggagtgcagtggcatgatcttggctcactgcaagctccgcctcccgggttcacgccattctcctgcctcagcccccccaagtagctgggactacaggcacccgccaccacgcccggctaacttttttttttttttggtacttttttagtagagacgggctttcaccgtgttagccaggatggtctcaatctcctgacctcgtgatccacccgccccggcctcccaaagtgctgggattacaggcgtgagccaccacacccagcccccataatcttattttttaaatttaattacaagagataaagtataacaggttttagaaaaagaaaaaattattacgtagtttttttccctgtgcccttttttccaaaactgttataatattcatttaattgtgtatcctgaatcactaaatactattaaaacatccgactcattctccatgtggcaccatggttttctttacttatttttagaagcttcacagtctcacatacagcgagtaactgtctcttttagaaaccattttatggtttcatgtagaagagagacatgtataccaaatatatcttttaaaagccaggccttctgaatataaagatctttgaactctctatcaacatacattgcagtttcaggggcaaaattagaagagcaattctatacttggggatttatggaataaatgaaaaagttttttaaaatcccttttttcaactcccagtggaaacattagataatatgatgaagtcctcttttagctgaacacctattaaagcaaccaattaattcaggtattaacagtctagtgtgccaaaacaatgacaattaaacctgtcagaacaaataatctacctaccaaaactgaaatggcaaggatatcatcatcaaatcctccaaggtgcaggcagtgtgtgctgtggaaagatcctcaaagtagacttctcaggaaccaagttcttttttttttttttttttttttccttgagatggactctcgctctattgcccaggctcgagtgcagtggcgtgatcttggctcactgcaacctccaactccctggttcaagcgattctcctgcctcagcctccggagtagctgggattacaggcatgcgccaccacgctaatttttgtacttttagtagagacgggatttcaccgtgttggccaggatggtctcgacctcatgatccaccttcctcggccttccaaagtgctgggattacaggcgtgaaccaccatgcccggccaggaaccaagttcttatgctcaaaatacttcttcctgtcacatgtgtctgtggacatgacactcaacctccacactcagcccctgcacttgtccaaaagagggccactcaccaagggattgtgaggaggctgagaagtcaggaaaaaagagcttcattcacttctatctttagtgcctagagaatagagtactgctctgaaatacctcatatcttatgttttcaaaattatgatatttaaagagtttcatgataaggtcaaagtctccactaccctctgggtctgcctaatcttacctcaagcacccagtgcaaacttaagagccattcctaccctggtgttctgagatacattctttattgaaaccttaggaaatatgaccacctgcacatccagggttattaaaaaaaaaaatatatatgctgcaccatgactatgggatgtgggcacaaggtcagaaataaactggggtggttctaaaagaaatgtacaacccagagaaccaggcctcaggagaccaacagggttggagccggcagggacggcagcagttacttgccctaaaccccggaggcttggaaaatcatgccttacaattgttagagtttgatttcattttatttacaaaagtggtactctgctttaactttaaatctctctgggccatgcagagtataatggaaaattactcaaatagtcctgtgacaccagaagtccacagatagagaaaggaaggtgtacctgggtgcaggtctagctctttcgcctgggagagttacttctccctctcagcctcagccttcccataatgggaagaagtgggtggaccaatgataggtgttcttcccgctgtgtgacctgatggccaacataaggaaaaaagtgccatgttcctggtgatttaaaaaaaaaaaaaaatttcttattacagagtgggggtctccttatgccagcaattacattgtttaggaagagagggctggtttttcatggtggttgggaaagaatctagagggctctgtctggcataaaggacctctttgggacctcggaagtgtctttacaagctctagtaaaactttaaggtagttaagtgtccaatctatctttcagtttcatatactgtgaggcagaccccaagtcacagatgtctgtatcagcctttccagaaagagtatttttgaaccttcttgggtgtctcatgtgaagctgttgctcattgcaggcagaaggctgtcccttccttagatgcatttaaagttttaagaatggaggttgtctgtacatggtagatgctacacaggattttaggagcctctggtttttttgaacagacaggggcactatgcaccattctttctcctgactgcttccgatttccctaaaaacaccctccaaaagtgaagattcctcctatggcccagcagatgccccatatgcattacatgggcttaaaaagttataaatacaaacttctaaaaacttcagaatctcaaaaaaaaaaaaacaacaaaacatcaaaacctgaaaataaaaaatgactacattaacatgagcttgtaataagatacaaattctgcaccttctgtctgtgtaccactttttaagaagacaggacggtactgaatgatgacagtaccttaggaatgtctatttttggaaggttacatgttggggttttctttcaaaatatactattcaatattttctttaaatatatttcctttaaatagtaagtatagtcaggtatattccaaacatgatttttaaaagagtaaaaaacaattataataatacatttaagaaaacagatttatgcgtgctcacaaatctgacaatatgaaggctatattaatataaccagtacttacattatcccatttaagtaaagtctttggattttagatgtgcagctaggccctgctttatttaaaagcttaaaaaattatggctaaaatggttttttgtacaacacctttcttttgccccttgtaactttatgagttagtaataaatgagtttggttacgtcaaaacaaatgggaaatagtttgagttttaatgcaatattttaaaacctggtaaaaattcctttaacagtattctaagtatatattttttaaagtaattaaaatttctaaacctctcagacagcattcaagcattcctaacttcacagcctcctaactctatcccctcccccttctccactctcacacacaattaagtcaaaggttaatttccattctaagtcaaactctaatccaaactctaatcctgtgttcccaaagtaccccacccaacacataaagctcccaagcacacagactcttctccagaataggaaggtcacaaaagggtgagaggacaccctcgtcatatggtgaaaatcagctataaaattcagaagttccatcaatacccacatcattttataaacaaaaaatggtcattcagagaaaaggttccttcagtgtctctgctgctgttccttagtgagaaaatgacttctaaaagggaggcaaagaggcatgagaggcaagtctactgaagcaggactggtttcacttctggcaccaaagtcgatggcaacaatgacggatctggagacatgccttatgataaataccaaaaggcagcgacatcgtaggcatggcagctacaggcactgcagaccaagaagcagagcttcaagccccacactcacaaggctaaaacgtttcctcgtgtgagaaacagaaccaccactaacaatttttggaaataatatttgagtcttggctcccaactggataattttgttctgcaccaaaagcaattccattcaaattcccaaagtcttcaagcggcttcagactaatttcaagacacagtttccttccaagcccaatgaaatgaaaggcagaaaccaacaaaagaaaaaaataaaattaaataacatgtataagatggtttgccattttatgaaaaacaaatgaagacttacgcttgcatcagactgataaactgagagtctgccagtggttctcagggcagatgtaacattttaacaaatgtgattgtttgtgaacgaaataattctgatcaaaaacttaattgcagccaaagtgggccctgggctgtgtcaccataatccattctgacaggaagcagtgagtggagattcctactgtgaacggagcacatgtgaaaggtcagctttggcctggaacttcaaaaccgttaacgtgtaaaacagtgtgcattagagcccggaacagctaaccactggattagcggatgtccgctgtgtgagtctgatgtgcttttggcaggtaatggttaattggtaaataggcaatgtattgtaactttcttctttgcctctttccaacatttaccagcagaacctattcttaattatagtcctaaaacactgcaatattagatttataacctagtctcagaataccaaagtaactgatttctcaaataaaattcatcttttttagtaagggaaaagttgcatgtattttaaaaagaaatatctgtagatggaatgaaaaaaatattttcatgtaaaatggatatatctgttcatccaatagtaaccatattattataatagccaaaatttgctaaataaggatttcattagaagaaataaatgctttacttatgtattataatctgaaatctgaaaaaacaaatatgcaatactattttacatagcttaaaacgaaattctaaataaaaataaagtcaataccagtttttatttttcaacatggaatgttaattatgaaagaaccaagctaaacattgccttttaagtcaatgcacacagaagtagtttatacctatttagtgctataaaattggctcatttggttttaaattatagccatttttcctatacctaaggtaatagggcactaatgagtgacaaaatctggcaatgtgcacttcaatgatcattttaggatttaactcatctctgagttgaagagagaaataatgcttctccctgaaaacaagcaggtcttctattctcaaaatcaaccttctaaggttctgtctttggccactggacagatgcagctcctgggcccttttaggctaaattcggggatcttaaaggtagctacctggcaagcagccttatcaccagcatgtcatgaatcctgtccccttcagaacattaactgatacctttagaaacaaaatcatactgcaatggatgacctgaagagaaaaaggatcatggtcagcaaaacaagttatcagtttcttacgtttctgctttccacacaggatctgaaacctttaacatgtctggaaatcccagaatcttcccaacagtctgttcctgaaagcatgtgatataaacagttaccaatctgctgctctgtacccagcaccttcctgggctctggccctggtcacagctcccgttcctcaaggagcgtccagtgcgactgaggaggacagaaaggttaaccacagagagctattaaggagtgaaggagcagaggtaaaacaatccagaaggctgtgtgagaggccggggctgggcacagccatctccttcttactcttcctctccacagatgtccaaggggaacctgcacagcaagccagggtcacaaacagggcacccaagttacccacggggctcaactgatcctaagtacacaaaaaagacattaaaattcgccaagaaatattttacaaggttccacatcagttattaatggtattttcttatactgttaagtgactaattacacttggtaacatattaaattataattttagcctcacttctaatcatcttttttctatcaccacaacattttcagcataataattcttggctgccgttccacttccttagtgagacccaggccaaagaagcttacaacttccctccagaaagatcaacagagcagaaagaacctccacactgagttccagcttaaagcaggcatttccactcagggctacgcacgctgccctagcctcggcgccaacacttaacatgacaactgtctcattcaggagcaagatgactgccaagccaattgcaactattaatgaggaaacagactttgcttatttcttaactggtttatattttttaacatgttttaaaacacaaaatttccagaaagttgaacttatacttttaattccattctggactgctagctaaattttacaaatacaaagaaatatgttatcagtttctttgtcaaatgagaggacaccaaagaaattcatcattcaattcttatttgtaggagcagattctctgtaacttgtaaattattttgatttacagtgaatcattattgcattcataaatgctggaaagttggtgaacaacatgatataatgacaccccaaaataattttataactgcaggtgtgcaaatcgtaacatgtgggagatgactcaaaggataatggggaataaaggagtttaggaaggtcacataaaggagggaaagggatgagggcatgtacccaattttctaagatgtcttcaaacccaaaccactcctgtttaggcagatgcagtggcgcagtcaggcacgggcagcagagtcaacagttacatttaaaccagcaaaagcaaaatgcttcataatttacaacaacccaatcagattgctcattcttttgaggttaaatgctactgacataagctacacctgaatccaatcagtgcagaaacattgagaagattcacacgaaaggactaaatttgtcacaaatgggttggtttccgatcttaatgtagccaagttgctttactctgacctccattgaacaaatcaacttaatgggcactaggagtgctataaaacttaacaatggagtgatttttaacttttaaaatatagttatgaagcaaaatgttggatagcttctacaatactggaaatcaaattaaatctagatgttttttaacagtcttgacagatataatcctagttaccatgtaaatttatggtaagctgctgtgatattagccacaggtgctacttttaatatatgagccgcatctggctgggaatagaatttctcagaggactgaaaatgacctcactatcagacaatggaagggaaaaaaacaagaccactgtggcatataaaaagctgaagatgtggtccacaactaaatatttcacataaaattcattttaactctgcagttgtaggttaaaggatattatgccttcaatatttaagaggcatagatgtatttcaaccaaaaagccgaaagattaagaatgtaagacagttatgaataccgtggctacaaatataatactagttttccaatctttgatcaatgtcagaaaaaatgatgcactaagacttgaaaagagaattatttcatggttcccaagcacacgacctgattagacaccacggagcataccaaaccatgatgtaacaattactgatctctaagcagcagccactctccagcacctgcccaacattactggttgtgttgtaaaagttctttggggtcattcatcgggcccaagaaaacattttcaccaagtgaaatttttttttttaaaatcattataagtaattaattaccattctgagtttgagaaccagcaatatcacccagagacaaatacaaaggggaaagtacatgtcccttacttatccaattcaaaaataaaaacacaaatatgtataaaacatggaattgtttgctttcaggaaacccttcctgaaccactcgaaagccatcatttgccacagaactagcaagtgtggaaatgtgatagaggatttacaaagatttaatttcctatgaaataactcttcctgaattaaacaagccttctttatccgaaaaaactctctaaaagagaaatatttctgtgaaaatatttcctacaccattgcactaagctgtgagaatggtggctacaaagccctataacataacattttccttctggctgtctcaagtaacttgaagggcttgattttttagcttcaatggatcaattctatctaggtgatgatttctatttacttttttaacaggtgactggatctattcctgatctcaatgggcatggagatcctgagtatatttagcaagaactacccagtacagctccctgacacttttgtgtccaactgacagcattaatacggagcatttagaaaaggtgggctcacaaagcctcttctgtgaggatggttaccgtagaaagggattggctaaattaaatatggcttttttgttcaatggaataatttatatatctcccaccattcaaaatcgtgtggtaagccagctgcagtggctcatgcctacagtcccagaactttgggaggctgaggtgggtggactgcttgaacccaggagttcaagaccagcctgcgcaatatggcaaaacccagtctctacaaaaaatacaaaaattagccgggtgtggtggcgcatgcctgtagtcccagctactcaggaggctgaggtaggaggatcatctgagcccagaagatagaggctgcagtgagccaagatggcactactgaatcctgcataggtgacacagtgagaccctgtctcaaaaaacaaaacaaaaaatcatgaggtaaaatattttactgatgtgaaaatattcactatacatgaaatgaaagaagcaactgaccaaaaatatctataatatgatcccaaatatatatacatacataaacattcacacaaatgcacattcacagcgtttttaagtgagcagaaagattacaggtatatttttcttctttatacttttctgttttccaaattataaaacatattatgcaatcataaaaaaaaatttatttaccagctgaacatgccactcaaatgttaacaggagggtatcattcctattagaatgagaggcctggtggatgtggatctctgtggagtatgagtracctataaatgttaaacccttctatttaaagctcacagttttaaacacatagaaaaatggaagagactcacccacaagcttacataacagaatcatagtttaagaaactccgaattggccaggtgtggtgactctcgcctgtaatcacagcactttgggaggccaagatgggaggatcgcttgaggccaggaattcaagaccagcctgggcaacatagtgagatcccatctccacaaaaaaaagtaaaattaaaaaatttgccaggggtgggcatggtggctcacatctataatccctgcctgagaaggcaggggggatcacttgaggtcaggagttcaagaccagcctggccaacatggtgaatccatgttgctactaaaaatacaaaaattagctgagcgtggtggcgcatccctgtaatcccagctacttgagaggctgaagcaggagaattgcttgaacccaggagacggaggttgcagtgagctgagatcgcaccactgcattccagcctgggtgacagagcaagactacaactcaaataaaaaaaaaaattagccaggcaatgtggcatgcatctatagtcccagctactcaggaggcggaggtaggaggatcgcttgagcccagtaatttgaggctacagtaagctacgatcacgtcgctgcactccaatctaagcaacagagaccccatctcttaaaaaataataaaaagaaacaaaaaaaaattgtttaaagaaactcagaattaaaatggccctctcttctatgcatctgtatccacagctatacggttagtggcttcgatgtttatcttctgtatgcagagttccacttctccaaataaagttttcagctgctctctgcagacctatctggaagtgactttcccctctagatagatgctcacctccaatctgtaacagacttagaactgatcattgatcaatccagtattataaactaatgctttcagggtagggcatagggaaccatgtagcaatttacaagtcaaattcctttcagtagctggcaatctttttcttcaaaacatgcaaataacatacgcctcctttaagcactccaaaataaacatttcttcctaaacagaacagattcaattctgaatagcagagttgcccattcaaagctctaagacattcctaaacaaaactgcaatccatatcctttgttattctacaattcttcaaaatacagacttgtgttaagagaagagcagtcaccttagggtgggatatctggccttggaatgatggtcccactgcccacttcctctggaagtttgagcaagctctttaacttccctgacttttccaccattagcaaaatgggaatacgaacacctaaccttaggaggcttctgggaagcttcaatgaaacaacctatgttagttcataggtcacctaacaatgagctactatacccaatagacactcaaacactcattagttcataaaatactttgtaaccctctaatctgtcacaaagaaaactgatttggctgcatttcaggtaaatgatgcaatattaagagttacctgtgtacagaatgaccttaaagcaacatttttatatccaaatttctaaaattaattcctcaaattactgccaatatattttagcttttctttatagcacaccaccaagttatgattcaaaaaaaagaaaaagaaggccggcgcggtggccaaagtgctgggaggccaaggcaggcagattacgaggtcaggagatcgagaccatcctggctaacacggtgaaaccctgtctttactaaaaataaaaaaaaattagccgggcatggtggtgggtgcctgtagtcccagctactcggtaggctgaggtgggagaatggcgtgaacctgggaggtgaaggttgcagtgagccacgatcatgccactgcattccagcgtgggcaacagagcaagactctgtctcaaaaaacaaaaagaaaaagaaaaatcagccaagaacgctggaccagtggtcacagaaaaggaaagggaaagaaagaatttgagattaaagaattgtcttgaaacagaaatgaatgcctaatggatagccagcgaacaggcctgtggcagcctcccagtgtggtatttggtcgagtatctgccactggccctcaggacatcaatattctcatccgattgtggctgtagttgtgggtggctgaaaccgtggtgctaaaatactgaatgccagtcttagtctctctcatggttggagacaactgactagagacaccatgagcagccattttcttctctgatgtctcagtactgcatgcagaacaaaggcacaatcaatgctgctgttctgggaagcaccctgtggcaatgcagagcaccctctctcatctctcagacacagcaacttagcagccagataagctggtcaccattaggaatcatcgatatctaggagtaaggagatgagggagaggaaaagtccctggtgagaaagggttgtatgtatcctacagggaacaaaaagatgaaacactatgttcccctgggactaagtgcactgactaggatcacccatggggaacctaatcatgggccctcatgcattcaaaatacaactaggtaaccctgggctaggtactatgggagatgtacacaggtacaatccaagtctctgtcctcaagctgcttataccttagctggagagagacatgagtaaacagttacatgaccctgttcataatctaagttgcatttagtcttgtcctaactttgccactagttcgttgtcaccctgggcaaactacattacccctgggcttcagttgccccatcctttctagctctaatattgataggccctatatcaaagctctaagatgcttaattaatatcaaaacaaggctgggctgggaacgatggctcatgcctgtaatcccaatactttgagagggtggggtgggaggactgttgaggtcaggatttcaagaccaacttaggcaacatagcgagaccttgtctctacaaaaaatgttttaaaaattagccaggcatggtggcatgtgcctgtagtccaagctacttgggaggctgaggcaggcggatcacttgagcccaggagttggagactgcagtgagctatgatcacaccactgtactcaaggctagatgacagaggaagaccccatctctaaaaacaatgtttttaatttaaaaaataagtctgaaagaacaccacaaacaagtataagtctaggaatgaattctaaatggaaagaaaagacaacagactaatgtctgagactaccaggtctgtataaagcataagatctccacctcctctccaggctgtcctgtgccccacccaccgaaaccaactttgctacggtcactgatgtcctccatgctgcttcctccaatgggcatcccctggtactcatcttacttggtgtctcagcagaattcatacttccctccttttgaaacaccatcttcttttggattctgtgacatgacattgacctgattttcttcccttttttttttttttttttgagacaaggtctcgctctattacccaggttgcagtgcagtagcacaatcatagctcactgcagcctcaaactcctggcctcaagcaattctcccgccttggcctcccaaaatgctgggattacaggcaagagccaacagcctttttccatttatctaacaaatctttcttgtctttgccaactcctcctcttctaactcacccctaaatggaccaagtcctgagccatcctctcttctcacactataatttcttcttgagtcatctcatctattaccttggcttttttccataaatacctatgattctccaattatctccaacccagacctcacctctggctttctaattcagacataaattttctggaagttgacatttggatgtctcacagcactccttaaacagtgtccaaaccagaaatcttgatccctgcatcccaaacccattcctctcccacacttccccagctcagtaaatatcacttccagccacctatttcctcctttcctccaggcccgaaatctgggagtcatgttgcctaggctggagtggcacgatcttggcttactgcaagctctgcctcccgggtttacaccattctcctgcctcagcctcccaagtagctgggactacaggcgcccgccaccacgcctggctaatttttttgtatttttagtagagacggggtttcaccacgttagccaggatggtctcaatctcctgatctcgtgatctgcctgtcttggcctcccaaagtgctaggattacaggcgtgagccaccgcgcccagcctggaagtcattcttaatacccttcactccttttacccttgccatgagccctacaaacaactaacttaccactaatagtcacatcgtccctcttattaatcatcatcctagccctaagtctggcctacgaatgattataaaaagggttagactgagccgaattggtatatagttcaaacaaaacgaatgatttcgactcattaaattatgataatcatatttaccaaatgcctctcatttacataaatattatactagaatttacgcatgtatttccaccaccaggagcggaagattcatacccccaagtcgnnnnnnnnnnnnnnnnnnnnatgaggccaaatatccttctgaggggccacagtaattacaaacctgctatccgccgtcccatacatcggaacagatctggtccaatgaatctgaggaggctactcagtagatagtcccaccctcacacggttctttacctttcactttatcttgcccttcattatcacagccctagcagcgctccaccttctattcctacacgaaacaggatcaaacaaccccctaggaatcacctcccattccgacaaaatcaccttccacccctactacacaatcaaagacatcctcggcttatttctctttcttctcaccctaatgacgttaacactattctcaccatggttaggccttccctaaccatgctcctcaaagagaattaggtcttcccattattctctctcacagcactcctttctgatgcagaggcagtatctgagccactaacagtatggattgcctggaatccaatcctgactccacacttactagctgtgagaccttgggcaagtcacttagcaagtctcagtttcctcctctgtaaaatttgggaaatctatttcacagagttctgtgaagattaaatgaatgaatacatgtaaagtccttcccatagtgccatgacccatagtttaagtgttcactaaccatttgctgttaagattttccttcctagggccgggcaggtggctcacgcctgtaatcccagcactttgggaggcggaggtgggtggatcacgaggtcaggagatcgagaccatcctggctaacacggtgaaaccccgtgtctactaaaaaaataaataaataaatacaaaaaattagctgggcgtggtggcgggcacctgtaatcccagctactcgggaggctgaggcaggagaatagcgtgaacccaggaggcggagcttgcagtgagcccagatcacgccactgcactccagcctgggtgacagagcgagactccgtctcaaaaaaaaaaaaaaaaagattttccttcctggcacttagcataacttgtaatgatacattaacttttttctttgtttacattctccctcccccactatactgtatgctctgtgaggataaggacagtatcggctttgttaactgataccccagtgtctggcatagtgtctagcctacagtaagtgtttgataactgtttattgttaagtgcataaaaatcaagaaaaactttctagaaataggtgggatgtgaacagaaggggcaggatagtgtgagatggggcatggaaaggagaagaacagtttgaataaaggaagaaaagaactgaactgaggagctgggtgtggtggctcacacctgyaatcccagctacacaagagactgaggcaggaggatcgcttgagcccaggagttccaggctgcaacctgggtgaccgaacaagaccccatctctaaaaacaaaacaaaacaaaaacaaaaaaaccactgaactgagatgaaaagggccttggttccaattcctgcatggacactaatttttgtggccttggtcaaggtactcaccctgtctgagccttgttttccccacttcttcagtgaaagggatgagtaggtgacctctcatgaacaytgcagttctaatctctgagcaaagaggcttcttgcagagtaatgcgaggtaggcttagggctgggctgtgggcagctttgaaaacctctgagaagatgaagcatgccctataaaatataattggaaggcagtgagattatctgagcagagaccaacttggtcatgacaaagtggcacgcaggccagtggaagcaggaagagcctaaaggtaacatgtggccaggaagctcctaccagaactctagagggaaggcagctgtatccaggccagcagcacagtcctgtgaaaggcactacaggacgactgaccagttcttggtaacaaatcaccaggataattcttccgtttcaggtctaggtgcttgagaggatgctggtgtggctactgagaggaacaagccatttgaaggacagttagagagacaagagtttgctttcagacaccctaaactggtgggaaagctaccccaggagagtacgccacaggaacccccctgtactctgtggcccagctcactgaacccattttagggcccttatttcccaacacactgcagacaaagtatgtcctcttactccctgtcctagacctatgtcacctgctaacccctcccttagtgccttcccttacaaccacataccagatcttcaagaaccaactcaaaactccccttctccaggcagcagccaccctgaagtgcacctcctgtggcttattagcacagcacttcacattctagtacctgactaacatggtaagctgaaaaaaatcaatcaccttgtacaattcagatgtgccacctccccagcaaaactaggagatcttctgggcagaaacgaaaccaggtccttctgttgcatcttcctccttccacctcttggatccagaccagcactagcccctcagtggatataagcccaacagctctgctgggttcacgaatcctgacagaaccacaccatgtgactcctggcccagccagcctggggctgctccacmcacctggtgcatgtccaccgacagggctgcgatggcgaggacagggcacttgaagtcagtttgatgtatgatatagcaaaaagcctcagcagctgggctcaacgcctgtaatcccaacactttgggaggccaaggcgggcggatcacttgagctcaggagttcaagtacagcctggccatgttggccatgttggtgaaacaccatctctactaaaaatacaaaaaattagccaggcttggtggcaggtgcctctaatcccagctacttgagaggctgaggtgggagaatcgcttgaacctaggaggtggaggttgcagtgagccaagatcacaccattgcactccagcctagccgacagagcgagactccgtctcaaaaaaaaaaaaaagcctccatcctgccctgttggcagagagcacacaagcaaacagagtcattagcagcatttgctgttttgataggattgattttaatgatacaattaaatgacctttgattgctcaacagtgatacctgggctactcccaaacaagtacagctttgtttgtttcagctggcgaatattcccttcctctgggaagtatggtaaaacccatttaagggagaaaactaatccagcaagtagtccttggaaaacaagatctcgcctaaaacaacaaaatcaaaaaaacaacctttctatgtcacagtaggatctaaaaatgttgctgtgggaaccagggatgtgagtcttgcatctggtaactgtgacatgacccagtatgaccacaagtaattccatgatctcaatcttgtttagtgtctttctgcgaaattcagtaaatgagtcagaatgccccactctaacctagatcaaaagcgcaacataatagtaattctctgcaacacaggggagagaatattactgctttgttttgtttaaaaggatgtaagaaaaagagcaaaacatggagagctcaaagccaggaagaagaacctcagccacctgcccacaccgctggaccgaatccctcctgagggcagaaagcaactggccgctacccagccacaggaatgtgagtgcagcactgctcagccactacagctgctccatcaggcacccaatatttgtattctgacacatctaaatgcaagttctgtgtcatggccctaaagcaccacaactatggacaaaactgcagtgcaaacccgaaagctattgataatggcagtactgaagcggtgggcaggcatactaacgaaaaacagaaacagaacagaaatgagcaagaccaaaatacttttaagttattatttaaggtctcctttcaattattttctgcaattattgagccagcagtctattgttattaattcacagtcaacctatttaagcggtaccagcaatgcaggcaaatgcctcagyaatttcctaagttttgggtgttattttcttgtcagttaaatttaaagcaacccatttgtgaccactttataccaagttaatctcatctaaagtgcttcacagaccctaacagctacactaaggttttatactaatgaaagcaatttacataaatgaaatttatgtcactgcatttcatgacaaattttttattttataataattatggtacttatatgataacatctgttgatattcacagtctaaacctggcacagatttaaacccacaacattttccatgcatcatgtacattatctgtgaaaagcaataaaaaaaagcaatgaatgcattaatcataccaatatcatctgcaaagcataaatctgaaatacctttcacgtcagctcaaactgcttttttattttttacacacctgattttactccatctgtaaaagggcaagacaaagactgttgaggaaattatacttcttggctgcttgactttaacaaaatactcaggctaagttctgtaaacagaagatttactacatgactaagagmaaattatgcagttaaaagtccatttttattaaagggtggtgtaaggaccatggtgttttcacactgcagtgtggtgtcatatttgcattgttgacacctgttttacatttctcctcatctatctgttgcatgcgcttttacaaatacacgccaggtctagacctactgtacgacacaatcagcagcaacaaagctccaaatgataacatttcaggctcttatttccctaccctggtggacgccaacactgacattctagccacctcctgggagcatcagcgtggtcctgctcaggaagaactccaaagggaacaccaacatgaacactacacagatatttttactagcttctcacactttaggtaaagtttgctaaaatatgagtgtctctattctattccaatgaaaactatgaacactttctcaggtttctagtctgctgtggttacaaagccaatcatgagcacatgttaaatgcaacagtgtgtgtgacagccatacgagttttcactttacctggtgccagacacacaaacactagcttatactttcaaatcaaaacgacattttttaatttttattttattttatyttttgagatggagtactctgtcgcccaggctggagtgcagtgccgtgatctctgctcactgcaacctccgcctcccgggttcaagccattctcctgcctcagcctcccaagtagctggtattacaggcaccttctaccacgcccagctgatttttgtatttttagtagagaaggggtttcgccattttggccaggctggtgtcgaactcctgacctctggtgacccgcctgcttcggcctcccaaagtgctgggattacaggtgtgagccaccatgcccagcacaaaatgacattttctaacctatatgatgcccaggccacaggcatcctctttgggagtgcttccctatcctccacaggtagaatatcctctttaaagagtgcacagatgcattactcactcataactttgatgtgcacaacaaagaacaatcaaacccaaactaattcattcacaatgagagctatcgagacttccaccaatattctgtggaggattgttaagactttcatcagcagttgtctttcttctggtatcatcaagcctttgacttcactaagtgtttcaaaatgttcaccataagcctattatcaaattcctcaataaaacatttttataaagtaaggcagcaaaagtaactttgaactgctctacacaggagtctctgtggacacaggaaaagaaacattttacraaccccaaagtcacatatggtgctactgctgctaggatgtgcagagcaccaccaacccagcctgggcacccagagaactcctcctccctcccgctgcagctccagaaagcttcagtggcagcagcacagcaaccaaaaggtgagggtgatgaacaagatacaaaaccaataaagcttggactttgccctgaatatcaaccagctcatatgattccatccaatatgactgaatgccctgctgggcaggcccaccgaagaaagcacagacagggcccaggagctcctccgcagagaaccaccgctgattctcacaaagcttggtcccttcctcctgaatcaccattggaaactcctcatgtcctacacacaaaatttatcattcacccaagcgcccagccactgccgcttacctgttcctgatcctgagcttatttccatgctgaacaagggtagccccaggtattcaraagtgaaagaacagggacagccttctggggggcagaaaggggtgttgccgcctggcccggctgggctcctgccctggagggctccacctgctggcacctgtagtagctatttcctaggttccaaagcctcaccttctgcacctacttttaaacttaaaatctcctcggattttgtaagcttccagttcatcccatacatgtcaatgcataacaaaatctgtctttatgggactctcacacccacatttctacctgacattttgttctttcaacacagacatcctgcagttaccaaacacctaagtttatatgtcacttgcagacctctcccaccttctgtctacaggaacaacaaaaaagcaaagttcctttacaaatgccaatcccaccctgtctgggtccaagcactcctactgtggaaactccctgcctcgagtcccaccactgccatgctctgtctgctcacagagtcactgtctgtcaccaacatactgtccattgacgcactgcagagcccatgtaccaccaccaagggtggaaacaggaggctaacagcaactgacacctatggctacttcatccacctatgctaggagaatcccttgaaaactccgtacttataatctccaagtatttgtatccatctgagctatccaatgaatttggattatttggaactaaccataccttagaataaaactctgagagaaaagaagttcaaatgtgttttgggggctatttattcttatagtaaacctggaataactcaaagcttcaagaaataggtttttcatccacggtcactgaaatatttccaaaatagttcatttttcatagcagcaaaagaaatgaagactaaagcaaacttgtgataccactgtacacaaactacattagcaaatcatttaactgtgacacccaaccaagtaaaatcatactcctgaaaattgtattaaaaataaaaagactaaagaactgaaaaatgctcataacctattgagcaatacaaacaaaatgaattttttaaccctatattcagcaaagattttttttttgagatagtctcacactttcgctcagcctggagtgtggtagtgcaatcacagctcactgcagcctctacctcctgggttcaaatgattctccaaccctagcctccctcccatgtaactgagaccacaggtgcatgccaccactcttggctaatttttatttttgtagagatggagtctccttgtgttgcccaggctagcctcaaactccttggctcaagcaacccactcaactcggcctcccagagttctgggattacaggcgtgagccatcgtgcctggcccccaaattttttttcaatatgacaccaccaagtgtgggtcacactctttcagggagagggtgtctttagttctgactgtggctttgtccagtctgtagagctcaggccaggagaggtgctgccattgctatgagtatatggagcacaacaggcctcccttaaaccccactgagggcagggttgcagcaagggagatatgttctcaccatggtgtgcatatgctcatggaaatggctgctcacaataaaaaattagaggcctggtgcagcggctcatgcctataaccccaatactttgagaggctgaggcaggaggatcacttgagcccaggagttcaagaccagcctgggcaacatggagaaaccccctttctgcaaaaaaaaattcaaaaattagccaggcatggtggcacacacctgtagtaccagctactcaggaggctgaggtgggatgatcgcctgagcccagggagttcaaggctgcagtgagtcatgaccacaccactgcactccagcctgggcaacagaattagaccctgtctcaaaaaaaaaaaaaaaaaaaaaaaaaaaattagaggcccatcaggctttaatagacatccccatacatcctatttgcatacatgcagaacaatatttagaagataaatttctaggttaggacaatggatatgtccttttttttctttttttgagacacagtctcgctttgtcacccaggctggagtgaaatggtgtgatctcggctcactgcaacctccgcctcccaggttcaagcgattctcctccctcagcctcctgagtagctgggattacaggcgcacgccaccacgcctggttaatttttgtatttttggtagagacagggtttcaccaggttggtcaggctggtctcgaactcctgacttcgtgatccacctacctcagcttcccaaagtgctgggattacagatgtgagccaccgcgcccggctctggtatgtgagttttaaaagttgataggcattgctcaatttcccttcaaaaagatgatgtcaactgggtgcagtggctcatgcctgtaatcccaacactttggtaggccgaggcgggcagatcacctgaggtcaggaattcaagaccagcctggccaacatggcaaaaccccatctctactataaatacaaaaaattagctgggcatgatggcgggcgcctgtaatcccagctactctggaggctgaggcagaagaatcacttgaatctgggaggtggaggttgcagtgagccaagatcgcaccattgtactccagactgggtgacaagagtgaaactccatctgaaaaaaaaaaaaatagatgatgtcaaatgacactctcagctcatcactatcacctccccatcacaactgtacttccctaccctgccgagactccaagggccagcgtttctgtccctcccttttttcccttgtccctctgttcctccattgcattcatttagcaaaagttcagtccttgttaagcccaactctgcatctactccagcttgtgcacagcagcggaacacagcagaaaaaaaaacatacaaaatgttcactttaaatgtttgaccccaaatctgtagtgacactgagaactgcttagcaaccagccacgtttctcaagttttttcactatcttagtctccaaaatgactattccactccttctcttatctccccaggtctccaacactcttcccttccacccctacttgctctcaattgatgatctcactaaaaaacaaaagcaatcaggagagaatggccctctttttcccaggatgaatgtaacggcctattggcatctaaaccacaatggacatatcatcgctgtgcctccactgcccatctgatcctgtcctctcctgcctaactggaccatgctctcacagtgatcccctctgacaactcacaaactgctgtctcagcctgaactccagcctcttacacccacctcctaacccaataactccatttggatgactaataagtacctcaaacctgacatgtgaaaacaggattctcacctccatacccctgccccccaccttgcaccccatcttccacagctcagtaaatggctccagtggcactaccctttacactatagcttgaaccaaaaccttggtgccatccttgaccctcccctatcacacatccaatcattcagcaagtcttgattattctactttcaaaatatgtggaaccctacatttctctccatccccactgatacctccataagacccccatcatccccggtctagacatctgcaacagtgttctacagagtctgcctgcttccactctgaccttcctaccgcctattctgagcagaacagccagggtgattttttagaacacagccacaggatgacacttctctgcctgaaatcctccattagctttccttcacagaataaaatccaaactcctcaccacgccaagaaggcccccatgctctgacccttcccctcgtctcctcgcctgctccactccacactggccttctgcttctggctcaatcatgccaaggtcattctgctttggaaactctgtgcttgctgttctccagctggaaagctcttcccttggatcaccatgtgctgagctccttcacattattcaggcctcagagatcccctccccagagaggactttccagaccactctacctccaagagtgcctctgtccccctccactccaattccctactttattcttcagggtactcatcactagctgaaattatatttcctattcatctgtttattgtttattttcccactgggatgggagctgtatgagcttagagtagcacctagcacacagaaaatgcttaataaatctttgttgaattaataaatatttcatgataaaatttaaaaaatttttttaaatgtaaccacatgtataactggcatgctctggcatacttggcaaacaaacatacccatggagaaagaccagaagagaacagagaaaaataaaagtagttgcgattggaaattttttttacttacaccatcctattttaatgttatgctgttgttacaataaaaaacaatggcttttctgtcctaaatgaaagatgaatgaggacccatcagcgccagagggtcactactctactcacgagttgtgagcaagagaaaaccaactcctgacacctgggcgctggcctggtactatcaaccagtccttggtgctctcctttcgaacatcaacatcaacaccagacaaggccactctgtgaccatgatggatgaagacaaaaacaagaccactctgcaatacctgaacacagacaaaacatgaacattgtccaagccacaaaataccaaacatcctcctctcccagctaatgagtgactattgcttcttcttcagtttcagctttggcactgctttaatctactctccctatagatacgatttattaaaataccaaatgacagagttgcccatttcctgacagcatctaatccagagtaaagtccccaaatcactaccacagcccaaatcctatatgggctcaccccacggtgccctttggtgtgcactctccctcacagcaataagcaataagctcaacttgttcgactgtaggtgtgttcctagttgtgtttcgctggagggcactgacaactgtcaggacaccagttaccattacaggccatggtacacgcagaagtcataggagcctagtgggaaaactgacccccggatataatctcagtgttggttctctgaatacattccctgacatcagctgattttcttgtcatctgcctctttttcctaaaagttgggtgaatgggaaaaaaaaagtctacttaattaaatgccccagtgaataatgttacaatcaatccagtatgcttccctaccattgctgaaagtcaccctgagcgcaaggtcagaatggtgctggaggactgaatcataggcagggcctgaggcaacaccattcgagtactttaagccacatgttcaagcccaataaattaggccaggtttaaagaagtcaagctgtacatatgtaagaattttaataagcttggaaaatgctacctagagcttatgcacaggcttactgtaccaatgggattccctgccaccagccacagcgtgctaagcccctaacaagagctgttgagcacgtggggcagcggggacagggagtctgcttggtccaggtttccttaggagttggagactcacagcagaggctggcagccagatggatagagaacagaatcgggcatgcagctcagtggagccaatgacatttactaggaaaacatgccgaaggtttctttggtgcaaatctggtcctcacacacccttctagaaactagcaaacactgtaatcaatgtctgcatttatcaaatgcctgtttgtacccagaactgtgttgggtacaatagagagttatttaagcaaacatggtctctgacttctagatgccgacacccaatataaataaaaacaataaatctgtccaaaggattaccaaactaactgaacaaacaaaatagtcaaaagcatttaccttttacaaatgcagtggtgtaataactgaaggttaagtcatgggagatgactctctaaacagggtgggtccctaatggaacagttaccttgttaaagctgacttccaagggggaggtcaggttttaagaaaaggttcaggatctggctactgggctggagaaaaataagccagtcagggaaaagggtgcagcctgggagatgactgagagatagaaatttaactgcaggaagaaagaaaaattaccaacggcccagaaaaagtcagggaaaataagtcaagcaggtacatcttcctcaaccagttttattcatgcccctttctgataagtataaaaagctcaggctgggcacagtggctcatatctctattcccagcacattgggaggccaaggcaggaggatcgcttgaggccaggaatttgagaccagtctggg

SEQ ID NO: 97615 - DNA, 12629 bp, Homo sapiens
  misc_feature (1)...(12629): n = A,T,C or G
tattgaaccaaactactccccatgtattcattgttctaagtgctctccatcccctcccctgtccatcaggcattctttcttttgcctgtagtgatggcttacctcatctcaaaagggatcaggcttttctcaaaagcatcaaatttagagctttgggcagcttctttcagaactatcccaactatcctcagccaccagaaatttctaggactaattttaaggaaacaaccgtggccagctaatctcactgtcttacatccatgtcattctttgtcatcatctgcaatacaggtctttctggtagttggtctgcctttttttttttttttttttttttgctttgcttttatattgagtctttgcctttgcatgaccctgatccagccttttactgctgtttcctttcttctcaaacatttgtaattaatgccaaggtctgtggaaaacactgtaggcagaggtacacaaacaggcttggtctagtgcagtaacagcaagaaggccagtctggctggtgtggcctgagtgagaggggatgtgctaggtcagagtaagcaggagacaggtcttatgggacttgaaggccaaagtaagtagttcggatttgattataaattatttgggaagctagtgacactttttattttgtttggttttgttttctacttgctaattttttaaaatagagaaacataccttctttcattattgaaattcaaaacggagaacatataattattcaaaagataaaaagtaaaacacataccttggttttatagtataactaactaagataaaaaagaaggtggactggctgggcgtggtggctgacacctgtaatcccagcactttgggaggccaaggtgggtggattacttgaggtcaggagtccgagacgagcctagccaacatggtgaaaccctctctactaaaaatagaaaaaaattagctgggcgtggtggctcgcggcctgtaatcccagctactaaggaggccaaggctggagaatcgcttgaacctgggaggtggaggttgcagtgagccgagattgcaccactgcactccagcttgggctacagagcaagactctgtctcaaaaaaaaaaaaaaggtgaggagatgaagagagcaggggcagagtagacagactgaaaatggttcagagagagcagcaggatgaggcccacgaggaggtacctgtcattctcctcagccagatttggaattgtttgagtccagaagctctcagtgccttgaccactatatttacttggtgggtgattagggaattttagttgaccagttgaatgaatgttgaatgagaatttctcacagatagaaaactagcctgtgtggaaggatttctggacaagacacatggagaacaacatgtaaatagctatagaaactgaaaatgaaaaagaggacagacttcattggagggtctttatgtttttaaaggatcactgtaagagatccttctggtagcatatggagagcagactccaggaggtggagaacagaagagagaactggagaatgttgctgtcgtccagggagagatgctgggtttgaagataaatgtggagggatcagaacaatcaagcattttgactgaagcattaggggaatggggacggcaaagactgagaggagagtgggtttatgttactctacagagcacctttctgggcaccagaggggaaataaacgtaactgagataatatttttcccagacaggtttattgagacataattagatataataaaattcaccattcctagtgtataactctaagtttgacaaacctctacaacatagtcataatcataacctctacaaagtcaagatgtagaacagttccatcactcccaaaatttccttgcaccctattgttgtcaacccctcctccagctccagccctctacatctaatgatctgttttctgtgtccctctacttttgcctttaagataactttcaaagagaagaatgtaaaaataactaactaaggtagaatgtaataaatactgtaattgtgtggggatgtagagaggtgagtaaggtcagttacaagtttgggggcgccagtgaagttgtgacttatttaatttacttttcaaaattacagagaactgtgctttccaagaggaatattaattctttaaaacagcagtattcttcctcatattggcagtggatactcacaaaatgcgattgcctagttcacatggttctttgctaaataattatgtacacaaacttttatttcagtgaatttgggtggtttgaaggatcacataaaggagatccagagatgccggcgtttgattcttattgcttgtggaacaagttaccatgctggtgtagcagtaagtgctttttaaaattttaattatgttgaatattagagaatatctgtagaccaagtagtagtctaataacatactgtgtaaaactatgttttgttaatgtgttatcttttcccttttgtgataaaaaaagaaggtaaggggagaaatttaccagctgcttggaattatttatccatggaagatctgtagaaaaggtccctagatatacagatagacctcctgcaacggacttcatgaaaggccaagagggggagagtttgtgtactgtcctagacttgtagcctagggagcttgcctacatgtgtaagagccatcgttgggttttgcttagcattgttcacttgccctagacagatggcctgcatcatgtgtgaacctcagtgcaattttactttgtgggcacattactgcaaagaaaggtagtctgcttttttttttaaatcagattttattctttaaattgttcttttagaagctgaaattcagtatcaaaaatgtgtattgtcagtgcagaagcataggtgtatgagggtcttttattccaataaaagaccaatatttgcccacgtagtttccttagaaagagacagtttatgtgctgctgatgtcaactgttatgaacagaagacctttacattcaatttctgcttttaggattgacttccaaagttcctgacataacttatttatttgctgaggcataaatatttattaggagccatttatttaagcagtgagtgaaactatctggtcacctgcccttgcatctcaacaagctttgctcttttctaagactacaccaaatacctcctcccctcctcccccaaaattatatggtcctaaacagaaagtctatgtaatgttgaagggtagaggtctaaaaaagtgattgttttgtctgggtgttgtggctcacacctgtaatcccagcactttgggagggcaaagtgggaggatcagttgaccctaggagtttgagcctgggcaacatagcgagaccccgtctctaccaaaaaaaaaaaattatcggggtgtggtggcaactccctgtagtcctagctacttgggaggctgaggcaggaggatcgcttgagtccagaaggtgaggctgcagtgagcctagattgcaccgctgaactccaacctgggcgacaaaaccaggccctgtctcaaaaaaaaaaaaaaattttgaacacgggaagaagaaagatgtaaacacgttagtggtggcttagatctattactgaatgagccctgtattcagaaatagaaaatttgattaaacgcttcatctaacgctaagacaatttgggggcagaaattatatactctgttagaattctctaatgtaagattttttgttgttttgtggatgccaagactactgtagtaaacaaacattagaaatccccctgtggtttatcagacaaaatagtaccatttattttatcctgttttacatttttgttgttgtttcatgacacatttacatgttttttttttagtatctatatcctgaataactgactacactctaatcattcttaactcatttatgccagaggttgcaaaatttttttgtgaaaaatcatcagaccttggtgctgaccttgagcagtaggatataaataactcccacatgcttaacgttccagtgatggaacactaggcataaatgatttaagtatagcctacttaatatgcttttcaaaattttaattttctctaggttttgtagtggcattcagtggaatttatagcattaagttactctattgtgatggaaatatgtcattttgtgtatttataaaaagttgtttgcagctgggtgcagtggtgtgtgcctatagttccagctcctcggaagctggggcaggaggatcacttgagaccaggaatttgaggccacagtgccctagaatcatgcctctgaatagctgctacactccagcctgggcaacaaaccaagaccccatctttaaccaaaaaaaaaaaaaaaaaaaaaaaagttgccccaactaaaataataaactattaattagcacagataaatcttgagattacttttttggggtttattacttttaaatatctggtaagcctccagatttctatctttctctcttctttccccatctttttattttgaagaatatgattccaatgtaacatttatattataaactgggtgaaaaggtttggtttacatttatttgtgggaaaacatttagcattttagtgtcggtaacttaattatgtataataaaatatattaatggaaaagaataataaaaaataggagcattttatcttcaatgattttctttacatgatgttgtaatattgttaaaaaatgccaaatcaaagttatttaatatttttgggggaaccaagtaaaacgattctgttcaaatttgtgggcaagcaaaagttaagggctatgaaataagggcacctttaagttctttattgctgagaaggaggaaagctgagatgggtgagagatggggagggccacttgcctgaagaggctggtgaaaggctgtcaggttaggtgagctccacagttagaattaaagcaacactaaatgtatacattggttgagcttaaagtttttgctgcctaaaagataatttttctgtttttgattttccgatgtttagtgtaaaaataattagaatggaaatttactgaaatgaaggttaaactacgttttgcacagaggcatactgctccctacttcattccccctgccccatgccacaaaagttgaaaatagtgagccctgttaaacaagatttctaaaatatattgacttcttttgggaaatggtcatatttatgaatacgttgtacttttaaagtgtttaatttttctctatatatttgtacatctgttacctgatttgaaacccctccctaacatgggtattacatgaattttcattttaaagattaggaattgggaggttagagataacacacaagctgactcagaaccatgctctttccacttctcaaaacgttttatatgtgtgggtatgtttccttataagaatgtatgtgtccaggcgcagtggctcatgcctgtaatcccagcactttgggaggctgaggcgagcagatcatgaggtcaggagattgagaccatcctggccaacatggtgaaaccccatctctactaagctgggcatggtggcgcacgcctatagtcccagctactcaggaggctgaggcaggagaattgcttgaacccgggaggcggaggttacggtgagccgagatggcaccactgcactccagcctggcgacagagcgagactccgtctcaaaaaaaaaaaaaaaaggaatgtatacatagatagttgtctaaagagactgatagtaaaatgttagccatgcttatctcaagtggtaggattttgattttttttttttaaatattttaatctgggttgtttttattttctaacgtgtcatttttgtaatcagaaaaagcaaaaactatacattgaatccaaagaagtccgatgaaagagtatttgaaggaaagttctgtgaccaagtcatattttctctgcagacacgtcaagttcttgaggagctgactgagttgcctgtgatggtggaactagcaagtgacttcctggacagaaacacaccagtctttcgagatgatgtttgctttttccttagtcaatcaggtgtgttaattttaaagacttaaaaggaaggaaagttattctttctaataattctagcatatcttggcaaaagctgatatttaaagataaactggcattgcagatgacttgacgaatacasatttattttaatgttacataattctttatgaattagtaaaaatgaacaccttttgtgttcaaagagctggattttcaatgacagagaaggaagagagatcctgacaagccrtattactttaaagttttataaatttattaagtggatgttttgtattttatttaaaacaagtaatattgttgaaagtgtggtcaatttgtttttgctcctaagaaacagcatatgttaaaactgttctgtgtgttatggttggcctactttttacacaggtgagacagcagatactttgatgggtcttcgttactgtaaggagagaggagctttaactgtggggatcacaaacacagttggcagttccatatcacgggagacagattgtggagttcatattaatgctggtcctgagattggtgtggccagtacaaaggtaaannnnnnnnnnnnnnnnnnnnnnnnnnnnnnnnnnnnnnnnnnnnnnnnnnnnnnnnnnnnnnnnnnnnnnnnnnnnnnnnnnnnnnnnnnnnnnnnnnnnnnnnnnnnnnnnnnnnnnnnnnnnnnnnnnnnnnnnnnnnnnnnnnnnnnnnnnnnnnnnnnnnnnnnnnnnnnnnnnnnnnnnnnnnnnnnnnnnnnnnnnnnnnnnnnnnnnnnnnnnnnnnnnnnnnnnnnnnnnnnnnnnnnnnnnnnnnnnnnnnnnnnnnnnnnnnnnnnnnnnnnnnnnnnnnnnntttaaccatttttgggaatttttatttacctatttatggtttctaataaataatgtaaaaatatacatactacctctgaaagtttgtaaggaggaatacacctttggtataaaatttggcaactgccaggcatggtggctcacgcctgtaatcccagcactttgggaggctgaggcgggcggatcatttgagctcaggagttcaagaccagcctggccaacatggtgaatcccgtctctactaaaaatacaaaaattagccaggtgtggtagcacgtgcctgtaatcccagcatacccgggaggctgaggcaagagaatcacttgaacctgggaggtggaggttgcagtgaagcgagattgtgccactgcactccagtctgggtgacagagcaagagtccatctaaaaaaaaaaaaaaaaaaaaaaatttaaaatttggcaattaaaaaaaattttttaatgagtattgtatgacaatatctttctctttagatattgctctggggaggtttaaaggtactgtcttgtgttttgaaggcctggtaagactactttgctctttggaattggaatatgcataaatttaggtggctaataaaaataggaaatcttagaaagttgtataaatacaagagatgttatccctccacaagtgtttttttggggttttaggtttgtttggttgttatttagagacagggtcttgttttgtcacccaggctggggctggagtgcagtgacaggaatcatagctccctgcagcctcagactcatgggctcaagtgatctctgcctcagcttcctgagtggctgggactgcagatgcaccaggctagttttttttttttttttaagatggggtctcactatgttgtccaatgtgttactttttatgatttcacatttttgttttctcaatatttttctacttaagtttgatatttcttgctgattatctaataagatgttgggatattggtggatttgagtttaattaaaggattgtgaaagacaatgttaatgtgtacataactgcatttgaattcttttccctcaaagattctcatagagaattttttgtagaaagtttgtgattcttatataaaaattcttcttttctttttctttttcttttttttttttttttgggagacagactctcactctgttggccaggctggagtgcagtggcgtgatctcagctcactgcaacccccgcctcctgggttcaagcgattctcctgcctcagcctcccaggtagctgggattacaggcacctgccaccacgcctggctaatttttgtatttttgatagcaatggggtttcaccatgttggccaggcttgtcttgaactcctgacctcaagtgatctgcctgcctcaacctcccaaagtgctggaattacaggcatgagccacactgtacctggccccccacctttttttttttttttggagacagggtctctcctctttatcatccagagtacatagagtgcagtggtgctcatggcttactgcagcctggaccttcccaggctcaggtgatcctcccaccttagcctcctgagtagctgggactacaggtacaggccactacccatgcctggctaatttttgtatttttttgtagagacggagttttaccatgttgcctaggccagtctcgaactcttgggctcaaacgatctgcctgctttggcctcccaaagtgctggggttacaggcataaaaactcttgagtgagatttttatttcttgggtatttcgatattgctaacactataatttacagagtgctgaaacttgaattttctccatatggtaattaaaacgtgttacatgtttgtgcttgggtttccatcctgtggctgaataaatgaccagccacctttagtagcacttaaggatttgattgggggattggaatcccagaggctctttatttataacagattgtgaaacaagggctacaacgtggtgtatgtgggatatgggattgtttggatggatgccattgacttaatcttttcataaaatgtttctggaattgtgagctgccaagggaaatatatattttacatttctcattcctttgtttatgagaactttaatttgcctcaacattttatgatgatgattttcaaatatacagcagagttttaaaaattttacatacaggctgggtgcagtggctcacaactgttatcctggcactttgggaggctgaattgggaggatcacttgaggctaagagttcaagaccagccgaggcatcagagtgagaccttatctctataaaaaatacaaaaattagcggggcatggtggtgcgtgcgtgtagtcccagctactcagggaggctgaggcacgaggatcccttgagcnnnnnnnnnnnnnnnnnnnncaccactacactctagcttggatgatagagtgagaccctgtcttaaaaaaaaaaataaaaattttacattagcattggtatacccaccatctagcttctaccatagcatattcaccaattttaagtgtacagttttagtaaattcatttggctgtacaactgttatcacaatccagttttagaagatgatcacctgaaatattcctttgtgtttctttgtagtcaatccttactcctaccctccagcctcatactcaggaactactgttttctcttgctgtattatggcattttccagaaaatttttgtaaatggaattgtataacacgtcttgtgtgtctagcttctttcatttagcctgaagtttgttttttaaataaagccagttaaatttagcagtgaggtattgtataccaactttagtaacgctaatgttaatgagttctagtgacccactattggactaccctagcctgaagtttttgagatttgttcatgttgttatttgtatcattagttctttctttctgcaaatcttttttttaaatatttttattttgaaataactatataggaagttgcaaagatagtacagagaagtcttacatactttttacccattaccccagtggttaccacctatataagaaaaattagcatctttttagtacagactttaatttttttcaaaaataactcttaaaaaaattgagtaagtatggcaatttagtatttcatttttcttggattctaaagtaattttattcaaatgtcttagacattttgggcttagttacttacaataagttttgggttatttagtcacagaccattccaggtggcaaataagagtttttatgttaatgggtattgaaagaagtcgattattattactattattattattattttgagatggagttttgctcttgttgcccaggctggagtgcagtggtgtgatctctgctcactgtaacttccgccctctggtttcaagtgattctcctgcctcagcctctcaagtagctgggattacaggtaactgccaccacgcctggccaatttttgtatttttagtagagactgggtgtcaccttgttggccagtctggtctcgaactcctgaccacgtgatccacccgtcttggcctcccaaagtgctgggattacaggcgtaagccaccgcgcccagccaaaagttgattattgatcctaatccctgggcccagtgatggagcacatagaagaattctgtgatcttgcctgtaaattctcaactttgcctgaaaaactgtcaggattagagggatcttactgagtttctcatagtatcagaccatagacaagttgatactactggaggaattgatgggtataaatggtaggttcagcaatttttatatgttattgcaggtgtttagaatttcaccacagtgctgacttttgttgatttaaaaaaataaaaatgtaactttgtttttggctgaacaaaaagaaaaaccaagtttaaaatttcagagtcagcattttcctggtaaactctttcaaacctcggtagattctgaatgtagggtatagcttatttttcctcataattggtttcctggtatgtattgatgaaattaaaaatatgaaattcaaattagaaattaaactgtaatagcaatgcaatggaaaaacatggattaaagttgctccgtttaatatttgtacttaaaaactagtgttcagatggtttcagttcaaacaaataaacactagtttgtagaataacatttttagttatgggctacaggaactggaatactcattatctgatcagtttggattggaaacagtttaagtattccaggggtccaagatacctctggcctggtagtatgttttgtgattaattgattaattgaaaagtaaaccacagtaggaagaagtagactggaagagtctggaatttagaatatagatgtgctcattagtctcggaggcagaggactccaaattcactttagtgttatgggaaaagattccagtctgctggtggaatataataggtgtacagggaggcagttgtggaggaccatgtgagcagctggaggctgggaagtccagcaggaggaaacagggagtctcatttaactattgggatgttaaggagttaccagactgtgattttattatagagggagtctcattatccacatcatgccaggaaatcactaatggagtaatcccttatcaagagaagagtaatagaaattcagcatataatccgcgcgcgcacacacacacccctcagcataaatttcctaaagctaaaattatatctaacactgtaactgacaacagcacaataacctactgaaagagatgtaaataaaagcctcaaatatctgaaacataaaaatgtttttcaaaataactattggattaaaaaaaatcagaactaccattaagaaagacttactagaggccgggcgtggtggctcatgcttgtaatcccagcactttgggcagatcacttgaggacaggagttcaagaccagcctggccaacatagtgaaaccccgtctctactaaaaaaacacgagaaaattagccgggcatggtggcgggcgcctgtaatcccagctacttggggtggctgaagcaggagaatcacgcgaacccaggaggctgaggttgcagtgagccaagatcatgccattgcaatccagcctgggcaacaagagcaaaactgtgtctcaaaaaaaaaaaaaaaagaaaagaaaagaaagactagaaaaaagtaaacaataaataataggggtaaaaatttagagtgtgtggccaaagtgataaatagagggaaatagcattaaattcctagcacaaattgatgaaaatgccatatttttaaatggaaagattgttttgtaaagaaatgacatatcttgggttagaattagtgttccttcaacttgcactaaaattaatttcaaacaggctaaaaaggaaaatgttaaaaaaataaaaaggaacagtgaaaacaaaagaagtaagaaaatttaataatacttagtttatgtaggatgtggaagagttatctgagtctaaaagtactacgtaaaagttaaaaaattatgtcagcaccaatataaaaggtcagtccacgatgagaaaaaatatttgagacataacaataactaccttcttttttttaattttagagaatagtattgtattgaatacgttttattcacagaaaaataaactttaatctacaatgaatgccagattatacagcagaaagcagttttct

SEQ ID NO: 97616 - DNA, 14267 bp, Homo sapiens
  misc_feature (1)...(14267): n = A,T,C or G
nnnnnnnnnnnnnnnnnnnnnnnnnnnnnnnnnnnnnnnnnnnnnnnnnnnnnnnnnnnnnnnnnnnnnnnnnnnnnnnnnnnnnnnnnnnnnnnnnnnnnnnnnnnnnnnnnnnnnnnnnnnnaaatcttgacaaatactttgttctctgaattaaactgatgggaactttttgcagttttaaatccctattttaagttaaattttgagtaaatccaaaagtttggtatttcgagttgtcgtggtttcttttgtaacattgctttgtggtaattatctgcatgtgttttggttattctgtgtattcagagctgtctattttaatccatgtatgctttggccatagtaacccatccagattaacacatttataagtcaccatcgatttgtcccatagttgtgataccgttgctttgtattaacaccagagagtcagtgatgatgaagggaagtgtagtcgttagtcaccagggattgctgagcagcaaggatcaagaagctggtcatgcccaaacgcaaccttgagggagagatgttggtgagagataagagatgggtggctgggtacggtgactcacacctgtaaccccagcactctgggaggctgaggcgggtggatcacttgaggtcaggagtttgagactagcctggccaatatggcgaaaccccatctctactaaaaatacaaaaattagccaggcgtggcagggccggcctgtaattccagctcctcaggagactgagacaggaggattgcttaaacctgggaggtggaggttgcagtgaggcgagatggtgccattgcactccagcctgggcgtcagagcgagactccgtctcaaaaaaaaaaaaaaaaaggagagagatggccgggcgcagtggctcacgcttgtaatcccagcactttgggaggccgaggcaggcagatcacaaggtcaggagatcgagaccatcctggctaacacggtgaaaccccgtctctactaaaaatacaaaaattagccgggtgtgatggcgggcgcctgcagtcccagctacttgggaggctgaggcaggagaatggcatgaacccgggaggcagagcttgcagtgagccgagatcgtgccactgcactccagcctgggcgacagagcaagactttgtctcaaaaaaaaaaagagagatgggcagttcacaggggtttttatcgtgcactgctgctcaggctgtagaacttaaggtatagcagattttgtttgtttagatttgtggcttgtgaggcattttgttcttgaaggttttgttctgggccaagttcagctctgtagagctttactacagccctgcactctggccgtctttctgccctctctgcaatgggtaaggagaaggagccttagagattaaggcctgggtcctctcctgacttcagtggggtgatgcccagtgcacaggaagtggtgcagggctaggagtaggcactcctgactttggaggtcatgaagtgagtgacgtagaaaagcctttggtttttgttttgatttctgttttgtttttaaaactaatagttttgggctggggaatcagaatcaacctatggtgaaagtgctggcctatgtaaaatttgatgcgcaccccacccccctttttttttttaaaagaattgggtttagctatgggtcaggtcattttgctaagagttgtgattccactgggtcatcagacttcccatccccctgcaggtaggagtagagctgagctcacaaggaagttattaagtgtcctgctgatgagcaggtgtataagcagcagtcagtggtgacttgcatctcctccctttgctggaaggtgggactaggtgagtttatatgctgagttgaccaagagttaaaatagtaaaaccagggggcttccagcaggaagcaagtagaaaagttgtttgttagcttctaattccacgatgttgcggttctaaacggtggctcctttctggaaattgttaactgttgtgcagattttttctgcatgttatggaatcaccttcacccagcccctgctccctctcctggaacgtacttcattcagcatgtgatgtgttttgcaatgtcacatggtatttcatcctttgcttctctctctggtagactgagctcctcaagcttgaaggctggctgtcccccttcccaccccagcccttgtagaggacccagcacgaaggtcatgataggtaacagttgctgagtggtcattctgtgctagagattgctcgcagtgcttttcctatgtcagtgaatcttcacaccaccgaagaaggaaggaaatactgttcttcccagtctcagatgcagaatccgaggcgtgggagcaattaacctgggtcacaaagcgagtgtatggcagggccagggtttggagccacgccgactggccgcagagccgtggagcgctgtactgcttcagcgaccatttgcagccagcacagtactgatgaagccccactgtggcatgcggccgtccagccttgggatggagctgttcttctaaagctcggtgaaaatcttactaccaagaggcgtgtgaaaatgcttttgaaggcaaatgaaaatggaatgcctttaaaggaagtctgtgtcaaaatgatagaagattagtaacaaggattcaagaatagcatcactttccaaccaattctcaaactatttgaagagtagataccacagagacagtaagtaagtgaaacacctgcacgtcaagcaagtgctgcagcacctttgcctgtgatgtcactttccacatgactgcaacctgcttacctgcagggaagctatgggtcttgctcctttatatattacactaattgctcctatggagaaaccgtggggaggggttgggggaggagggtcttatattgaacctggttttatatagctttatagcttgataacagctggttcctttcttctcagaatttgtagttttaagtgtattggggttttatttgttgattttgctttaatcagtttcttaatccatgatctgttgctttgaattagacattaacctgtttctaaagagatagactaaacaaaactaaaggtttgtttgcttaagtcaagcttgagtctggggagttatgtaagtaacatagatatctggttaatctggtaggatagcctttccaagggagtttacattggtactttgaaagaaacattttaagtcgcagaaaggtaacaaaaattaagttaactgtagcatcagcaccagaaagttactgtttcattgaatgtaagataatgtctggctcggtggctcacgcctgtagtctcagcacttcaggaggccaagacggcaggatcccttgagcccagcaatttgagaccagcctgggcaacatagtgagatcttgtctctaccaaaaaaaaaaaaaaaagaaagaaattcgggacgtttgccaggtatggtagtacacacctgtagtcccagctactcaggaggctgaggtgggggcatcgcttgagccagggaggttgaggctgcaatgagctatgattgcaccactgcactccagcctgggcaatagagtgagaccttgtctcagaaaaaagaaaaaataataataattatatatgtatatatataatctttgaaattaggtgtgtcttttatatataatctcctataatgtcttttatatgtatatataaaatctacatctaatttcagagatactaagatgtggggaaatgtacttagaatcaatgaaatacggtgttggtgaatgcaaaacttgtcagtcatatttattgatttcttctgtgtacagataatgggcatttggtatttattcatttatattttttttttggtcttaatgggacatggtgtctgcttatttgaattatttccggtctgatttctatattccattgtagaattttcatttacttaatatttatatctgtgccattgaagagaaccttcaggaaagcatcctctggggaaggccatcaaacaagcaaacagtctagtaatattttgcagtttgacttatgagagcttcataggaagcctctgcctttaggaagtcagttgtatgccttaagattcacagactcgccgggcgcagtggttcacgcctgtaatcccagcactttgggaggccgaggcgggcggatcacgaggtcaggagatcgagaccatcctggctaacagggtgaaaccccgtctctactaaaaaaaatacaaaaaatcagctgggtgtggtcgcgggcacctgtagtcccagctactggggaggctgaggcaggagaatggcatgaacccaggaggcggagcttgcagtgagcggagatcacgccactgcacctccagcctgggcagcagagcgagactccatatcaaaaaaaaaaaaaaaagattcacagactcatcatgcttagtacagccacatcttaacgctcaggaggctggcctggtcatcgttacatcgtgaagttaagtttacaagatatgtggtggtattgaatcatacctggtgattttccacgttccctgattttaagcagtctgctgttctgatgggaagttccaggttgggtttgtgtctgctgttttcaactctgagggcccctttctgagcttcagctcgcttatctagaagttaaatcagaagctttttgttaagatcaaacaatgtgcagtgctgttgcaacttgaaaagtgcttttcaagtattagatacaactgttaattctcttgtattttaaagtattggggcttggttttagctatatttaaacacaaaaatagcagtttcttgtttttccttacctgcttcatgtccatctacccagatcccttccactgggcctggcctcttaatgtttacgttattattcagtgattattcccatcccttgatctttgctcctgtttctttctttgcctagagtatttattttgcttcctgtccattccctaagccctgctgatccttctaaatccacctccaatcccacttggcgagtccctgctccagctcccctcagcgttcagtgtcgtcttagactccagatttccctttcacactgtgttccatgttgtttagcaattggctgtgtcctgcttgtggttcccttattttatcacatgtattattaggctcgtctctcccactggatgtcagtcagcatatggaatgtcatgatattaccaggtgatggagaggaattgtgcacgtggaatttggtacacatccctttttcaccctcttcaggctttgtgttaacttgggaagttacttactcttttctcatctgttaaacgggtactattacttgtgaccattacagggttgctgtgaagattccagaaaatgtatggaaagctctgacaaacaaacacgttaactggtaactgttcagaggctgttgtcttaagagaccctcttgcataggaaaatagctgactctgtcacttcagggagccagtttaagaaaaatgaagggtaatgcaggggccagctttcagcttggcacatctgaaaagttcacgacagcataccaaagggctgctagtgctggctgttggaaatagaaatgcagttcttgccttcaggaaacgctgtttggacacagacaagcaggtgggtccttgcaccatggctggaccagagcacactgaggcaatgtgaagaagtacccagtacacagacttgggtagggagtggaggggaggacatcagggtataagaagagggaggaagggaaggggaggagaatgttccaggtggagagtgcttggtgtggaggttggacagagcatggtatgttctgagaggtcagtgcttggcatggtcctctggcagaaaagggagtggctgtgatgagcaggaggctggctggggccacaggatgatgaataaaggacttgaatcgtgtgctcaggactctgagtgattgtgagcttttcagatcctaagcggaggagcgacatcagctttgtttttaacaaggtcactctgccctttggagagtggatggtggtgggtaagaatggagataggaagttactgcaataataaagattgggaaaatgggcttactctagtttcggggtggccaagcttttttgtaaagggccaaatggtaagtatcttagactttcaggccatcctgtccctgttgcaacgactgaattcaactctgcctttagcaggaagacagccatagaccctgcagagatggatgggcgtggctctgtgccctgcttccacaggagcatgcctacagaaaacaggcagctggccagatgtcgcccaggttgtggtttgctaaaccctgacctagagttggtttgcaaagtcttttggtgctggaataattttatactcttaatagttatattgaggatccagagagcctttgtttgtgctggttatcgctgttgatgttttctatatttgaaattaaaacagaacaacttacaatatttattttactttaaaagaatctactacatgttaacataacctttttaatgagaaacaacttttcaaaaacaaaaagattaagcaagaagaacagtgttgttttacacttttgcacatccttttaaaatatgaggtttaagaggtgacggctggattctcagacctgcttctgcattccgtgtgttccagttgctttattgaaaygtgtaaggaaaatgtggcgtcacacttccatgtgggcagaagaggggtcatcctggaggctcttagcgatgcaccataactcgccaggtggcagcgtgtttgagtgtgccggcctttcggagtcagtgacgtttctgtactctcttccgtcagaaccctgaggtctgtcttgtgctcagagtgggtcttttgctcatggacatgatttggtaacatcacacgggggttgtttggaaatattgttacatggagttgtttttttttctaaatgttaacacattccattatgtaaacttgaagaaaatcctattttttaatgtcatcactgatctcatcagaagaaaaagtgagaaactgtcaaattagcagtagtagagaaaagttttccaaaattctaattttctcttgaaagcttggattttatcattggtaacaaatactgtcagttactttctgtgaagtgagggacgcagtgtgttcattttcaagtcaatttctgccagataccaaattcttaataaccaaagttggtcagttgttctttcaaataaaaatggcattccatgaaaaaaagggctagttcagcttgtgtgatactgtggaatatgtatttggtcttccctagtacacaactcctaaaatcctcgggctcgtcagtgatgtcttcgtaatgcgttggctaagggccggcaacccctgggtagcttcagaacaggggctggtcaccagaaagacctaggcaggattagaaggttgggactttcagccccgatccccaacctcggggagtggtgaggggtgggggagctgaaggttaagctgatcaccagtggccaaacagtcttgcctatgtatggactgggtttgaagatagcttccagatgtttctggaggggggcccacccagagaggacacgggagctctgtgtctcagcccccgtccctcgccctgtgcatcacctcagtgtcctctgtagtctcctttataataaaccgctaaactaaagtgtttccctgagatctgcgtgctcagtgagggttgtggacactctgattgatagccagtcagtcagaagcrcaagtaacacaacctgaggcttgccgttggctctcgaagtggggggcagtcttgtgggacagagcactcaacctatgggatttgatgctttctcccagcatcaagatttaatggaatcaggaccccagccagtgtccggctgcagaactgactgcttccttgctgctggggagaggtccccacacctctggtgtcctaagtgtgctgtgaggatgtgatgggagaaactgaattttgttttttgtttttcaaccccaacaactgtaccgtgtgctttttcttgagacagttgtacttggggatgcagcaaaagttcttttgtggcacattttatcacagggttggaaytgaataaagtggtgaattattttaactgttcatcagggaataagctaagcaaaactggcctttttcctttttctttcccttttccctgcctgtgcagggcgtggagaggagagctcggggctgctgccacagatcatgctgagccgccagcagctccacctgcccttggctttgctcatccgtggaaatgacaacagcgtgaaaacggcagatgatgtacaaggattatgatgaaaatagtcttgacctcacggaccctctgagaggttcttgaccgttgcaccctcaagggcccacagaccgcactttgagaactgctgcttgaatgcaagctattagcagtaggagtgtcaaggacagggcagacttcaggattaactgttccttctcatctttaccagattgtactggttttgtctcaaaatacaaaaatagagtgtttattatgtaaagaaaatcaaatgatagaacagctgagaacagctggatcaagagcacagagcggaagttcctcttcatcccactgctgtcctggagtcttcctcaggacccactgctcctaactgtatctttgtagatcattttctatgtgtttatttatttatattttaaaacctagtttgtgtataagcaatcttttttaatccacaaatgtggaatcttattctagactttgaataagattttctgtattagtcagtattgttttttgctacttcttttcctttcctttccttttttggaaatagggtcttactcctctgtcacccaggctggagtgcagtggtgcgatcagagctcactgcagcctgatcaggctcaagcaatcctctccctgctcagcctcctgagtagctggaactataggcttgcactgccatgcccagcttttttctattttttgtagagacagggttttgctgtgttgcccaggatggtcttgaactcctggactcaagtgatcctcccacctcggcctcccaaaatgctgggaatacaagcatgagccatggcatgtggccgccacttgccttttttcattaagagtctataattggagatcttacagggaactgggctttctgctcagccatactcgagctcatttgacccccggccactgccccttgagatgtaagtactactgtgttgccttcatcatacacatgagacgatcaagtatcaggaagatgaagttacttggtgaaggtctcagagctaataggtgctatacccattatttgcatgcagacattctgagtccagagcccatacttaagtttttaaccaggctgcctttttatgtggctcattttatcctttttgatggctgcatagtattcccttagttatttagtccactgtttctaatgacagtgcaggagagtctcgtccatccttctgcccttcctgggtggcagacatccaggagtgggtacacggtgtcagaggctgtgcacatttcttgtttctattctttgaattgctttgattacatcttttgtccatttttctgctgaacttaaaaaagtcagtctgtaaaagtggtttttttggtttgtgtgtttgtttttttgagatgaaatctcgctctgtcacccaggctggagtgcagtggcactatctcggctcactgcaacctccgcttcccaggttcaaacggttctcctgcctcagcctcccgaggtgtgattacagggatgccaccatgcccggctaattttttttttttttttttgtatttttagtagagttggggtttcaccatgttggccaggctggtctcgaactcctgagctcaagtgatccgcccacctcggcctcccaaagtgctgggattacagttgtgagccaccgcacccagcttgtaaaagttctttatgcattatgaatattagtctcctgagtttttaaaaattgttgaccttgagttttaattcctctgcccccattccacactctcctctccgagtacagctgaatttattatacatgtgtctttgactagattttttgtattgctgttgctactctggaaatgaagaaaaagggctgagatccatgtttgggtcagtaatggggtggaagaggaataatgtgtgggacaaaaggcgattggtgaattgaactgaaatatcatgtgaggcttaatgatgggggtggatattttctgagcaatgtgtcgttaggcgattttggcatgcgagcatctgagagtacacttaccaagcccaggtggtagggctcactccgttacaggcctccattattgtctcatgggaacgccatggcaggtgtggactgtcaggagtttagagctcagaggcaggggcaaccatgaaaacaggcaatcctggagtagtgacagaagtcttgctaatgatgttagatatctcagagcatgaaagagacttgagcttattttatctggatctccagagatgataaaaccacaactaaaataggaatgcagccgtgtgaagacacaggctgtgctgatctttttctgtatcgtgcacaacacctaccactgcaccggcacacaggaagggcttttatgaattcttgggtgagtcaccatacctgcctgaaaggggcagcaggtttgctgataattagcaacatttgagtgaaaaaaacacagacaataggtctgcatgtttaaccgcatctaatggctggtttgttttaagtgggtggtgagtaaaagagttaacattaatcatcatagaaatggtattaatgagcaaagatatgaccggcctcacacctgtaatcccagcactttgggaggccaaggcaggaggatcccttgagcccaggaggtcaaggctgctgtgagctgtgatcacaccactgcattccagcctgggaacagagtggaccctgtctcaaataagcaaagacattctaattaaagcaataataatgttccatttttcctagtcatttctggaaggagtgtctgtacactcattttttggagggtaatttgacatttctctctcaaacttaacacaagggttaggaccccaaggttccacttgtaggaatcctacaggaaataggccagcatttcagaaagatgtgcactgcagtgatacaacgttgaaaacactaaatgcctaaaagtagtgaggcggttacatgtgttagaacacacactttgtggagtaagagtgttctgggcccctcggagagcagtctgtgacacattgggtgaaaacagcagcttttgcagaagaacggtgaccccaggcgaagctgagtgtggttgtaaatgctgctctggaaagcagatatccaggggtgacatcgggggtgcctgtggggaaagggtggtcacgcctcactgaacagagactttggcttttattctgcacatttctgtattattttatgttccacaccaagaatgcattgtttgtaggtataaggagaaaagtgcccttaagaaaaggtaaagagggagttctagcaactcgaaggaggaaggtttttctctccgtgcacccctaatagtgactcagcactgcttagcaccccaccttctgttgtgctccggttttctggaattttaatggttttaggctgccattttgtcatgtttgaaaataccttaaattttttttttttaatttcaatagttctgttccagaatctagaatggcgaagtagtatccctaaaagagtattcattacaaaagctctagtacataactagatttaaaagaaagcaaaacaaaaactcagctagtaataatgattgaaaaggggggattcgtgccttacgtgtaccagtgcgtttgtaaacgttcctggctttcgtaggcattgaaggctgcgtctcagctttgctcccgtcctttgcagtaacctgtgtacgggaggctccgttgtttgccacctcacattgggataggttgcttttagaataaataattatgtattatttgcataaaataaataaacacccacatactccacacttaacaacggtccatcttgttttgggtttttgaagagatgaaggctacggtcatgttgaggctgtccatctccgttttaactccccaactccgttgcccgcactccttcctcactggaggcactgtctgtgaaattggttcatagcctgtccctgctcttgagtgtttatccaaatagatccatgggttgccttttatcagacagaggccgatggggaattgcagctctgccgtggccgcgcttctccagctccctgcaactttgtcagaccctagagatctgttcagtgtcacaggtcacatttcttagatgttgacttcgtttatggtaacagatagatgttgttaaaggcatctgaaatattagataatcgttgaagtagtattaaccaaaattattaatctcctctgccatagagccccggttaagttcaggtgtgtaatagtgatcttaaaatggagagaatgagaaagtttttactttaaccattctcaatttgcttactgttcattaaagaattcagtagtaaaaggcgtaatctatttggattatgaaggtatcagcatacggctttctgtgtacgccctaaagtactgatcacagtcaaatatgtcgtaggtaaaatagtaaccatagaaatccattaaatgtctgctgctgggttatttaaaaagtagatggaacctttctctggccacgcgccctgataacctccgtgttccccgcaggacaggctgtggtggaggcgcacacacagcacccagaggcgggctctgtggagttcgcatctgtatgtcagcaacttagggtggtttgggccatgtttcacttgacctacagagagaaatgtgacacccaggttggcatagattgggatttttttttttttttttgaggtctaggaattttttttaattgtggtaaaatatacatggcataatatttatcattttagccgttcataagtgtacagttgcgtggtggtaaatgcacttacagtgttgtgtagctatcaccactacctgttcccaaaacaacttcctcattaccaacacaactttgtcctattaaacaataactccccttctccccttccccggcccctggcgaccaccattctactttctgtctctgaatttgcccagtctagggacctcaggcgggtggaatgacacagcgtttgtagggacctcaggcgggtggaatgacacagtgtttgtagggacctcaggcaggtggaatgacatagtgtttgtagggacctcaggcaggcggaatgacacagtgtagggacctcaggcgggtggaatgacacagtgtagggacctcacgcaggtggaatgacacagtgtttgtagggacctcagtcgggtggaatgacagtgtttgtagggacctcaggcgggtggaatgacagtgtttgtagggacctcacgtgggtggaatgacacagtgtagggacctcaggcgggtggaatgacacagtgtagggacctcatgtgggtggaatgacagtgtagggacctcaggcgggtggaatgacacagtgtagggacctcacgtgggtggaatgacacagtatagggacctcaggcgggtggaatgacacagtgtagggacctcacgtgggtggaatgacacagtgtagggacctcaggcgggtggaatgacacagtgtttgtagggacctcacacgggtggaatgacacagtgtttgcagggacctcacgtgggtggaatgacacagtgtagggacctcaggcgggtggaatgacacagtgtttgtagggacctcacacgggtggaatgacacagtgtttgcagggacctcacgtgggtggaatgacacagtgtagggacctcaggcgggtgggatgacacagtgtttgtagggacctcaggcgggtggagtgacacagtgtttgtagggacctcaggcgggtggaatgtcagtgtttgtagggacctcaggcggatggaatgacacagtgtagggacctcacgtgggtggaatggcacagcgtttgtagggacctcaggcaggtggaatgacacagtgtttgtagggacctcaggcaggtggaatgacacagtgtttgtagggacctcaggcgggtggaatgacacggtgtagggatctcacgtgggtggaatgacacagtgtgtgtagggac

SEQ ID NO: 97617 - DNA, 12750 bp, Homo sapiens
tgaggcgctcgcgcggttggccggcactgggctctctgccagctgctcgcctttccccctccgggattgtctgcactcggggcgctaacgagttccatctgggcgccccgcggttcctcagggctgtccgtcttcagagccacgtccttccccagcccgttctccgagagccgttctcccccgagcctttgcagtcttaggcgttcgccctccttgggccgcctcccacgaaccctgtcttcaccaagaaccggagcgaacacagctccggccccagagccctcgggaagtgtctccagagtattattctcttctgcgcccgcccgctaagcttgtcccattcaaggcctttaggcgtcctctgagacctcaggacatcagaggcctctcctcggattgtcgtcccgccggccgccacagctgctgcctgccgtcttgggcatttcttccatactccatctgctcatgctttcctcggaatgggacgtttgccgggggtttgtctggggctgggcccagaagcccatcaggttgagtccaagtcccagtgtgtggccctgaggcagcctgccttctagtcgcctggagtaggaggatggattatttaatttcttcccttctggaggatggcatgaaaaagcagggagctaggagacatgacctttatctgggccattctcaccttttagcatagggatttggggttgctgtatcttaactatcaggctgcaagttttttttctttgagacggagtctcactctgtcgcctaggctggagtgtgatggcgcgatctcggctcactgcaagctccgcctcccgggttcaagcgattctcctgcctcagcctcccgagtagctgggactacaggtgcgcgccaccacgcccagctaatttttgtatttttagtagagatggggtttcaccatgttggctagcatggtctcgatctcttgacctcgtgatccagccgcctcggcctcttaaagtgttgggattacaggcgtgagccaccgcaccccgcccagactgcaaattcttgaagagcaacatctgcagcggattgacccttgtgtcccagccagagacctagcggagtgtaccgtcagcatggaatcaacatcagaccagtgccatcattgtctcagtgccagtcctcagtggctgcaaggcctgggccgccccttcttcctgtgactgttcctatctgtaggcatgccatcccacaggcgcctagcacttggaaggcattccttcaataaatgtcggtggagtctggaaagaaggtgctgaggttgggggtgagcaaagagcaaccgtctccatcccagctctgtctccggttaagcagtggggaaggtctcagctgtattgatgctgaaacacttgggccatgccactggcaaaggacttgaggcctctaagggccaagtaggaatcgatagttgactcttcccctggcagttcagcatactggttgaagagccaggtttgcaaacagacctgggttccaattctagctctgcaccttcctagttgtaggaacttaggcaagataattttttgaaacttcagcatctttgtggagataaccagtctattattaaactaccctatagttattgcaaggattacgcaaagctgaatgtctaaaggtgctcaacacagggcctgccactcactccatgcatgggcaacaggggctctctttgctgtgtcttatgaaatgtagcatgcacagcagtcagcaaccacttgggcccaattatgtatcatccctggggcacagaacctccctttgtatcccctttgccctggcagggggcaagaacaaagaattctaaattgacagtttattttctaagaatcaatatattttcttcctttgaaataaatacaaaccagtttgaaaggtgggggaatctatgggaaagagaagggaaatggggacagcccccagtcttttttttttttttttttagtaccaaatgactctggcgcgacccggaaacgcagttacaaatgagaataatttaaattctccgataattacagtatttacaacagcaggggagggagtcacctagtgcccctcttccaggctggacagatgcccactcacctcacgaccggtaggggccccaggcctctaggcagttatggattctcctggcatgagcaggtagaggtggtgggatggcctgttttacgcagtgtcctaactttggcccaccaccccgccctacaatgctgtgaggtctctggagctttttctgacctgtgggccctccctctccttgcgctgaactgccattggcccttggagtgttctgtacagtccagctgcacttagggcaggagggacctcccccacccagcttcccctgagactggccccaagaccagaaatgagtcagtgcagaggccggtgccactccaggacagtgagcaaaggggaggagagaagtcacagggcactataggttgggctgtgttgagcagtatcaatcactatcgctggtctcactgctctgctcgccttgcaccttgctgcggtgctgcagagccctgtggtaggcgatctgtactgacttgcggatgttggacttgcggccctccagcatcttctccttgtctaggtcctggttcacacccagaggaaccagcttggtcctgggcagccactgcctataggataaggtgaagatcaaataaatcatctcagggagaacaaggaccagccttcctcctctattcactcaaacacaccacccaagcacccactctggccagactctgtgatggtccctgccctcaaaggactgttcatggtctagagatgaaagagcccagtcaacagttatactgtgtggtggcggcgggagggtaatcacagggtatttatgggtacaaaaaggaggcaccctgacctcaccagaaatagctaccctgtgccataggctctaggcagactttactgacattgaatatcctctgcagacaattaacaaaaagactacatgtgtaaatgtgacagaacagggattcagagcctgaatgtttatgcctgctttatcctcattttgtcactgtggaggcagaggtgggaaaactaagtctagaagccatctgagtctgggtgggagccacctctatatttgtcataagtctctgatggtcctttggtttctagctatagctgtgtccactagtgcccactcagcctctcagacacatggtcgacacaaccctttcgctcaaaaaactgttctaagtccctcccccactgacttgtgatagcccagtctgcctgttgctggagtttcctggcagtctgcccccataccacacagggctgcatctgtggctgtgagtcacaccaaatgctcccctccttaccaggttcgtttgttgtcaaagaagaggacgaggtagagatgctctcgggcttcctgggtcatctgctccccaagtttcagcacctccagtgggggcacagggatgggaaccccatggtggaacataccttctcggggcatctttggatcaatgatctgaggatataataagagcccagtttggttcagtccatgtcctcccaaggcttttcctcctcaagaacttagagagtatgtctgaagtggggacagagagggtatcatgctactagaactgcaatgctgaccctcagcttctttccatgctaaattatttcagagcccaaggagcaaagagaagcaaaagggagagatggagaaactgagtgggagcctctaagtggtactcaagctgtatctgcccaccagtctaccttaccaagaaactctgtgccccacagctcagcagggagtaggaaaagtctgctaactgtgaatctgtattctgggattggaaagcaagaagtgtaacagaagcaagcataccagagctgggtatgatggatagcctcggcatttggcccacacgaggtccagagcatccagcggggagtcctcatcctctgacagccagccagctccccggcccagactcttccttaccacttcacaggaatgggggagagggggtggatcagcagctggggggctggcgagaccctgacactgggtccccagcatccctggccttgggcaagggaacttactgctgtggcccacgccgcggccagtgcccacggagtaggcctcattctcagtgcctgaggtatcctcactgctgtcctctgggaaagtgccccgagagaaggagggtttgccccggccttgttttgagggcgttgtgctgtggacaagacaatgggagctcagctcaaaggaggggaagaatggggaacagcatggtatgtgccctcagctcttaaagcccgcagggtctgagacttttggaaagcagaggctatatgaggaatttcaaattcaaacacccacaggggctaggctgatgacctaacagaggtgggttagcctgagcagtggcggcaggagtgcatactctaatcatcaccttaatccaggatggttctctctgttctattaatggtaacactgatttatttatttagcagagaaccttgagtttgagccatcttaatctagactgagatggctgccaccccacttccaacagggaaacctacacaggcccaagagccctggaagggcatcccctgaggttggcctcgatctggagggctggtacctggtccggtctgaagcagcgctgctactgctactgctgctggactcagagtctgagctgctccggggaaggctgcagtcattacggtataccaagaaactcttcttcactggttggtttccaccgctgaagccattggctggtaagtcttggttgaagggaaggggaggagggaaggaaccggtcaggaagatgtagatcagagatgacatggaggtaagagggacttggagcttgggttccccttctgtgctggaaaattcctccaaccttggccagcagagctagctctgggcagtgtctaccacagttggccacagccctgctccaccccttgcttccctcggcagttactggctttaggacacaaatggcttaaagggcaggagatccccaaggaaggtgagaagagaaaaggtaaagtgatacaatggaggcagggggccctggatgggactttagctgggtcgtagtgtctctgggcctcagttttcccaactgtaagatgagtgagtggagttaaaggattcctaaggacccttctagctcgctcttttatgggcaaataaaggggtaactgggagtatgctgggaagaatggcagctttgctcactctcttggggggctgggtgatggtaaggctcacccattggggggtcttctgtggacttatcactgtcgctgtctgagctcgaactgggccgggggctcctaccccgcttgcgctgacgcagggaactcatgatggggagctgggggggccccacaggactgcctccgtggctgggggtcatctggctctcccggtttttggggggccggcccggcctcttgggcggtccagctgtcttcgggttctttttggagaacagaactgaggttctcctgcccacctcatgtgcgggggttgaggacatgttgggacccaggcctggagcagagaaagaaagaaggagagttggtgaggggcctgatttgagaagggtagatatccagggtcatgccctgggcatataggaccattactccagctaacgttggggagatcattttaggggcttggaatttggaagattaactcttatacaaatagccagagaggcagctaagaggcccctgattggggaatgagggagaaagtacagctagctgtgtaggagggacctctgcctggggaatggcaggggttgagtgtgtgctgcagagccaaagtctgacttgctttggggtccaccttgccatgggattcagacctttgcttgtctcctggctgctgctctcctctgccgcactatctgtctgcccatccttgtcacaggctgccgggtggggtgtcagactacccyggctcgaggggccatgccgctcagggccatcacgtcccgtctctcgctgatgggcaagcttccgccgcagtgccgtcatctctttcttgatcatctttgcacgccgtgagcggcccacactctgcttgctggcattcacttcgtccagccgctccagaagcagctttagctgttcttccactggcaggtgcttctggttctccagcaagaccagccgctcttcctcggctgctaggggtagggttggaggggaaaggtcagactcagggcagccctcagggccccttgaacctgggcaggcagcaagaaacccactcatcccccctgggcttctcaccaggaacagctgtaaaatagcagcaccaagatgtggaatggcgggcactgctatccattcacccagtctggcttcttggggagcattcctggggatagcttgccactgctcagcctagctgctytctgcctacactgcctgctcccaggaggggacttttggaaagctgtccatccccggcattggcctcttatatgtgtgtgtgatatatcacccaccatcttcagtgtggtgtgtggcctcatctccagccaggctgtgggggatatgcatgcccgtctcaaagtcaatgcccattttttctgcctggcgccgggcctggcggagcacagcaccaccctgctcacgaagccgcactgctgcccggtagaagatggtgtccttggcgttatacttgaggcagttgctgacgatgaggttgaagtcctcctcaaaatcatcaaaattcaggtagcggtaagcctccaagttctgcttcatggtgaaaaagtccatgggctttttgatgtggtctaggtagtcaggtacctggaagggcagggcaggtttgttttaagtggagatatcctccttattgccccgaaccctgctcctaacaagcccccctgaaacacatccagcaacctcctcccaccacagttagaggcaggcatatagcacaggggaaaggaaagctggattctggtcctgactttaccagtcacaagctgtgtgactttggcaagtctcttaacctctctgggcctacttttcctctcctggaaaatgatgaaagtagagccaaatatactttctagactatatgaggctttagtaagaaaatggcttggggactcctctgaaaataaacaccaccttgcattcctacagctctttttacttaacagtaacttataaggaggctgctgcctcaggcctctcattttataccttttagagagaagagtctgccagtcaggacctagggcttcagagctggttctttaggtgctgagccttctaaagtctccgttctagggttcagcaccccgaaagtgtcttcctgccctgggattattcatttggcagactcagtccctgcctctggggaaggagtgcagactgcctcccattctgggcccttggggtgtgacagggacaagacagagtccaggtgatacatgtggctccagttcatcctgccccagagccaccagcccctctcttcaaggtccccatctagtcctggcccagacctgcagcaggggtccaactgggagaggaacagagagaaggtggagtgaggggaagggattcttacttcgtccaattcggttacctcagacagagggaccggctcgctgaagatgttgcctgtgtccttctcttggagctgctccaaggttttgcgaaggaggatgaggaaaggagtcagctgcatctccatggcaatctgctgaaccttgatctaacatagaaaaaggcctgatcagccaggcctcggccagttcagtggcaaagaggtctgaggatatggtcccagctggcctgggaacccgccttctttcccaccctcacagctgggtgtactcatacaggtctaccttctatgaggctccacccagggaaacttgcaccaacaattctggcttccccctttcttgaactaccagcaccagctacctatgtcacataactgaggattctgttcatacgctcctgtgacattctgcttccagcagaactaaaagcacaccgagcaccaggagacctgactccagcgtcagccctgctgctatctggctggggtacacacgctattccttctcctgggtctttttttttttttttttttgagacggagtctcgctctgtcgcccaggctggagtacagtggcacgatcttggctcactgcaaacccctcctcccaggttcacgccattctcctgcctcagcctcccgagtagctgggactacaggcgcctgccaccatgcctggctaattttttgttttttcttttataaaatagggctggcccaggagcactcaccgtctcccttttgagtttttcccgcttgcggatcaattccacgagcagccgagctcgctccaagtcatgccggagccgctgccaggacttgagctgttctttaagggcccagttcttatcctcagaatctctctgtagaggcaaaacgaagatcagaggatgattagaaagccagaggaaaggtcaacagggagaagagagcccaggaaactcaggtcaagccaaaagagggagcacagtaatttattggtagtgcctcaatctgtgtgtccccaaggcctggcagaataaatgcttggtatgtgtttgttgaatgaatacataaacacataggaacaacatcttttcattgaacattccatgctgatcctggtttgagggctagcttaaaggaggaaagagtctaagccctctgacactggaaactacagttgcaaattttggttttcgtccccctggcgctagttcccagagcccacagggaactggacacagtaccccaacttggtcacagttcctctgagattgcaggtgtgtctgcaggcgacgtagcaatgggaccccattccgtgactgccgcttcagtgtccagtagctgtgcagcctctgcatgaactggctcttcctttggatggtcaggcggttggtgattttactaagcctgggaggcaggaaacaaagagtaaaacttgttgggccctgattctcttaagcagagcaagggtctctggccagtgaaagttcctgaatggggatgaagggagaggatctcttgtccaaaaggcctgggactctggacttaaggcaaggaagaaagagtggtgccatcagtggtaccgtggcagacaggaaaccaagctcccagcactaaaccagatccctaaccctgtacaccagcaatcagggacttctgcccctaagactgctctagtcactgcagcccagagtactatttgaccctgggagccccactgagactgagcctttgaaggttttaaaatgaagtacaactgtacagcagaaatatatagtaaatcaaataaacggcacaagagaactaaaaaaatccctggccatcacagcccaaatgagcagcagtaaccacttcacaacttcttgagcttccccttccccgcttttcattctatttgtttcttcatattcagaccattttttccattgctgccagtggcagttccatcctcttccatcccaacttaacaaaccacaccatcaaaatgaagggcagttccaaaacgcctgttagctatgccagataaaagctgacatttctggctcttaatgtgaaagtcaggtgacctgctaaagacaactatctgttttgaaaatatgttctttttaacttctatgcagctcctgggaagatagcccagccctgccattccactcaggaggctgccagctcctctcctggaggctcctttctccctcatctgcctgtccaccggctccccacatacctgtgtggtgggatgcagggcactgacaccacaggtgctgctgcccgcttctctgccaggatcttccgtgccttcttcattttgatccgggacttggccttggccttcttgactttctctgagctccagcccttaccctcatcctcctcctcatcttcatcctcctcaccctcgctgtgggacagggcaggcagtcggcgtgctgaacctggaggcgtgtggatgtcgcagtaggctgtcttgcggacactgaaagaggtgccgttggcgcctgtctcccgcacaggctccatcttcatgtaaaggccagcctgctgggcgcatgtcacatggaaagctgtgtaacagttggccttgtggcactggatgcaggcccctgagccccgttgtttgcaaatgtagcaggtgagcttccagcgagctggtgggatgtgctcaatgctgtcaataggctctaggaagaccgtgttggcgaagcagacctcagggatccacaaggcacacaccacatgggcccagcgcccgtcatctgtctgcttgaaggcaccgcccttgttggggcacagggcacaatccacagcacgagagggtgactgcaggcaacggcggcacagccactggccctcagggatataggggacaccgtagcactcctggtgcacggccaggttgcacatgtcacagaagaggatgacattgctgttctggcactcaccatcattgcagatacagcaaacagcatcctcgtccactagcgcattagggtcgcctttattatgactctcaaagtacgactccttctccagtcggtccattaggtactcaaagatctcctgcgggatgggacttacaccctctgtcttccgacgctcattcatgatatccagccagatgtagtcctcctcgtccatgtcatactctacttcctcgtccagctcctctgcagacttctcgatgtacctacggtacaaacagggaactcagcatcacatggttgagatttccctcccttaaagatgatgggtcatttgccattgagcacttactctgtgcctatgcccttcagatgtgttgtctcatttcatcctcaccttaactccagatattataggtactatcatcgtttctattttgctgaaaaggaaacctaaggcttggaaggttaatcacctggccccagctcacttgtgagaaagtggtggagctgggatgtgaacccaggtctgccactgcaaagctcatgtcctagctgctatatgtgacaccatcttcttggggttgcagaggctcagccagcctcctctaaaaggaggaaggtggggcagctagtaccccttagagtggtccagatgatggtacgaagaatcggggaagaaggaaggtcattggatgtcattgacaaattacatataagttgttttagcactggtgggcagggcctcgactagagctgccatggatcttctctcagctagtgtcagcatcagctcaaggctccgtcaaactctaggtgctatgtttgttcactggatagccttgggagataacaattataatagctaaggtttactgaggatttcctatgagccaggcattgtgcttaactattacatttattcttaccacagccatagagttagtgttcttgttgtcctcattttgcagataagaaaacttaagctttgagaagttaatcaaaacatagataggtcacataacaagggagtggcagaggcagaggcattcaacctccagcccagtgctcttaatgtccaacctgtatcacttactatgccaacaggcctggaattgagggctgctctcggtgcttgtcacacagagaaggtgctccttgcctggcatgctataggtggcctagactctggcactgtaaactacagggtacaaaggaagggatggggctttggcttctaagcaaaccagatttaaatcctgcctctgccattttatgacttttaggacatcactgctgtactaaacctcagttttactgatgacagaacgaggataatactacccactcacaaagaaactgtcagggttatatggaattataaaaatgaataggccacaaactcttggcctttacatttatttatatactaccttgcccagtgcctactaccccatcaggctccagcaacccccagcaggcccatggaaggaagtgtgagcaccttggtgtaaaatgccacctaaccactaagtcatgtgtgaccacatacagacgtgtgcaaatatgtacatttatctttttattaaaaagttgttttgaaaaatgaatgagctaagtcaagtggcacacagcaggccctagaaaaacattagctcgtttctcctcttatgtgggaaatggaactttggctgctagagtgggccagcacacacaggctctggagccacactgcctgggtgctgtctaacagagggcaagtgagctaagctccctgagccttgtttgttcatctgtaaagtggtgatgctaataatctgaacctatttcacatagctattctgagcattaaatgagttaatgcaggtaaagtgcttaggacagtgcctggtgtgcagcaagcactcaataaatgttaacttattagtttttgtatggcctttacccaccttcctagcattatagctgtgtatgtgtctaactcctccactacacgatagaagtggggattgtgtctgattcgccatacagatacaggcactcatcactgttcatttgaaaggcattttgggggtggaagggaggagagagactgaaacattgtaggaagcagcttcttcctttttagccttttacctcttccccaaggtgactgcaacctc

SEQ ID NO: 97618 - DNA, 26205 bp, Homo sapiens
acagagttttgctcttgtttgcccaggctggggtgcagtggtgccatcttggctcactgcaacctctgcctcccgggttcaagtgattctcctgcctcagcctcctgaataactggattacaggcacacgctgccacgcttggttaatttttgtatttttagtacagacggggtttcactaaaaccccagtttgttggccaggctggtctcgaactcccgacctcaggtgatccgcctgcctcagcctcccaaagtgctgggattgcaggcctgagccaccgcgcctggccaaggggctggttttggagcagagtcagaggtctgggacgtggaataggtaagggcagggcagtgcgggggagcaggatagaactgcccattggggctgagcgcggtggctcatgcctgtaatcccagcactttgggaggctgaggtgggtggatcacctgaggtcacgagttcgagaccacactgaccaacatggagaaacctcgtctctactaaaaatacaaaattagccaggcatggtggcacatgcctgtaatcccagctactcgggaggttgaggcaggagaatcacttgaacctgggaggtggaggttgcggtgagccgagatcgcaccactgctctccaacctgggcaacaagagcaaaactctgtctcaaaaaaaaaaaaaaaaaaaaaaaagaactgcctacgggcccctgggctgagatgttctcagatgagctttctagctggaactgcctggccaccttcagagacattatagcagtccccaatctttttggcaccagggaccagttttggggaaaacaatttttccatggactggggagggggatgggagggggtgggagggggatggtttcaggatgattcaagcacattacattcattgtgcactttatttctgttataataataatagaatatatagtatatataattgtttcggtatatattacaatgtatattacaatgtaatatataccgaaacaattatacaattcaccatcatgtaggatcagtgggagccctgagcttgttttcctgcaactagacagtcccatctgggggtgatgggagacagtgacagatcatcaggtattagattctcataaggagcttgcaacctacatccttcgaacacacagttcacaatagggttcatgctcctatgagaatctaacgccgctgctgatctgacaggaggtggagctcaggcggtaatgcaagtgatggggagcagctgtaaatacagatgaagctttgcttgcccattgctcagctcctgctgtgtggcccagttcctaacaggccatggcctggcggctgagggccctggtattacagcatcaggagctagagtaggaccgagcccctgattcccaccttccaggtgcccctgagccagcctccagaggatgagctggataggctgacgaagaagctggttcacgacatgaaccacccgcccagcggggagtactttggtgagctgaggctgtggggtgggtgggacgtgggaagggaggctgggagacagaggggacagtggcttcctgggtctgtgaagactgatgctgtttctccctgtcctcaggccagtgtggtggctgcggagaagatgtggttggggatggggctggggttgtggcccttgatcgcgtctttcacgtgggctgctttgtatgttctacatgccgggcccagcttcgcggccagcatttctacgccgtggagaggagggcatattgcgagggctgctacgtggtgagtggctggggctgggaggagggagtcagtggctggatgcagggggcttccatccaaggtggtaactagagcgtccaagaccaaaggaggaacggtgctaaaagccaggcgactgaaagtgatgtacaaacagggcggaattctgcaagtatcaagcaagtagcttaacactggtggctgaagggaaggacgcagctcttacaagtgtggagcatcttacagttaaagagaatgtgttagattcccatgacacccctgtgaggcaggtattactactgattcctggttttgttttttgtttttttttgagacagtctcgctctgttgcgcagactggagtgcagtggggtgatctctgctcactgcaacctcagcctgccctggttcaagcgattctcatgcctcaggctcccgagcagttgggattacaggtgcccaccaccacacccagctaatttttgtatttttagtagagacagggtttcgccatgttggccaggctgttttgaaactcctggcctcaagcagtccgcccactctggcctcccaaagtgctggcattacaggcgtgagccactgcacccagcctgattcctgtttttctcatagtgtttaaataccgtgtatagtgctgggacctgaactcagatctgctcaagtctgcctttcaccgaatcacatgcaggaggctgcatgcaggaggctgcagaaattagatggctgggttgctggggttcctgttgagctgccatggctcccgcccgctcccagatcttcctgccttccttcccaacaggccaccctggagaaatgtgccacgtgctcccagcccatcctggaccggatcctgcgggctatggggaaggcctaccaccctggctgcttcacctgcgtggtgtgtcaccgcggcctcgacggcatccccttcacagtggatgctacgagccagatccactgcattgaggactttcacaggtcaggcctggcctccaccttgtctcacaatgtctgacctttcctgtctctctcatctcttcatgccccaggactgtctcttcctgtttccaaccctggccctccttcgttctttgttattgttattttttagagacggagtttcactctgttgcccaggcaggagtgcaatggcatgatcatagctcactgcagcctccaactcctgggctcaagtgatcctcctacctcagcctcctgagtagctgggactacgggtgcacacgccaccatgcctggctagttttcttcgtttttttttttttttttttgagatggagtctcactctgtcacccaggctggagtgcagtggcacgatctcagctcactgcaacctccaccacctgggttcaagtgatttgcctgcctcaacctccccagtagctgggattacgggcgcatgccaccacgcctggctagtttttttttttttttttttttttgtatttttagtagagacaggctttcatcatgttggccaggctggtctcaaactcctgagctcaagcgatccacctgcctcggccgcccaaagtgcagggatagcaggcgtaagccactgcacccagtcttcttctttgtattttaataaagacagcgtcttgctgtgttgcctaggctggtcttgaacgcctggcctcaagtgatcctcctgccttggcctcccaaagtcgggggattgcaggctagagccactgcacctagcctctctcattctctttgacatcgtcccttccccaagacctaaggccatacctctggcctctctgattccctcctgtgccccaccttctctgggttccattgttggtgccctgcaaccccaaggcttgatggccttcttggttctcttcccctgcaggaagtttgccccaagatgctcagtgtgcggtggggccataatgcctgagccaggtcaggaggagactgtgagaattgttgctctggatcgaagttttcacattggctgttacaagtgcgaggtcaggggcccccagcacgtgcaaggggctggcagtgtctagggtgctgggtagagcatgagggggaacacagaggtctggggttgatggaaacctgttgcttctttcttttttttttttttttgagacggagtcttgctctgttgcccaggctggagtgcagtggcacaatcttggctcactgcaacctccacctcccgggttcaagtgattctcctgcctcagcctcctgagtagctgggattacaggtgctggccaccatgcctggctaatttttgtatttttagtagagacagggtttcaccatattggccaggctggtcttgaactcctgaccttgtgatcctcctgcctcggcttctcaaagtgctgggattacaggcgtgagccatcgcgcccggccaattgttgcttctttttcaacaggagtgtgggctgctgctctcctctgagggcgagtgtcagggctgctacccgctggatgggcacatcttgtgcaaggcctgcagcgcctggcgcatccaggagctctcagccaccgtcaccactgactgctgagtcttcctagaagtacctgctgggttctcagttccagttcccatcctttgattgatcactctccctgacatccacctgtatgactttgtcaccaaatgctgtcttctctttctccaatcaagaaataataatccctcgagtttacaaaacacttccaagtctgttgtctcatctgattctcccagtagcccattacaggcccagtcattgttactgcctgcattttttttcttttttttttgagacggagtctggctctgtcacccaggctggaatgcagtggtgccatctcggctcactgcaacctctgcctcccaggttcaagtgattctcttgcctcagcctcctgagtagctgggattacaggcgcccgccaccacgtctggctaattttgtatttttagtagagacggggtttcaccaccttggtcagggtggtcttgaactcctgacctcaagtgatctgcccgcttcacccaaccaaagtgctgggattacaggcgtgagccaccgcccttggccactgtctgcatttttacatgtgaggatgtcagagctgagaggtgactcccccagattgcatggttcttaaatggtggaacctgggtctttttgactcaggtccagttttttttgacaactcttgtaatccgtcactaccctcctctcagtgctgggagcaagcacgcctcagggaggaggcaagatttcctctatgtatctattttgagacagggcctcactctgttccccaggctagagtgcagtggtgcaatcaaggctcactgcagccctgaactcctgggctcaaacagtcctcctggcttagcctccccagtagctaggaccacaggggcatcccaccaagcccagttattatttttttgtgtgtagatgggatcttgctatgttgcccaggctagtcctgaactcttgggcttaagtcctccctcctcgaccttcccaagtgctgggatcacaggtgtgagccaatgtgcctggccctaaatattctgtaaaggggccttgctatgttgcccaggcaggtctccaactcctgggctcaagtgattctcccacgtcggcctcccaaagcgctgggattgcaggcgtgagccatctcagctggtcttcctattaagtctcacactcaattcactgagaggggccttggtgttactcccgggggtggtaatccattgaatctgggcggtccatactctgtttagggcgttaacttacagcctatttcatccaaatactgagcggggttaagactgagatctgccaattttacttaaagacggggcgtctttgtcgaggaaaagcaggaacggcggactttgcatttagtgcgcactgtggcacccaattttggctggatatttggagcagaaaatggtgggatacgatgctttaaaatggttgcttccaccttccatcccctaagcgcctgcgcttcccaagcccacgccctgcccgaggaggggacgaaatcacccccggtgaggtcaggaggcccgtggggggaacatggctggatgagaaccgtcttaggaccccgacacatctggggtcgcgcgatcctcgacttccgctctcccttcgcgcccagagggcttgttcgcctcccgaggccgcgcttggcccagccgaggtcccgtagttcctaacgctcgagccgttatcgtctcgaaaagccgcgcgagacttgcgagatccccgcccctttcccatcacgccctgctctccccgcccttcgcgctcggtttgttagttccagttccggccgcgagggtggagctttgtgcctcggaggcgtgggtgacgcaggcgcagcgcgggctgcgcgcgctactgcccatccccggttgtcccacttttgttcgcctctcttcggccctctactcaagagctccgtctccgtctcgccctcctcgaagtcctcgtcgcgcgcccgcgacccaggtcgccctgaaatctagcccgtccgagcgcgagtccaacggccgcggccgcaccaaggtgggggaggggaggagcctggggggccccgctggggcgggagaggaaccggggtccacgggggcgggcgcggagaaactcggggcgagtggaggtgttggagccgcgttctcaggcctaggatggtgggggccgcggagggctggccttggcgggagggaagcgggcgagctgcccgcgagggacggtcccttcctccgctcgtccttttgcaccactcctaccgcctctccccggtccccaggccccctcagaccgtgccatgggtgacagtgatgacgagtacgatcgaaggcgcagggacaagttcagaagagagcgcagcgactacgaccgttcccgcgagagagatgaaagacgtcgaggggacgattggaatgacaggtgagccgtttttaacttcatcttgtccccgtttcatgccgtttcactccacccgcgtcgcttttctttctcccccttgtaatttttatgagggcgaatcctatgaaatggctcattggaccgttttctgtggttcagcctatttgctgttggccaaataactagctgtggcttggtttttgaaattctctgcagatcagagctatagagctaagartttgagtatgaagaagcactgtttatacatgcacgaaaagcgtgcttttttgcttttttttgttttgttattgagatggggtcttgttctgctgccctggctggagtgcattgatgcagtcgtagcagcctccacctcccgggctcaaccgagcctcccgcctcagcctcttgagaagytgggactccagggggaggccatcacgcccgcctaacttttaaaaattattattgttatttcgagacagagtcttgccctgtcgcccaggctggagtgcaatggcgcaatcttggctcactgcaaccttcgcctctggggttcaagtaattctcctgcctcagcctcccgagtagctgggattacaggcacctgccaccacgcccgtctaatttttgtatttttagtagagacggggtttcaccatgttggctaggctggtttggaactctcgactttaggtaatccacccagctcgacctcccaaagtgctgggattacaggcatgagccagtgcttggtctaaaattattttttgtagagacagcgtcttgctctgttgcccaggttgtaaattatattttaggaggattgcttcagaaaaataataatatagagttgatctgactggagaggtcgtcagattatttccctgacaatatatgattaggtttcttgtcactgttttgcctaaaatctcagagttcatagggcggtgctgattggattgattataagatgyggttattgaccttagggtgttacagtgagcttggcatgggggatcagaatggcagtggatgtattctgtaaatgagtatatatagtggaagttataaagagggtaagcattgagggaacagatctctaaaggaggggagcggtgctggaggttgtgtgtcagggacccactggaaagtgacacttggctagacttggaaagatgagtgggaattccccagacacgagtgacatgaacagcttggagttgtggacataacgtgtgattttagcatattctagtttggttagagtcctgtttctcaggatgtccacagaccatagggggtctccgaggctaaaattagtttttgtggtaatgtttacatattattgccatttccactgttggtgccatagcaatgatgggtaaaaccgctgatgctttaccaaacatcaaggcagtgacagcaaagagttaaaaaaaaaaagccagccgggcccagtggctcacacctgaaatcccagcactttgggaggccgagacgggcagatcacgagatcgagagattgagaccatcctggccaacattgtgaaaccctgtctctactaaaaatacaaaagttagccaggcatggtggtgcgcgcctgtagtcccagctacttgggaggctgagacaggagaattgcttgaacccaggaggcacaggttgtagtgagctgagatcacacccctgcactccggcctggcgacagagcaagactctgtctcaaaaaaaaaaaaaaaaaaaaaagccacttccatcaatgattcttgatgaaagagtaaaacatttaaatttgattagattggactcttgactgtacgtcttttttaaaaaaatttttttttgacacagaatcttgctctgtcacccaggctggagtgcagtggggcgatctcagctcactgcaacctccacctcctgggttcaagtgattctcctgcctcagcctcccgagttgctgggattacaggtgcgtgccactctgcctggctaatttttgtatttttagtagagatggggtttcaccatgttggccagctggtcttgaactcctgacctcacatatccacctgcttcgacctctcaaagtgctgggattacaggcccgcgttagttgtcttgagcaagagtacgcatgtgattgagtgagctgaactaacagcttttttccatgggatgttatttttacttgaatgaatgacaaacagtgattgttcatacttgggtatttggcagacatcttgaaaatgaactgagaacctgttacttcagtgtaagctgttggtatttgttgccagtgatgaagtagaactttccagtgaaaattaaaattttgggccggcgcagtggctcatgcctgtaatcccaacactttgggaggcgaaggtgggtggattgcttgagcccaggaatttgagaccaacctgggcaacgtggtgaaacctgtctgtacaaaaaaatacaaaaattagctgggggtggtggcacatgsctgtagtcccggcaactccggaggctgaggygggaggatggcttgagcctgggaggtggaggtgggagtgagtcttgatggcaccactgcattccaacctgggcaacagagagataccctgtcaaaaaaaaaaaaaggaaattaaaattttggaaaacttctactaatgtgagcttgacagcttcccattaagtaaagactttcttggtgagataggcagtgatgctgatgagtacattttgatattgggtgagacataatccaggtccattgaaagggaaagatagaacagtggattttaacgcagcagagaaagaaatattcactgatactatttcagattgaaggttctaactagcctgtgagaaactacttccttcttggacaaggtagcataaagaaaagaaaaaaaagaacctacttcttgttgaattttgggtagtatccaaaatgaatatctacagttaatctgaaaaggcctttccaactccttatcagtatgaggcctgattttctgtttttttttttgagacgggtcttactctgttgcccaggttggagtgcagtggcacgatcatggccacagatcactgcagccttgacttccccaggcttaggtgatcctctcacctcagcctcctgattagctgggactacaggtgtatgccatcacacccagctaacctacttccttccttccttccttttcttttcttttcctttcttttcttttcttttccttcctttctttctttttctttcttttctttctttctttcattctttctttcagatggagtctcactctgcccaggctggagtatagtggcgtgatctgggctcactgtaacctccatcttccgggttcaaaacgattctcccacctcagcctcccgagtagttgggattacaggtgcctgccaccacgcccggctaatttttgtgtatttagcagagacagggttttgccatgttggctaggctggtctcaaacttctgacctcaagtgatctgcctgccttggcctcccaaagtgctaggattacaggcatgagctaccacttccagccagccagctaagttttgtatttttagtagaaaggtggtttcaccatgttgccccagcctggtcttgaactcctgggctcaagcaatccactgcttcggcctcccaaagtgctagcattcattacagatgtgagccaccatgcccggcctgcctcatttttcaagcagaacaaaatatctcaacagattcagtgtagaagctatcctctacaaagccagaacttggagagattggtgacaatgtaaaaacaatgccactttttctcaccaaaatttttctggaaaacgatttttcataaaaacatgtaatgtgtttcatcttactgtgtaatttaaaaatgaaggttttggaacatttygttttaattttgaatatagtaagtatcgatagatgtaacccacataagcagaaactctttggtgtcctcagtcatttttaagagtattaaggggctgaggcaggagaattgcttgagcccaggaggcggaggctgtagtgagccgagagtgattgtgctgctgcactccagcctgagcgacagagtgagactgtctccaaaaaaaaaaaaaraagaagaagaagaagatgaggatgggggaggctggtgattggttgggaggttggtgactggtggagaggctggtgactggtcgagaggctggagtgacagccaggagcccaagttaaaacaatagtgttgcttactgacattgaagtaacggtgtgatgtgatgagacttgtgtttgaggaaggtctgcctgccagtggggagacagaagcgagagaccagaagcaggcgggcagccagggctgcaggagccacactggccaaggacaaagactaggacagggtgtgtggggatggcagagagtgggacagctttgataggctttgaggcagaggattagcaggagcagtaattagcggtgagggtagtgaatgacagctggcragagatgctgttccgttgatacagcagagtggggagcgggaggaggaaaagacatttgggcccatagtggtgggatgaataggcttgattcttttttctttttttggtgggggggatgaagtcttgctctgtcgcccaggctggcttgcagtggcgcgatctcggctcactgcaagctccgcctcccgggtccacgccattctcctgcctcagcctcccgagtagctgggactacaggtggctgccaccacgcctggctaatttttttttgtatttttagtagagactgggtttcaccatgttagccaggatggtctcgatctcctgacctcgtgatccgcccgcctcggcctcccagagtgctgggattacaggcgtgagccaccgcacccggctgaataggcttgattctgacaggctgaatttgagggggtgatggacttctagtaggggatgatttttaaaaagttttctgttttatttttagagacagggtctccctctgtcacccgggctgagtgcactggtgcagtcgaagcttgctgcagccgcgacctgcccgtaagtgggcctgtagcaggggtgattcatgtgggtctggagcacaggcggaaggccaggctgggagaagagttggagaaccatcagttcttgggtattggctgaactcatggagttagacaagaatctttgttttgttttgttttgagacagggtctctgttgccagggctggagtgcagtggcttgccctgactagagaaaaatctttttctgttaggagcgaagttttataattgtaggctttttagtctggtatctcagggtgtaagaagggcctgtttaggaatgtggctgtggcatatccagctgtatctttaattattgttacctttttaaaaaataaaaaattttttgtagggatggcggggggcgggggggggtctcactattgcccaggttggtctcgaactcctggcctcaagtgttctctgcctcggcctcaaaagtgcttggattacaggcatgagccactgtgcctggcctttaatctttgttacttgttcttactgccagagagtgggaccgtggccgtgagcgccgtagtcggggtgaatatcgggactatgaccggaatcggcgagagcgcttctcgccacctcgccamgaactcagcccrccacagaagcgcatgaggagagactggtgagatggagcggtttccctctcctcccctttgcctcagttccacctgggcctcccctttctcccctcacctgtgcctaaatctttgtcatttccttttctcaacttcccatcacccatcgttactttgtcmcttgaaacccttgtctgggagaccatgctgtgtgtacccccgtctgtccatcctccatgctctggggaggtgactcccttctctgctttacttttgtgtcccccaccttcagggatgagcacagctctgacccataccacagtggctatgagatgccctatgctggggggggtgggggcccaacttatggcccccctcagccctggggccaccctgacgtccacatcatgcagcaccatgtcctgcctatccaggccaggtaagggtggggcttctcagaagagggttggtaggcctgggggatggatggggttgctgaaggccatggctgaagccagggagcgggtcaggcacacagaggcatgtccctggggtaggggtggtagctgttggggtttggggtgatgtccatggtggacaaagtaaaggggccccagctactttggcccctgtagcctcccaccgttccccaaaaaccaagccttcctgaccggggtcccctccaggctgggcagcattgcagagattgacctgggtgtgccgccgcccgtgatgaagaccttcaaggagtttctcctctccctggatgactcggtggatgagacggaggccgtcaagcgctataatgactacaagctggatttccggaggcaacagatgcaggatttcttcctggcgcacaaagatgaggagtggtgagtgcccctacttccctggacctctgccctggcatgtccccctggccccgctggtggagccacagccctgtcctcttcccagttttccctgtccagaactttctgggggcgggggtcgggaagtatgacagcattggctgatggggtctccccctcacttcagcaactgccacggcccccgccccgccctgtctcctgtcctgctgtcctcagagagtgggacacctccaggcagcaggccagagccacttggccccttggggcagcagacagactgcttcccacttgttggtgttgggtcattgtcatccctgatcaccaggaccctgtgtggctgtggcgtcctcctaaagcgacgagtgaatccagacaagaaaagcaaagatctcggtcgtttgacagaaaaagaattttaatttttttttccttttgtggatgttttaattttaatcaaccatcttttccccccttcctgctcctcctcctcctcatcctctttctgctcctcctccttgaaaagagccagaactgggaactacacccgctcatcgacggagctcggagcaaacccacctccacccccaccatacccagcccatacatgagcccctgggctgagctgcgcggccccggccaggcagacaggccagggcactgctgtgcacaatgcagcggtttagctgaatgtgattgctcaggcagctagccagtcaggccccactgcggagtcccgcgtgggcatctcggccgggcgcccagccaggagccagccggtggcccaccagccagcatgggccctgggcgccgctagttaaatcttgagctctgtttgaccaagcggccaaggtaaagatcctggaggtgatgcctgcggctttcctttcctcttctgccccactcrtggttctgttctgtcttcgctgtcccctctctcgaattgctctrtgtctttgtcctaatctctcagcaccttcattcttctctgtttctgttcttgctccctgcctaacaccaccttcttccctgttggtttttttagtttctctctctgatctttagtttttccctttgttttcggtttctgggactttctcacactctcccctttcctccctttccccttttcctcatactcctcatttcttctgttttccctctgaggtcctatttgaaatgttttatttttcttctccctaaccttccagccctctcctctctctccccctgtgggcaggacctgaggctctaaagggcactccagtgtctcccttcggtctttcctgtcccttcaccgtcttgcttatcttcccacgggtggagaaaggtgccctgcctctgggcttttgctatctggccctctgtcttccacctcggggtggagggagttggcgggagcagtttttgaatgactgcagtttggggttggtgaggagagggaggttcttcagggcctgctatttcctgagccttcctctctgaagctttgggaaatgacacctttttactacgttagtgtttcccagagatttaaagtggtaaatctgcctctcctaccctggcgtccccctgtagtcattggtcttcccaaatccagagctcttagttcctggttctcccccaaatcttcacagaacacaacttctggttccttttggggtgttgggtggttctagcgcacccctatcccttaatctctctattttgatgaccttttgtggttgtgagaggaagggggatatgccctgtctttcctgggccccttcccacatcctggccttggcttccaataactgttttgtctttccctcccccgcttcgttcccaggtttcggtctaagtaccacccagatgaggtggggaagcgtcggcaggaggcccggggggccctgcaaaaccgactgagggtcttcctgtccctcatggagactggctggtttgataaccttctcctggacatagacaaagctgatgccattgtcaagatgctggatgcaggtgtgcggatttggaggggtggcaggcatctgggccccatgggggtgggggtgtctggggatcaggtagaagccggttgacaggagccagggccctggggtcatgacctctgttccctttgttggtagccgtgattaagatggaaggaggcacggagaatgatctycgcatcctggagcaggaggaggaggaggagcaggcaggaaagcctggggagcccagcaagaaagaagaaggacgggctggagcaggcctaggggacggggagcgcaaaaccaacgacaaggatgagaagaaggaagacggcaagcaggtccgagccctgggtctcctagtgttgtccctggcagcctgggggaggggggcgggtaggggtccataggagctagaagtagggggctggggaaaatgaacctgtggcctcagctgtgggggtgggggccctctgataaaggtgggaggggaggtttgacatccccagtggttgtctcttaccataggctgagaatgacagttctaatgatgacaaaacaaagaagtcggagggtgatggggacaaggaagagaagaaagaagactccgagaaggaagccaaaaaggtgaggtgtctgtggcctggggtcagagtgttggggctggggttctggyacgctgacttgtcccctctgctgtggctyacacagagtagcaagaagcggaaccggaagcacagtggtgacgacagctttgacgagggcagcgtgtcagagtctgagtcggagtcagagagcggccaggctgaggaggagaaggaggaggccggtagggtttcttttctgctttaaagtgcgttctccyaatgcgggtggggaggtgagagrttggcgacattgacgggagggtgggtggcttttaggggaaagcttctgtatcctccccaccacaatcagtaataaaaatgcaccaactccttcctaccccccttcctgcctagaagaagcgctcaaggagaaggagaagcccaaggaagaagaatgggagaagcccaaggacgccgcggggctggagtgcaagccgcggccgctgcataagacctgctccctcttcatgcgcaacatcgcgcccaacatctcccgggccgagatcatctccgtgagtggggacccgtggagtcagggcagggctgatggagaagtggagggtagagggaaggcagtggggccctgcctgtgacagatgcccccgtttcacctgctagggaggccccttccccaggttccatggcctccgaggactagtcctgatagcgccattggctttcaggtgctggtgttctgaagccctttagtggtttttccctgcccaaggatgggaagagtgataaggcagttagtccctagggttctgagggcagtgggggattggaggaagaagcgaatgaatccttgagtcactgtggggctgcttttctgcttcttgcagctttgtaaaaggtacccaggctttatgcgggtggcgctctcagagccccagccagagaggaggtgagtaactcggtgcgttggagggaaaagtgcaggggaacgttaatggccaacaccaactccctcgcttgactatgctaacattttctttcttgtgtaggtttttccgtcgtggctgggtgaccttcgaccgcagtgttaacattaaagagatctgttggaacctgcagaacatccgtgtgagtgctgggggtgggactgtggggaagaggaagggagactctgtgccacacgggacctctgtgtgactttgttcatctgatagtttggttgttctgcacactctttgaccgttttgtctggctacgttgtctctgggcaaggctctagggcgttagcatggacggaacctatgtggtccccgtccccagggagctcgcagtctgatcaatcgctggtgctcaagagggaagggtcttagagctgctgtttctctggcaagcggggtaagtggggtaagctgctgatgatgtctgccctccagctccgggagtgtgagctgagccctggtgtgaacagggacctgacccggcgcgttcgcaacatcaacggcatcacccagcacaagcagattgtgcgcaacgacatcaagctggcggccaagctgatccacacgctggatgacaggacacagctttgggcctcagaaccagggacgcctcccctgcccacggtcagtgactccccaaaggactttgtcagaagcaactggtagtgcctctgctgtgggcacctctgaccttacctatctgtagccttgaacccttgcacccactcgcctgctcactcatttgccccttcgtgtgtgggtagcagcacctccagattccagcagaactggggggatgctagtgatcatttgtggctggggtggaacaaaagctaaaataaagacaaatctcaagggggcaaaaggtgccatttatgtcyggtgaactcctgtcycctcgctgctctttcacttgtggaaagtctcaggttacctcctctgaaggtcktctctgccttacttgcttctcttcctcccatcagagcctgccctcgcaaaacccgatcttgaagaatatcaccgactacctgatcgaggaagtaagcgccgaggaggaggagctgctggggagcagcgggggcgctcctcctgaggagcctcctaaggaagggaacccggcagagatcaacgtggagcgggatgagaagttgattaaggtgccagtggcagcgcggggcacgtgggggctcgggcggtgagggcaggagctgaacgctcscattcacttcccttaggtcttggacaagctcctcctttacctgcgcatcgtgcattccttggattattacaacacctgtgagtaccccaacgaggacgagatgcccaatcgctgtgggatcatccacgttcgggggcccatgccacccaaccgcatcagtcacggggaaggtgagctccaggttcccctttgttcccggctgcccctggccttggtcctccagccccttgccaccatccttccttctggctcccttgccaaccttycttcctctgttcccaaaccacagtgctggagtggcagaagacttttgaggagaagctcacgccgttgctgagtgtgcgggagtcactctcagaggaagaggcccagaagatggggcgcaaagacccagagcaggaagtggagaagttcgtcacctccaacacgcaggaactgggcaaggataagtggctgtgtcctctcagtggcaagaaattcaaggtgtgggatgttggagaatggccgtgctacggtggtgggaggtggggttgagacaggaagccccctgggcaggggtgggggaactgcttactgcactggcaggcgggagctgggaatccttccagctcgggcctgggagcgaggcaacccttatgtggctgtcctgacccctctcctctctccacccagggtcctgagtttgtgcgcaaacatatcttcaacaagcatgcagagaaaattgaggaagtgaaaaaggaagtcgcgttttttaacaacttcctcactgatgctaagcgcccagctctgcctgagatcaagccagcccagccacctggccccgcccagagtaagatacgatccatgaaggtcgcatgtgccctcttccttgastayccrgggactcctgtttctctttaacgtgtcacccsgagaagtttctgccccatcctcaggccatagccctagaagtcaattgtacccgtatccccctccccgcccccgcagtaattcatgtccctgtccgtgttgtactccccccaggtttgaccccaggactcccctacccacaccagactccccagggcctgatgccctatggtcagccccggcccccgatcttgggctatggaggtaagtacaggagggagatgaaggggcttggtgagtgtgtggctttgggagaagaaaacagaggatggaattgaggacatagttttgcaactcaacactgatctctgtcatagctggtgctgtccgccctgcagtccccacaggaggccctccatacccccatgccccgtatggtgctggtcgagggaactatgatgccttccgaggccagggaggttatcctgggaaacctcgcaacaggtgaggagggcrgacgcccaagctttgttgmcgcctgcagactcccttttgggagccctcagctctcatcctgtacctctcacytcacaggatggttcgtggagayccaagggccattgtggaatatcgggacctggatgccccagacgatgtwgatttcttttgagccgtcccccgttcctcagtcctgtatcatccatacttgtactaccttgtcctatgaagctctgagaattttttgtacgatcagccttactgctaataaaagcacttccmcagggctcctgactctcgtgtgttacataactcctccatccttccagagtaactcctgaggtgttgctcagccctgccacttttattattgatgtcaaaagcgccaggctttgcagggacaccagtgggaggtacataggtgcgtgtctgggacccgagaatctcagttctgtaacttcgtcctcagtccaaggtgcgctgctgctgttgggagctaaggctggtcaagcacaggttgtagaaggagttggggtcaaaggctgcactcacctcttgccagcccacccacccagcagcctgtagttcactggggctttttggagtgccccagtagtgagggtccaataccaggacataggcttccgtgcctgaccctacgcagactcccagcaaggccttggacctggcatctgcgtcccccccaaccatgactgggcccccaccccctgcgaagtgcgagtaaagcctctccagctccccgtgcagccccactccccggggtacgtggcagaggcgtccctggggccctccgaagtgagcgaggcagaggctggcctccacgcagccgatccagtcccgggagccccggaagccggggggcttgtcgcccatgtcctccagggccgcctgtacggcggccagtccaggtacgcccgcgggctggccctctggccacgagcacagcgtctgcagagtgcggtagccgcagccccagccgcggtcgtccaggccgtcgcagccgtagtggtagtagaggtagtggcccgagagcagcgccaggcggacagggccgcggctcggcggggacaggcccacgtggacgtccctcagcggctccagggcggtgggcgggagcggaggtcccaggccaggcacagcgtcctcctagcggcgcggagcgacctcaggctccaacacttcctttcggctccgggtcttgggccagctgccgcaggaccggcgcgcagactggggacgcgctccccgggcctcgttgatcaccgcaggccgcaataggcagccaccgaccggcaccgaccgaggagctcccacaatgctccgccgcgccccgccccgcccctcccctcccctcccctcccctcccctcccctctcctcccctccgccgtgccagctagcctgcctgcgggcctcattacgcaggcgcgagctccgcccggcagggcagggctaggggttggcctttgccttgcgcccgcctcggagctcgcctgtttcttgccctccagccccgctcctgcatagactcggcccccgtgattccggcgttctgcctctacccctggctccctagtcgcgcacactcccgtggctgtaacagtttattggcagcccagaggggcgaaggcaccgcgggggagggagctcagcctgagacatgcagaggaccgggagccccgggggacgtcggggtggggtggggatgggcagagtctggggctcgtctgtgttatagcccagccctgaaataaatagtatatacagctagggggccgggcggagcggaggacatgggggtcccgccggggtcacaggtctgagcagcgatcctgcttgctgtagtggtcgaactggttcttccagtgcaccatgtaggagctccagcggtggaactcggccttccactggcgctccgcctcgtcgagcgtgtctgcggccagggcgcccagcgaggcgggaggggaggacggcacgaggaaggtcggggatcggacatttgggcgggttgaagggggggtatgagtgcagggaggacgcacggagaaatgcaggcgaccacgtgggacggtggcaagaggatcaggagaatgtgcgaaagacgagagggaggatgagggcagaggcggggccggagaaggacagcaggaaggagagaggaggagaaaagaatgaccggaagacgggaacagaggggacaggagggggaggttgggggaaaaagaagagacagaaatggttgaccgttatagccccaatggggggtgctaccccgtccggggcctcccacttccccccaatgtcaggctcaggttccaaaagataattttataaaagaatactggcttttccatttccattcaaacaacaaaggcgtgggggtccctgagaagggtgggaggcacggccccctcctcctgccctgtccagtgtgagtctctcggtttgaggaggaagggagcactaggtctgagatccctgagtggggcccttccccacggtccgaccactcattagaggaggggcccctgtggccgtaggggaagaggccgtgttcacagccgccggaggtgggagaggaagaggaggagaagctggtggaggaggaggaggggcagggggaggccgggcctccgagcagcctccccatgggtgaagcctgggcaggtgctgggagcctccgaggctagggggagaagagaggggttacacctggcgggctcccactcccctcctcccagccgctgcccgctggcccctgcataccggtggcgctgagcaatttggggaggaagcggttccagaaggcgcaggcctgggcgcgcagcccccgccgcacctccagcggccgcaggtccagactaacgtactgctgagcccccgccgtgtacgggggccattgtggggccttggggtctcggggctcattgggatccctgcggaaggaagggaaggctcagtccagacgggcagtgggaggaggtggcccccaactccacgggatcccggactcttcagctcagcggagagccccagagaacccgtcccctccctcccaccactttctccaatgtgcgcggtcattggggtcttcccttcctcaagcgctccgtctccttccgtttccctcagcttttctgttccatctttgtttctctcactaaaaaaatggctaggatgtcttgagactttcctaaataaccaggacgggtcctatgtctacaaacatcacattttttaacaacacccatccaatgctagatttcattgtcctcttctcgatccaggtaaactggtgtgtgtgtgagagaatgtgtcactgctagtgaatcatcactggtttgacttaatccagctccaactcctttgtcttggtctcccttttttttttttttttttttttccagagatagggccactcaggctggagtgcagtggtgccatcatagctcactgcagcctcaacctcccaggctcaagcaatcctcctgcctcaccttcccaagtagctgggactagaggcacgagccaccgtgcctggctaagttttgtattttttttctttttaagagtcggggtcttgttatgttgtccagtctggtctcaaactcctggcctcaggggatcctcccaccttggcctcccaaagggctggaattacaggggtgagccactgtgccccgccccctccatgtctacctcgtctcctcctcactttcctttgcctctgtctctgcaagaccccctctgccttctctgtctcctttctttttctctccccttttatctactttgtgagcatatccctctctggctgttctatcctgcccctgtcccacccgtcctttctgtctccgtgtgtctgcctttgtgtgtcctcccgcccccgactcctgtcctccccagccttctctccctctgcactgctgaccctgtgcgggcaaagttggcccagtatcgcatcagtcgctgggcgaagattttctcctctgccgtgtagtttcgagaggggtccagggggatcccaaagatgaactcgatctcgtagccgtggggcacccccatccacaggggccaggagagcgtggaagcacggtgttcaaagacgtaggcgtagacccgggcaccctgggcagccagtcgcccagccagctgggccacggggcacacgacattgtggtcgcccaccacatcgctcagggcctccctcaggcgtgccgggtcctcgggatgcagccagtctgtgtaatgcaggaccacagcctcggctgccaggtcacttacctggggaaccccgacccgcaccccggccaggaactcggcccggctgatgagagactcgttgtctttgctgaagcctggggccccgtaaaccagaaaatacgagccctcatccttcaccacacccaccagcacctgggggtgagggagaggggggtgggatggagcgacaggcacagacagacaagtagacagaaacagatggacagacaaagagccagagagatgaacagttacagacccggaaccatggacagagagaggacgagatcaggggagggatgcagagaaagagaaaatagacccatggtggctttcctgtctgccctgctgaccaccctgggatctgagccctcagggaggacttctgggacttctgggaatgggcctggagaagccctcatgcctgggtccctgcagggaggggagggaccgttgggacccagaggagccagcttcacgccagctagccactagttacctgcaggccgtggaagtctcccgcgttgatgagggcctctggggtgtcactgaggaagtctccatctaccacaggcacgaaggagaaccggaagacgctttcttgaggcagcacgtgccattcgtggttcaccaggacctgcgctggtcgtgtccgaaggcaggctaccagctctgtgtcattcccaccagtgccgcctggaggacagcccacaaggtgggccagctgcgtggccctgcgacgggcctctcccatgcccaccgtggcccagggtccattgggggcaccgctctgcagcacggccctgtggaacaggccccggctgggcggggacagcaggtgcatgcccaccgaggcggctcccgcgctctccccaaacagcgtcactgatgtcgggtcacccccgaaggctgccacgttctcctgcacccactgcagggccagcctctgatccaggagacccacattgcccggggcctctcggctccccggcagggccaggaagccaaaggctcccacccggtagttcatggacaccagcacagtcctctcggcctgtaccaagaagcggccatcgtacacgtccaaggaggaggccccactgtagaagccacccccatagatccagacgaggacaggggtgggggatgtaggccgggggtatggtgtccacacgttgaggtacaggcagtcctcgctcagctcacggttggggttccacatctcggtgccctcaaaacctgggtatagggtgtccacatattggtagcagacactctggaaggttgtagcgtctaccacccctgaccaaggctgcttgggctccggtggcagaaagcgacggggtcccatgggtggctccgcaaaggggatgcccaggaaagcagagacagggcccccgggggtcttcaggcgaatgccccgcagccggcccccacgcaccgtcaccagcagctctgcatcctcccggccctcagcccccactcctccacccaggagccagaggaggaggagaaggagtggggaagccagggaaggcgtgtgcagcagacactgcgggggcctcatggctgcagggcaggcggcgtctgctgggagaaagaaagggaaagggtgaagggtcggtcgagaagccaggagggaggagattagggcactgtcggcccaagggttatcgctcagctgcagaggaggtggggcaggttggcaaagatgaggggagagagggagggagggaaggagacaggcagagacaaggacacaggccagcgggcaggaggggaaagagatcaggcagacacccatatccagacaaatgcagggaacagagaggagcaccctctctgctccgcaggggtccactgccctcacctcttcccggaactgggccgggcccagctcgtgcagtgagggcaccagaagcctcagtccacgaacaggccacccgacaggggcgcggcctcacggacgggcagcgccgctgggggagcttgcggcggcctgaaggcgcagccccgctctcctgggtcggccagacccggggccctggggggcggtgggctgggcattcagggtgtggaagcctcaggtcccggggtcccccaaatcctgcctagtccactccccacccaaccctgccccttctcatccaatgtctggcaccgagcgctgatgcccgcgggttcccatcagctgcgcacgctcccagcccagccccagcaaacaggctcgccagcccgcgtcccccaggactcgagagccccccatccgtctgaagctgccgtgcacgccgccgccggcggagggcagtagagaccgagaaaaggtcggcgctccccgccccgagccaggagccgggaacttggggagggggcctgggggctcgagggccttgcagagccgcctgaagggcgagccgggacgcctgcgttcccgggactccggagatccccggctgcaggggcgggggcgctattttgggggcagcagctgctacggttccggcatct

SEQ ID NO: 97619 - DNA, 17946 bp, Homo sapiens
cacagagcgagactccgtctcaaagaaaaagaaaaaagatgtgagcagggcatcgtgggttacataagacttaggtagggatagagaaggcattctgtgtgatgaggagggggataggcacgaaacttgcacatacctgggacagtgacaagacgggtctcactaaagcacagaaggcatcttgggaatcactgaggtatgaggtggtacaggtgggcacaagcttagagaggtgtagatttggggaagagtcactgcaggttctggaataggagaaggcaacccccaagaggtgactgagaatgtgtcaggagccttgtgcagaggaggccaaggaggggagcccgccaggaggctgttgagtgatgacagcacttgagacaagcgcctggtgctgcagcgagaatgggaaggaatggatacaggagctatttgggaagaaaatgaatagggcctcaaaactgattagatgtagaagagaggggtataagacagaggtggctctggaagaaagatatctcacacctgtaatcccagcactttgggagaccaaggtgggtggatcacgtgagcccaggagcatgagatcagcctggacaacatggtgaaaccctgtctctagaaaaaataaaaaattagccaggtgtggtggtgggtgcttttagtcccagctactcgggagtctgaggcacgagaattgcttgagcctgggaggcagaggttgcggtgagccgagatcgtgccacaacattccagcctgggcaacggagagagactctgtctcaaaacaaaacaaaacaaaaaccacactcaattggaaacgtctagctggcaattagattctacctgggaacatggttgaacaaacagaagtagagactgaaaagcaactctgagaagtaggccctgtggtagacaggggatgaagaggtgcctctaagacaggccgtgcacccctctaacactgtcccagaagccacatgagaaggaagttccaaatggggtgggtggtagggttaattgatggtgtgacaatgtaagatacatttactactgacatggaaaagatagtcatgccatatttttaggtgaaaaagacttttatgaaatggtttacatagtaccatttatttttatttttatttttattttattttcaagatagagtcttgctctgtctcccaggctggagtgcaatggcgcgatctcggctcactgcaacctctgcctcccaggttcaagtgattctcctgcctcagcctgccaagatgggattacagcgcccaccaccatgcccggctaatttttgtatttttagtagagacggagttttaccatgttggccaggctggtctcaaactcctgacctcaggtgatctgcacaccttggcctcccaaagtgctgggattacaggtgtgagccaccgcacccagcctctttttatttttattattacttttttgagacatggtctccactgcttcccaagctggagtgcagtgacacaatcgtagcttgctgcagctttcaactccagggctcaagagatcctcccgcctcaacctcccaagcagctaggactacaggaatgcgccactacgcccagataagtttttgttttttttgttttttttgttttttttttttttagagacagggtcttgctatgttgcccaagcttatattgaactcatggctttaagcaatcctcccacctcagactcctaaagtgctgggattacaggtgtgagccaccacacctggccccatcccattttttgtttaaaaatacacaacttgcccatcatggtggctgacatctgtaatcccaactactcaggaggctgagacaggaggattgcttgaggccaggagttgaaggctgcagtgagctgtgatcaccactgcactccagcctgggtgacactgagaccctatctctaaaaaataaaaaatatacaatttatgtgtatttgtttgtttagccaacagtgaagaatatctagcaagatgttaatagtagatggtgggatttccaatgattttaaaattaattttttgcttgccaatgtttcataatttttctagaatgaccataaattacttatcagtgtcttcagaattaaagcgctaacaggctcaggagaatgagggggcagaagacgccctgggatttagccactgagaggccaagtgcctctagagagagcatgtcagtaatgtaatagagagaaaagcgagatcccagggaggtgctggatagactggctgtgggaaggaacagtaatgtggtcagcctcagattggtcatgtaaccaactctgctgcttaagagagagaggcaggaagcggcaggaagcaagtagaagcttttttttcaaaaacagggtggccattttggaaaagaattatgtgataagttgaaaatgctaggctaagcatttcaactagctcacacctgtaatcctagcactttgggaggccaaggcaggtggattgcctgagcccaggagttcgggaccagcctgggcaacatggtgaaaccccgtctctactaaaatacaaaagaaattagccaggtgtggcggtgtgcacccatagtcccagctactcgggaggctgaggaaggagaattgcttgaactggagaggcggaggttgcagtgaactgaaatcgtgccactgcacttcagcttgggcaacagagcgagactccgtctctacaaaaaaaaaaaaaatgctagaggctgaggtgggaggcccggagttcgagatcaccatgagcaacatagtgagacactatctctatagaaaatttaaaaatttaaaatttaaaaattataggcacatgccgggtgtggtggcacatgcctgtattcccaactactcaggaggctgaggcagaagaatggcttgagcccaggaggtcaaggctgcagtgagctatgattgcaccactgcatttcagcctgggcaacagaatgagaccccatctctaaaaaaagaaaagagaaaataaaaatgctagagtggaggctgggctcagtggttcatgcctgtaatcccagcactttgggaggccaaggcaggcagatcacctgaggtcaggagttcgagaccagcctggtcaacatggcaaaaccccttctctactaaaaatacaaaaattagatgggtgtggtggcaaggacctgtagtcctagctacttgggaggctgaggtgggagaatcacttgaacccaggaaggcagaggttgcagtgagccgagatcgcactgctgcactccagccttccgactctgtctcaaacaaaaaaaaaaaaaagaaagaaagaaagaaaagataatactagagcaggaagggagggatagtggaagggaaagtccttcctcagggtggtgttggggtctaacctggaattgcacaagaagcaagtctccccgaggctggcaggcaggatgagaggctggactggcatagacgggtgggctgagaatgaggggtacaccacagcaggccctgggctcaggcaaggagctgattttctgggggcatagatgagataccaacagaagtgcaagaccctatgtgaccagttagagtatgggggctgcaggggtcagcagggcagacctggggcgtgggacagtgctggctcccatttcctcctccccagttcattctgccccgagccttccagtcaaccttttcccaccccagcccccccgtcccttggtgctccctgctcagggaccctggccgtgtgtccccaggtttgttacctgcagcggcccatcaccctgtggtgcggcctcaaccactccctggtgctgagccagagctcagagttcagcaaggagctgctgggctgcggctgtggggctgggggccgcctcccaggctggcccaaggggagtgcctccttcgtcaagctccaagtcaaggtcagagcggggtcaggagagtgggcacccagggaggatgagagccatgaaccaggaagcccacaggctgtagctggggctcctgcagggacccagggggtcccatttccctagcaccaccccacctccctcctctgccgcacaccacgctctctgctttctcccttagcagactgtgctggccttgcccaacctcacacacccctgggacttagccggctcagggctggtgtgagagggaagaatgcaataggcagattagcccgggcaccctgggaaaccctgcaaggaaagcaccactcagccatgccccctttctctcctcctccaaggtccctctgtgtgcctgtgccctctgtgccaccagggagtgcctatacatcctgtccagccacgacattgagcagcacgccccctatcgccacctgccagccagcagggtggtggggactcctgagcccagcctgggggccagagcaccccaggaccccggggggatggcccaggcctgcgaggagtacctcagccagatccacagttgccaaacgttgcaggaccgcacggagaagatgaaggagatcgtagggtggatgcccctgatggccgcacagaaggacttcttctgggaggccctggacatgctgcagagggctgaaggaggcgggggtggtgtagggcccccagcccctgagacctaatccccctcatgctagcctagtccctggaggagggagtccggccccaggccagggactaaggagcaatgaccattgtgcacatgcgtgtgggaaggggttgctagggggtggggacggctaaccagggtaagaatgttcagggggctgcccaggaggggcccccaacctgactatcatggacaagagatttgatggatagaataaaaggctgcagcgaggcctggtgtggaagccttgggggctgggagggacaggggcagggatggggtgggtgggtgcccggcttggtgggtgcaggagggcaggagcccaggcaggggcaggcagcacaagcagctccaggtctcaggtgcagcagagctgatgctgcctgaacccttcacattgttgtccactccctgctcccaagagcacacctggtcgtttggactgggaagttctggccctaccttctggaacaactctatgcacagatgctcttggctaccccactgggatcccctgcccactagacttgtccccatcctgaggcagcctgttcctcctgacccccgaaagcttcccacccatctcccttcggcctgaagccagcccccctcctctctcccttctgtttacctcccaggtttgggctctattttctactccttccacctcttcctgagtaacaaggacactcccttcatccacaccccatgcctcctgccttgcttcctgtaccttcaagtagttggaagaggtcatgggtgagaattccttctccttggcctagtctggcccaggtctggagagaaggcaatggagatgtgaagtggaggccaggtgtggtggctacgcctataatcccagcactttgggagtccgaggtgggcggatcacctgaggctaggaatttgagaccagcctggacagcatgctgaaaccctgcctctactaaaaatacaaaaattagccaggtgtggaggcatgcacctgcagtcccagctactcgggaggctaaggcacaagaattgcttgaacccgggaggcggaggttgcagtgagcagagatcgcgccactgcactccagcctgggtcacagaatgagactctgtctcaaaaaaaaaaaaaaaaaaaaaaagaaattgaagtggaaaatgagctggcaggggtggtcaggcagggggtgagcaatgagggctcctgagctgaggaagcaggggcggggggaggatgggggctagggagtcctcagaagttcccggagatactccctcactggacagagtggggttcccgatgacgttacttgaggcctgggagacggcctctgcccctcactgctcctccccctcctaaggtcaacatttatgtgtcctagacctagagaggtcccaggacacgccactgtcccgccttccccattgcccgccccactggccagtccccacgcccacacacccaaggctgccccatctggcgctgattatcctgctgctgccgccaccgctgctgctgctctgcaaaattcagctgctgcctctgtcttgaggaccccagcgcctttcccccggggccatgctgcctgcagccacagcctccctcctggggcccctcctcactgcctgcgccctgctgccttttgcccagggccagacccccaactacaccaggtaggtctcttggcatcttccagacagctccagtgaacttcagacccccgattcctttggggttatgcctggagatattttgggttcccttgctgacacaccactccccagattccccaccgcctcacccttctctggcccccaaatcctccccatctgctgcaagaccttggtctcctgcaggccaccactgctcccattcccccaccttcgtcctctggtctcttaagtctccccacccacccagatccttgaccccccatagaacccaagagagagccaagctcctgaacttgcctggtagctggattccaggaaggaattcgagagggattgtagggggaggagggggcagtgagtggagacttgggagtcagaatctgaagtagtttggaacaggggcagggctaaggtgtggarctcgcggagcctggcctccaggttcaatcagagggccatcgccactgcagctccctccatctctccaccccctccccccyaccgcctcgtggctgtgtccacatctggaagtagttaggcggctcctgtccctggactgccaggcagagtgaggcgggagtctggaaggggggccgaggaggattccgggaattcctgttggggtgggggtggggactcttggggttggagggatggtcgagttgccaggcccacttttcccttatctttgtgggagtctgggacaccccagccctgtcctggctggtggaagctgccccaggtctctcaaggcctttccatttcatcccccagcttccctccttggagtttcatcctcatcacctcatccccatcttgccagtgctcccccgtcccacccgtccctgctctttcctgaccccttttctgttctccagacccgtgttcctgtgcggaggggatgtgaagggggaatcaggttacgtggcaagtgaggggttccccaacctctacccccctaataaggagtgcatctggaccataacggtgagaaacccctctgggcactaccccttgttaaagtctcagaggcaaaaaggcctgactgcgaagggaccccccccccgtcccccccgcaccaccttctcaacctggggcagctccaagtgtcttccctctgtcactgaaggcatcattcccaccgtaacacgcatcatcttaacccttccctcaaatcttcattctccagtccccggccctccctcctcttccaaagcctcagctcttgtcccctgcacaggctaccagcagagctgcagagaccaggccctctgctctgcactcacatggaggccccttcccattcagtccgtttctgcaagaaacgcttggggcaggggagctgccctctggctgggttgtgtggggcctgactctgtgggtccccgcctctgtccccgctatcaggtccccgagggccagactgtgtccctctcattccgagtcttcgacctggagctgcaccccgcctgccgctacgatgctctggaggtcttcgctgggtctgggacttccggccagcggctcggacgcttttgtgggaccttccggcctgcgcccctagtcgcccccggcaaccaggtgaccctgaggatgacgacggatgagggcacaggaggacgaggcttcctgctctggtacagcgggcgggccacctcgggcactggtgagaactccctcacctccgccttccccccctccaggccccgccccggccgcagccccgcccccagccctaacytccgccccgcccaccccgcgccccagtgcctagggccccctacctccctgacccattttcctcactaaccgccccttcagtccctcctccccgtcttctctcccctcctcccgcacccacccatccctcttccagggccccccccaggcgcgaggcggaaatgggtcaccgacccgcgggtggaatgggcggcctggggttactgggacggtgagtaactgccggcccccgtccgcaatcgggctccctccgtcgggcgcgagggggcaccccagggctggggggactaggttcctccaaccccggggggcccctacacccagccctgggctcccgattgcggtcccatcaccccctcctggcggcagaagtctcccttgcaatgtttcaggcggggacctccctaaaggggtcctcgggggctgtgccccaagtcgaggacaccctctccagcctgaaaggggactctgctgcagggccggggagatgggatctcctaggggaagaggcgcggtgcggccgcgggtcggggaggggccagaagggggcgtccagccagttcctcctcccgcttccaccgcccgccagtgcgccctgcggccccagacttccccgagccgcgctcctcccggccgctctctgttaacctgcccccatcttacctccccttcttctcgycccctcatcctgagccccagacatccgagctgcctgccggggctcccagcctagagttctcctgaagctgaccgagggtctccaccgccccccacccccgctcctctctcccctccccagagcaccaattttgcggggggcggctggagaaggcccagggaaccctgaccacgcccaactggcccgagtccgattaccccccgggcatcagctgttcctggcacatcatcgcgcccccggaccaggtaccgaccctcctccccgggctgccctaggggacccaggcggcgccctccagcttgcagccagcagagatttattgaagatctgctgtgtcccgagcactgcgcttgcgctggtgggcacccaaaacagccccaacccctgcatgcacgcaaacaaaaatgtaaaaattacaactgagacaagtctcaggagagcgaggtacagggtcctggtataacacgcgggcctgtcacttgtgagtgcgccaggacttgaccttgccaaccacgacgaccgacacccctgcagggtcccatgggtgtgtgtggtcctccgtgctgtggtgtgaacgccttcaggaggggggcccagaggacgcgggaggtgggagtgggagytgctgcaggcacccagtaggagatgaggtgcaggcgcccaggggtgtcccgccgcgcagtccccgcctccgcccgccgccaggtcatcgcgctgaccttcgagaagtttgacctggagccggacacctactgccgctatgactcggtcagcgtgttcaacggagccgtgagcgacgactcccggaggctggggaagttctgcggcgacgcagtcccggggtgaggggcgggacctgggcgagtccgggagagagtcggcggaccgcacgcacgcggctgtttggaggggcggggttcagctaaagggacgggatctgaaccccagggctccaaaccggcgaggggagcaggttggaggccaggcaaagaggagatttggccccgggtctggggtccgcggatagagaggcgactggggctctgcgaagttgggacgaagttaaaaggccacctggccaggggtagtggctcatgcctgtaatcatagcactttgggaggctgaagcgggaggatcacctgagcttaggaattcgagaccagcctgggcaacatggcgcaaccttgtctgtaccaaaaatacaaaataattagctgggcatggtggcgtgcctgtagtcccagcaacttgcggggctgaggcaggaggattacttgaacccagaaggtcaaggctgcagtaagcctagatggagccactgcactcaagcctgggagacaaagtgagaccctgtctcaaacaaacaaaaaaggtcatggggctgagaagagtgtggtgsacgcccgccctgacacttcccccaatgctcggtggccacctgcagctccatctcctccgaagggaatgaactcctcgtccagttcgtctcagatctcagtgtcaccgctgatggcttctcagcctcctacaagaccctgccgcggggcactgccaaagaagggcaagggcccggccccaaacggggaactgagcctaaagtcaagctgccccccaagtcccaacctccggagaaaacagaggaatctccttcagcccctggtgagtctgggataggggaggaaggggaaacagactgaagggggccatttcaaaaagttctgacctgggctgtggctcacacctgtaatcccagcattttgggaggtccagacagcaggatcgcttaagcctaggagtttaccatagcaagaccctgtcttttcaaaaataaaaaattaggctgggctggtggctcacgcctgtaatcccagcactttgggaggccaaggcaggcagatcacctgaggtcaggagttcaagaccaccccggctaacatggcaacaccacatctctactaaaaatacaaaaattagccaggtgtggtggtacacacctgtaatcccagctactcgggaggctgaggcaggagagtcgcttgaacctgggaggtggagattgtagtgagccgagattgtgccactgcactycaacttgggttacagagtgagattctgtctcaaaaaaaaaaaaaaaacttagccaggcgtgtggtcatagctactccggaggctgaggtgggaggattgcttgagctgggaaggtcgaggcttcagtgagccatgactgtgccgctacactccagcctgggcaacagagcaaaactccatcttaaacaaacaaaaaagttcttccttggctacattcactcattgattcatctggtactcactggtgcctccttcctgccgatgacccctactgggtgctaggacyggaagcctgacagagctctgaacagttcaagtcaatgaggctgttatggggacagtgctccctcctacctgctgagcaggtcaccctccaccctcctccctcctagatgcacccacctgcccaaagcagtgccgccggacaggcaccttgcagagcaacttctgtgccagcagccttggtaagaatacccccaaccccattccagctcctcgaaccacctcctgcttctgtttccagtcctgccatctggaacctcccatctcctcatctctcactcccattctcccacagtggtgactgcgacagtgaagtccatggttcgggagccaggggagggccttgccgtgactgtcagtcttattggtgcttataaaactggaggactggacctgccttctccacccactggtgcctccctgaagttttacgtgccttgcaagcagtgcccccccatgaagaaaggtaacagagatgtggggaaatggggatgggtcaagctaagccacacagaaatgatcaaggtgtggaatcttgagacctgctgacaggtctcaagaataagagatctcaacccctccctccttcttccaggagtcagttatctgctgatgggccaggtagaagagaacagagrccccgtccttcctccagagagctttgtggttctccaccggcccaaccaggaccagatcctcaccaacctaagcaagaggaagtgccccyctcaacctgtgcggsctgctgcgtcccaggactgagacgcaggccagccccggcccctagccctcaggccttctttyttatccaaataaatgtttcttaatgagraatgggtcagatctccatgcttatggtattggggtccatcttgaggatttcttttcattaattaattaactcaacacatatttactatacagaataatcgtttaagaatgtggccaggggtggctgctcacagctgtaatcccagcactatgggaggctgagtcaggaggattgctgaggccaagagtttaagaccagcctgggcaacatggcaaaaccccctctccacaaaaaaaaatacaaaaattagccaggcgtggtggtgcacacctgtagtcccagctactcaggttgaggtgtgaggatcgcttgatcccggggaggtaagactgcggtgagctgtgactatgccactgtactccacctgggggaacacagtgagaccctgtctcaaaaaaaaaaaaaagaatgtaagtcacaggccaggtgcagtggctgatgcctgtaatcccagcactttgagaggctaaggtgggaggatcacttgaggtcagaagtttgagatcagtctgggcaacatggccagattctgtctttacaaaaaataattagctgggcatggtggtactcatctgtggtcccagctactcaggaggctgatgtgggaggcttgcttgagcccaggactctgaggctgcagtgagctatgatcacaccactgtactccagcctgggcaaaagagtaagactctgtctctaaaaaagtaaaaagaaaagatgtcatgtcttggcggggcgcggtggctcatgcctgtaatcccagcactttgagacgccaaggcaggcagattacttgaggtcaggagtttgagaccagcctggccaacatggtgaaaccccgtctctactaaaaatacaaaaaaattagctgggcgtggtggcgggcacctgttactcaggaggctgaggcaaaagaattgcttgaactcaagaggtggagattgcagtgagctgagattgtgccactgcacttcagcctgggcaacagagtgagactccgtctgaaaaaaataacataaaataaaaaagaaaagaaaatatgtcactcttttttttttttttttttttgagacggagtttcactcttgttgcccaggctggggtgcaatggcgcaatctcggctcactgcaaactccgcctcctgggttcaaatgattctcctgcctcagcctcccgattagctggaattacaggtgcgcaccaccacacccagctaattttgtatttttagtagagatggggtttctccatgttggtcatgctgctctcgaactcccaatctcaggtgatgcacaccccttggcctcccaaagtgctgggattgcaggcgtgagccaccatgcccggccgattatgtcacatcttgtccctcctttactcaaaactttcctgtagtttcctaagtcttaccaagggttcaaggccctatatcatctgcattctctctcctgcctcgtagcttcatgtctattatctcctatgtatcatctgttccagtcacattggcaacttcagtttgttgcccatttctttttttttttttttttttttgagatggagtctcgctctgtcacccaggctggagcacagtggcatgatctggctggactgcagtgcagtggcgatatctcggctccctgcaacctccgcctcccagattcaagcgattctcctgcctcagcctcccgagtaggtgggactacaggcatgtgccaccacgcccggctaattttgtatttttagtagagacggggtttcaccatgttggtcaggctggtctcgaattcctgaccttgtgatctgcccgcctcggcctcccaaagtgctggaattacaggggtgaaccaccgcacccggccttgttgcccatttctagtacacttctgttttaggcctttgctatttcctctatccagaattctctcccatagacatatctcatggttcacttcctaaatccagtcagatctctgctcaaagttcatcctagtcactcattcatttgttcattccaaatggtaggcactgtcataagtcctaaagatacaacagaaaactaaacaaagtccctgctcttgtgaaaaggaaaaaacattctactggaggagagagaaacaataaaataggaggtcatgtatcactataagtgctattaaaaaaacaaatacagggcagggagcggtggctcacgcctgtaatcccagcactttgggaggctgaggcgggcggatcacaaggtcaggagatccagaccatcctggctaacatggtgaaacatcatctctactaaaaatacaaaaaattagccgggtttggtggtgggtgcctgtagtcccagctactcgggaggctgaggcaggagaatggtgtgaacccgggaggtggagcttgcagtgagctgagatcgcgccactgcagtccgagattgcgccactgcagtctggcctgggtgaaagagcgagactccatctcaaaaaataaaccaaaccaaacaaaacaaaaaaaacaaatacaattagccgggtgtgaagtcgcgcgcctgtagtcccagctactcagaaggctgaggtgggaggattggttgagcgcaaccaagcaggtggagactgcagtgagctatgattgtaccactgccctccagcctgtgtgacagcacaagactgtctcaaaaaaaaaaaaaaaaaaaaagaaaaagaaaaagaaaatgtaaaagagaacacggggattctacacaagatgttcagaggagactttcagataagatcaactttgtctttgctccattgctaactgggtgccctcagagacccagattcttcaccttatccaggctgtaaaaggagttgaagattcgatgcaattaaagtggcagggtttagcaaatccttttttaaaatatataattactcaaacaacatgggtttgaaatcagcaaatcttaattccctgtgcaaatgtgagtgatttcccacgtccctcacaggaaggtgagaaacaggaggcaagacttagtctggagtcccagatgggaggaacctccaacccatagaaaacagactttgagcctggggaaggaacagtggctctcatgcactttgggaggcttaagtgggaggatcgcttgggcccaggagttcgagaacagcctgcagaacatagcgagatcgtctctacaaaaaattacaaaaagccaggcatggtgatgcacgcctgtaatcccagctactcgggaggctgaggcaggagaatcgcttgaacccaggagttggaggctgcagtgagcaatgatagcgccactgcactccagcctgggcgacagagtgagactctgtctctaaaaaagcaaaaaagagggcgggcacggtggctcacgcctgtaattacaggactttgggaggctgaggcaagtggatcgcctgaggtcaggagttcgagaccagcctgaccaacatggtgaaaccccgtctctactaaaaatacaaagaattacccgggcgtgatggcgcacgcctataatcccagctactcgggaggctgagacaggagaatcgcttgaaccctggaggcggtggttgcagtgagccgagatcgtgccattgcactccagcctgggtgacagagcgagacttcgtctcaaaaaaaaaaaaaaaaaagcaaagaaaacaggcttggttcctgcagaggcttctagagcctggaatgaagaggaggaaaagggcttcccggtgggagattgacttggaccatctcaagaatagggaggaaagaacaaagcccagttcgaaaccccgcccccggttctctgagttacttcagggctcgagttcgagccagtacaactgttacgtcaccggaatccagccaatcgcagacgacagaaggagggcgttgtttggtctttcagcacaccaatcggcgtatagttacggcagaaacaaagacgtcctagccaatgacagaggccgtacggcggaagtatagaaaaggactctctggaacatggcaacattaatctgaccacaagctgactggcaggtgctttaaccacaaggtgggcatcctaacgcgagcgaccgttttgaggcagaagcccgatggggcccgtgtccgagcttagggaggggccggagacgcaaacacaggtctcccaggaagcaggcggcgtcacaggtcgctctgcaggcgcccgctgcagcgggcggagtctggctggagagaggaggcgggcgtccgggaacgcccggaaggggcgaggccagcggcggggcggggcttatggagatcgtgagctgggcgtgaggagaaggccgggttgggagctgcgaggggccgggtttagcggggtgggcgtggccgtcgaggtggggctcggcgggtccgaaggaacctggggcagagctggaagaggaaaggtcttgggggccctgggcctgggtctgcgggagccccatctagcggggttccaaggcggcggcggcatcagtcgaggccctgctccgggagctcatcttgtcccctttcgcccctcacgccccccagctctgactccaggccctgtcccctgagctctgccctcggatgtccgaccgcccagagcctgcatgcgccgtggggcgccccaggaccaggagctggtgggtccggggccccctgggcgggggtcccggggcgcccctcctcccttgggacccgttgtcccggtcctggtctttcccccggatctagtattcagggcggaccagcggagcggaccccgacagctgctgaccctctataaccccacaggaactgcgcttcgcttccgaggtaaagggatcggcgcctcgtgggggctggtggccggacactggggggttgtgttggctggaggagtcagatgggtagggttgcacgtccagctttggtggactgggaaagtcatgtccagcctccggggcagaaggcagaggggacttaaatgacccacatggcagggcttgtctgtgtgtgtctctatcccccagtcctgtgcacagcacctgccaaatacacggtgtttgacgcagagggatatgtgaagccccagtcttgcattgacatgtgagtgagctgggagggtggggaggcttgtggaagccaggggtcgctgccacctgttgtctgaggtctgagaccttgccccctttaacctatttgccctatcctctgcctgtgcccctaagggagagacttctggggggaggcccagatttccttggattactgcctcattcaccccaatgggcttctctcctaccttgggaccagtgtgattcgccatgtggcacccattcccagccactatgatgtccaggaccgcttccgcattgagctgtctgaggaaggagctgagggccgagtggtgggacgcaaggacattacctccattctgagagccccagcgtacccccttgagcttcagggacagccagatccagcgcctcgcccagggcctcctgctgggacaccaccacccacggccagacacttccaggagcgtgagttgggagactgggatcttgagttctgtagggagggaggaactagcatttccctagagatgagataaattggatttgaagaagtctcctggttcagtcttttgtcttttggtggaaacattcctccgagttgagattttatatcaggtgagggggaaaagacttacagcttccctggtttctgacttctacttagaggaaaaagttcttccttgactgtaaccgcagtacttcctatcatgtggtagctcagttcagttcaataagaaacctgtattgagcaattaaccctgtaccaagttgtgtgctgggtatgagatcaagagaggtccctgcctgtcggataggtccacagaagagagaaaatgaatgctgagggactggaggagagagttcttgtggtggtggggacagaggctgtaggaaggagaggacacttgcagtgtacccctggagggcagtaaaaagtagatacagggtgtgatggctcacgcctataatcccagtgct

SEQ ID NO: 97620 - DNA, 18486 bp, Homo sapiens
aaaagctttattgaaatgcaatttaccataaaatttacccacgtaaggtgtaagatttaatggtttttgtgtatttacagaattgtacaaccatcaccagaatcaattttagaacattttcaccaaccccaaaagaaaatctactgtttagatatcaccctccaatcctccccaacccctggctagcactaatctgctgtttctctatatatttgcccattttggatatttcacagaaatgggatcataataatatgtggtcttttgtgactggcatcttccagttagtataatgttttccggtttcatctatatagcagcacacagcagtacttcattctttttcttttttaaaattgaagtaaaattcatataaaattcaccattttaaagtgtataatttagtggccgttagtacattcacaacgttgtacaattatcatcattatcaattccagaatgttttcattaccccaaaaagaaaccctgtacccttaagcagtcattccttctcttctcccccttaactcctggtaccactaatttgttttctgtctctatagatttgcctgttctggacatttcatataaatgggctcatacagtagtgcctttttctgtcttatcttcctttactcagcctaatgttttcagagttcatctatgttgtagcatgtattggtacttcattcctctttatggccaaataatactctattgcatggatataccacattttgtttatccattcatccattgatagccatttggatttacacattttggttattatgtaatgctgctataaacatttgtgtataagtttttgtttggacatatgttttaatttctcttgagtgtatacctagctgtacactgagcaactgctgggtcataaggtaactctgtttaatcttttaaggaactgccagtttgttttccaaagttgctgtatcgttttacagtcttaccagaagtatatatgggtaacgatttctccacatccatgtcaacacttgttgtcatctgtctttgattctaaccatcctagtgggtgtgaagtaatatctcattgtggttttggtgtgcatttccttaatgattaatgatgctgagctgagcatcttttcttgtgcttactggagaaatgtcccttcagattcttcgactatttttaattggattattgttattattattatttttggaccagggtcttgctctgtcacccaggctataatgcagtggcgtgatcatggctcactgaagccacagcttcctgggttcaagcagtcctcctgtctcagcttcctgagtaactgggactacaggtgtgcaccaccatggccgactaattttttattttattgtagagacagggccccactatgttgcctaggctggtcttgaactcctgggctcaggcaatcctcctgcttcagcctcccaaagtgctgggattacaggtgtaagccactgtgcctggctagcattctttttacatgctagatacaggtccctgaacagatatatgatatgatatgatatatgatttacaaatgatatatgacttacaaatattttctccactctgtgggttgtcttttcattttcttgataatatcctttaatgcacaaacattctttttttttttttttttttttgagacggagtcttgctctgtcgccaggctggagtacagtggcactatctgggctcactgcaacctccgcctcctgggttcaagtgattctcctgcctcagcctcctgagtagctgggactacaggcgtgcatcaccacgcccagctaatttttgtatttttagtagagacggggtttcaccatgttggacaggatggtctcaatctcttgaccttatgatccgcccgccttggcctcccaaagtgctgggattacaggcatgagccaccgcgcctggcctacacaaaaattcttaattttgagaaagtccagttcatcctgtttttttctttcattgcttatgcttttggtgtcatatgaaataaattattgcaaaatgccacaacttaattttagaacatttctatcatccccccaaaattccctacattgactccctaatcctaccccaggccaatgatctgttttcggtcttttatttatttatttatttatttatttatttagagatggagtttcactctgttgcccaggccggagtgcagtggcgtgatctctgctcactgcagcctctgcctcctgggttcaagtggttctcctgcctcagcctcccaagtagctgggactataggcatgtgccaccacgtccggctaattttttgtatttttagtggagatggggtttcactatgttagccaggctggtctcctgccctctggtgatccgcccacctcagtcccccaaagtgctgggattacaggcatgagcctggcctgttttcaatcttttttttttttttttttttttttgagacagtcttgctctgtcgcccaggctggagtgcagtggcgcgatctcggctcactgcaacctcagcctcctgggttcaagggattctactgcctcggcctcccgagtagctgggattacaggtgtgcaccacgacgcctggctaatttttgtatttttagtagagacggggtttcaccatgttggccaggatggtctcaatctcttgacctcgtgatccgcccaccttggcctcccaaagagctaggattacaggcatgagccactgtacccagcctgttttcaatctttataagtttgtaatcctagcactttggaaggccgaggccagtggattgcctgagctcaggagttcgagaccagcctgggcaacatggtgaaaccccgtctctactaaaatacaaaaaagttagctgggcgtggtggtgtgcacctgtaatcccagttactcgggaggctgaggtaggagaattgcttgaacccaggaggcggaggttgcagtgagccgagattgcgccactgcactccagcccgggcaacagagcgagactccgtctcaaaaaaaaaaaagtttgttggtgcactcttttgccccttttcattgctaaatcattggctttgaccaactgatggacattttgattgttttcagtttttagctattatgaacatttttagctactatgagtatttgcaacaaatctcagtgtggacgtatgttttcatttctcttgggagtattctttggagtggaattgctgagtcttatggtaaatttgtgattgacttttttttctttttttttttttgagatggagtcttgctctgtcacccaggctggagtgcagtggcggggtcttggctcactgcaagctccacttcctgggttcacgccattctcctgcctcagcctcttgagtagctgggactacaggtgcccgccaccacgcctggctaattttttgtatttttagtagagacggggtttcactgtgttagccaggatggtctcgatctactgacatcgtgattcacctgccttggcctcccaaagtgctgggattacaggaataagccactgcgcccggcctatgattaactttttaagaaactgccaaacttttctgaagtgagtgtactattttatattcccaccagcagtgtatgagggttcctcatacacatcctcaccaacacttggtataatctgtttttattgtagtcattttatgtatgtatgtgtatagtgtttttatttttatttatttatttttgagacagagtctcactctgtcacccaggctggagtgcagtggcatggtctcagctcactgcaacctccgtttcccaggttcaagtgattgtcatgcctcagcctcctgagtagctgggattacaggtgtctgccaccatgcccagctaatttttgtatttgcagtagagacagggttttgccctgttggcttggctggtctcaaactcctggcctcaagtgatccacctgcctcagcctcccaaagtgctgggattaaaggtgtgagccaccacgcccggctgtgtgaagcgtttttttattttttgagacgaagtctcgctgtgtcacctaggctagagttcagtggcaggatctcggctcactgcaacctccaccttccgggttcaagccattctcccacctcagcttcccaggtagctgggattacaggcatgcaccaccatgcctgcctaatttttgtatttttagtagagacgaggtttcaccaagttggccatgctggtcttgaactcctgacctcaagtgatccatccacctcagcctcccaaagtgctgggattacaggcataacatggcccggccctggccatgtttttaactgtgtttctctaatagctaataatgccgagcatctttttatgtgtttcttagccattagtagatcttttttggtaaaatgtctttttttttttttttggtccatcttaaaattgttttttgttttgttttgagacagggtctcactttgttgcccacgctggagtgcagtggctcaatcatggctcactgcagcttcgacatccctgagctcaggtgatcctcccacctaagtttcccgagtagatgggactacaggtgtgtgccaccatgcccagctaatttttgtattttttttgtagaggtggggttttgctatgttgcccaggcaggtcttaaacttctgaggctcaaatgatcctcccacctcagcctcccaaagtgctgggataacaggcatgaaccaccacacccagctaagattgtttttaaaaatctttttcttgagttttgggagtttttatgtgttagggataccagtcccttatgaggtatataattagcaagtagtttctcccactctgtgactgtgacctttctttttttgaggcagggtctcactctgttactcaggctggagggcagtggtgtgatcatggctcactgcaacctggaactcctaggctcaagggctcctcccacctcagcctcccaagtagctgggtctacaggtgtgttattgtgccagggttaatgttttaaattttttgtagagataatgtctctacaaaagacaccatctttgttgcctaggctggtcttgaactcctggcttcagggaatcctccagcctcagcctcccaaagtgctgggattacagcatgagccacatccagcctatgatttttcttcttttcttttcttttctttttttttttttttgagatggagtctcgctgttgcgcaggctggagtgcagtggggcgatctcggctcactgcaggctctggcccgcggggttcacgcctttctcctgcctcagcctcccgagtagctgggactacaggcgcccgccacatcgcccggctaattttttgtatttttagtagagacggggtttcaccgtgttagccatgatggtctcgatctcctgacctcgtgatccgcccgcctcggtctcccaaagtgctgggatcgcaggcgtgagccacggcgcccggccccagcgtatgacttcttaatgatgtctttgtagtacaagagtttttaattttaataaagttaacttttttttaaattgtacaagcttttagtgctgtgtctaacaacttgttgccaaacccaaggtcataaagctgttctcttacgttttcttttttttttttttttgagacggagtctcactctgtcacccaggctggagtgcaatggcacgatgtcggctcactgcaacctccgccacccgggttcaagcgattcttccgcctcagcctccggggtagctgggattacaggcgcacgacaccacgccctgctaatttttgtatttttgtagagaaggtttcaccatgttagttaggctgctttacgttttcttttagaagttttatatttttggctcttatatttagtttgtgatccattgagttgattttatgtacgtatgtatggtcgcgttcttttctttcctgtcttttttttttttttttttttgcatatggatattcaattctcctagctccatttaatttgaaatgattgggcaggtacttttgagcagtgcaagtacagagcggcactgccagcagactacacgcggtagaaagccgaccttggtgagcgtgttggtgctcgacagtgagcagagaaaggatggacgattacggagcgccctcgtctccagttaccgctttctggaaacaccatccgccggggcggagctgttccgccccggtgcggtactacgactcccagcatgcacctcgcagtcggccctcggtggaagcgggaacccaggaggacctgggggtgtggcagcgaggaagggccgagccacggactgtggggccgaaactcgctcccgcccaccctttctcgaggctgtggcctccgcgrgagccgagcgggccgcaccgccggccgtgcgactgccccagtcagacacgaccccggcttctagcccgcctaagcctgtttggggttgctgactcgtttcctccccgagtttcccgcgggaactaactcttcaagaggaccaaccgcagcccagagcttcgcagacccggccaaccagaggcgaggttgagagcccggcgggccgcggggagagagcgtcccatctgtcctggaaagcctgggcgggtggattgggaccccgagagaagcaggggagctcggcggggtgcagaagtgcccaggcccctccccgctggggttgggagcttgggcaggccagcttcacccttcctaagtccgcttctggtctccgggcccagcctcggccaccatgtcccgccagaccacctytgtgggctccagctgcctggacctgtggagggaaaagaatgaccggctcgttcgacaggccaaggtaacacggttgctggcaccctcggtttgcagcctcaagatccctgaaagcgggtttgcagtggatttaccccaacmgatggggagggactgagcttgaccaaagagccagaaatgactggagaatgcatcccttgccactgctgcaaggggagaaaaaaggattgatcctcagtgacaacccctccctcatgtggcaggtggctcagaactccggtctgactctgaggcgacagcagttggctcaggatgcactggaagggctcagagggctcctccatagtctgcaaggtaggcgggtcctccccaggatggtcagttcccctcttccatagccagagaaacatccgctcctgcgtttttgggatcgatataattactcggggcagggagtcctgtttaaggcacagaggagactggagtggaatcatctttgtacaggcaaatccctctcttccttacacactcacagagtggcatttgaaaaatggtttccaagatggtctgatctggataacttttttgccctttccagactctctgtccaaaggttgggttctttttttaaatccttagctaattggctggagggtrggttctttattgtagctgttttggttggagtggggtgatctctgagttgggattttatttggaggatcttccatgggggagcagtctgtaagaccaacattgttgctccagggctccctgcagctkttcctgttcttcccttggagctgactgtcacctgcaacttcattatcctgagggcaagcttggcccagggtttcacagaggatcaggcccaggatatccagcggagcctagagagaggtgagggccagagattgtccctgattcccctgccatcttcagtctgggtttaagttattgcagggagatgggaggataaacaacatctgtcacctccatggagagaggtgcccttctctgtgctcttcagaccaggttgaggtattattattgtgacctttggggtcctgcaggagaggaaagccagagtgtgtggggagatggaggatgaggtgctacttcagctgtgtgtgtgtctatgtgtgtgtgtatactctacagtgctgkagacacaggagcagcaggggcccaggttggaacaggggctcagggagctgtgggactctgtccttcgtgcttcctgccttctgccggagctgctgtctgccctgcaccgcctggttggcctgcaggctgccctctggttgagtgctgaccgtcttggggacctggccttgttactagagaccctgaatggcagccaggtaatagggaaagtgacctgaagctgagggtctcctcyttccttcctcctcctttctctccagctgcagtagcatcatcatgtactggacaggcggctgggttggtggtcggaaaacctggattctctctgggactcttgggtgaccttgccctggttggtctctcattgtggggattctcttaggagtgttttttaaaaattggacaggcatggtggctcatacctgtaatctcagcactttgggaggctgaggtaggaggatcacttgaacccaagaggtggaggcaacagtgagttgtgagctatgatcacgccactgcactccagccctgcagcctgggtgacagagggagaccctgtctcaaaaaaaaaaaaaatttttttttggatagggatagggctcttgtgatcttgctcaagtcagctctcagccttagtctccttattagtaactcaaatatggtccttgccctgagtgaggaggcacgctggaatagatcatcactgccccaggtttttcttccttttttttaattcttgcctcatagctatctatctcttagaattgggggaaactacaggcattatgcatagcttcttgctttgtaagggtagctgaggcctgtgtcctcaaggatcaagaggacccttgagctcaaggtctagccaggatagatggagataggagaagacgrggaggttgtaggcttggagcttctggttgtccttctttccccagagtggagcctctaaggatctgctgttacttctgaaaacttggagtcccccagctkaggaatkagatgctccattgaccctgcaggatgcccagggattgaaggatgtcctcctgacagcatttgcctaccgccaaggtcagctagcarcctgactcatctcttctacctttaagtggtcctccagactcatgcyctctctcttgtcccattcagttccatgggcttcttagacccttgttccccatcatgacccctgctctatagccctctccaagctcacaccctgactgtcctcaggtctcyaggagctgatcacagggaacccagacaaggcactaagcagccttcatgaagcggcctcaggcctgtgtccacggcctgtgttggtccaggtgtayacagcactggggtcctgtcaccgtaagatggtaaagacagtcctagggtggattggggaaaccacaagcattatgtatagctttttgctttgtaagggtagctgaggcccgtgtcctcctatccctttagggaaatccacagagagcactgttgtacttggttgcagccctgaaagagggatcagcctggggtcctccacttctggaggcctctaggctctatcagcaactgggggacacaayagcagagctggagagtctggagctgctagttgaggtagggaactgccaggtgaagatgtggggtggaggattcctgaggtgcttgtgatggggtgacttgactagtcaagatccaagtataaggaagtatggctcccaaagattatagatacaatttttttctttctcttttaggccttgaatgtcccatgcagttccaaagccccgcagtttctcattgaggtagaattactactgccaccacctgacctagcctcaccccttcattgtggcactcagagccagaccaagcacatactagcaagcaggtgcctayagacggggaggtgaggttccccttgctcacctgagcttctcttcccacttctgatgcctcccctggggtgtgactctgcttttgttcttgtgacttgggggatgaatgaggcagtggcaggacataggtcgccactcctcagcctcttaccttgcttctagacctgaactgaggactcttctctaagacattaaccttctctatctttgacactctgaagtctcttccccagtccattctgtaactggggtagatccatactgagccaaaattggagccctaagaccttccctccctttctcctcctcagggcccatgaacatccatctgttagctaagagagaacattctcaggacccttgcaggttccctgctagggcctagggtgaggcttatgggcttttactcctcagggcaggagacgctgcagagcattacttggacctgctggccctgttgctggatagctyggagccaagggtgggtgtgtcttcaagcttctctgcaatggggtagacgggttggtgtcccctttgaaatacagcaagactgcaattttttgttttttcctctattctgtctgtccagtctgggggcccaggactctgcatggtaccagagcctggtgaagaggttggggatggtggctcatgcctttcaagacactgcttcttcttcccactccagttctccccacccccctcccctccagggccctgtatgcctgaggtgtttttggaggcagcggtagcactgatccaggcaggcagagcccaagatgccttgactctatgtgaggagttgctcagccgcacatcatctctgctacccaagatgtcccggctgtgggaagatgccagaaaaggaaccaaggaactgccatactgcccactctgggtctctgccacccacctgcttcagggccaggcctgggttcaactgggtgcccaaaaagtggcaattagtgaatttagcaggtgagcccggggtcctagagggggtgtggagggatgattttctgattgggacctgagttggtgagctccatgttcacctacttaccctagagtttctgaaattgattcctcttcacccctgttctgtgtcctacttcaggtgcctcgagctgctcttccgggccacacctgaggaaaaagaacaaggtgatctaaactttcagttttcctcttacctcctggaagtggtagtggtggaagtgggttccctttaatgtgtcccagcccaccaggagacttaagagaaagggactgtggacacaagaagaaatagaggaggatttggggttttggtgactgtgaggctgggaagacacttcttgactttgggagtggtccccaggggcagctttcaactgtgagcagggatgtaagtcagatgcggcactgcagcagcttcgggcagccgccctaattagtcgtgractggaatgggtagccagcggccaggataccaaagccttacaggacttcctcctcagtgtgcagatgtgcccaggtatgtrtacttgcatgacgtcggctatgcatagatgtgcaaggacagagaggcccatgggaaatacttgggcgtaagtgtaagagtggtgttctcagacaggaggggtgattggggttgtgctatatatacctagggatatatccaggtgttcaaatatacacagtgtrtatgcagggctcccaagagttccctggtttccccgatatcctcagacacaaagaccatgactctgctgttgtgsgttgcacaggagtagggggcagatgatggacactgggatgggaatggttgtgaatgatctgcccccgcttccatatgtgagtgtaggcaagatacttcctctctctaggcctcagtttccctttttataaaacaatgcctaagactatgtcaagttctaagactctgtactctgggctggggctacaggtaatygagacacttactttcacctgcttcagactctgaagaggctagatcggagggatgaggccactgcactctggtrgaggctggaggcccaaactaaggggtcacatgaagatgctctgtggtgaggctcaggcctgctggcttggggctgaggggcagttggtgtcctagagtccttggacctattgtgggtggtgaacactgaaagcgggggtatggctgcccagctttctgccaatctttcacccttaggcatcatccttctttctctccaggtctctccccctgtacctagaaagctatttgagctggatccgtccctctgatcgtgacgccttccttgaagaatttcggacatctctgccaaagtcttgtgacctgtagctgccacgttttgaagagcttgagctgggtccccagtgggctgtctctctgtggggagggctttctgcttcaccatcattaggaatgtgaccattcctatataattcctggactggtgagattggtggtaggcctgtgaaatttgccctagttactaccattctcgttttggaggaaacaatctctgccaccaccaagtcattgactttgctcgaggcaccttttttcctgtttctccttttctgttgtcgagtaaaatttcatatttatctcgtctgcctactacatatacttgcgtgggaaggcttgtgaccgtctagttgagtgctagttgtctatgatgccctttcctgacatcgtctaccttatgaacttgaagtctgggtatgaggaaagggctacaggaatcctcactttggaggcagtggctttagtccttcacattgcctgaatgcagagccccaaagcccaggacagtgacaatgagtggagttgggtctgaagggtggtctagataggcctctcaggacaagggcaggtacctgttacttagagacaggcaggtttctctcagagtaactcttcactcccttcctaattccaaattctagaaattcgactcgtcttagtcaaatgtgtctgtgtgggtacagggtgaaaggtgaattgagtcagcatatcaccaacagctgcctgttgactactaacagggacccctgttatttggggcccaaggattttcaagtcccagcatatgcagttttcttgctaatttgggttctactgaattggctgtgtgttctgtggttgccctttgacttctctggatttgagtgccttattataaggtattaatattaatgacgggaggaagaaaggcacaagcgctgagaaactgcaaaggctgtgggattggggttaccagagggtgcagtgacaatggggtaggagtggggtgctagtcagaaagttcagagtaggggtggttggaggcagcgttgagaaggagcaagaagtgtcagggtggtgatggcgtcttagaagatctccaggttttgggagaagatgggtgtatgggttaccacaataggactagactaatacaagggttcagtctattgtgccacgttcttccaggaggataaactccggagccaatgaactggagccaagtgggagagtccgcctctaagggattaaagggtctcctttcactaatcgatctcgccctattcctttcgttgattggctgagaattccaatccgtcgaggaagcgtagcgttgcggccaattgacgtggcgttactaggcgtgtcgcatcactgaggcgggagccaggccgcaagcgaatttcctgattggctgtgatctgcgggttgctggggagaggcgcggagaggcgggcgagagtccgcagggcaggcgctgattggctgaggtgggagcagcttcccttccgatgattcggctcttctcggctcagtctcagcgaagcgtctgcgaccgtcgtttgagtcgtcgctgccgctgccgctgccactgccactgccacctcgcggatcaggagccagcgttgttcgcccgacgcctcgctgccggtgggaggaagcgagagggaagccgcttgcgggtttgtcgccgctgctcgcccaccgcctggaagagccgagccccggcccagtcggtcgcttgccaccgctcgtagccgttacccgcgggccgccacagccgccggccgggagaggcgcgcgccatggcttctggagccgagtgagtgtgcgcgcgccgttcgcttgctgcggcggcgcgcaccgggaccagccgcgcagggtaggcccggcggggcctggccgtgggcgcgtcagagaggtggagaccaggaaagagggaagggaagctagggggcgagtgaggggccgtggacccggcaggcccggctggggccagctgcgcacccgcgcgccccctaggcggggcttgcgttgggtccgggtcggagcctgggccggatcgtgctgtgtcatgcaggccccggcccgcccgattggctcccttagaacggacgtctgggcctggccaggtcttccggcccactccgccggcgcggcgccccggggctttggggcgccagtctgccgtccggcctaccacccgccgaaagcctttggtccccggagagagcaggccccgcgagcccgaggccccagccgggcccggtgggcgtggactttgcgccatgtgaaggcctcaggagctctgccaccgaggcggagcccggggtcggggaaggcccgccgagctcagggaagctcacagccgcctttttggagccgggtcggcggggccggaggtgggcatcctctgtgtgtgacctgagtcgtgaaggactgttagggagagggcgagccctacctttcgcttctggtcttcttactttaggcctgttgttcatactagaaagtttgagccagttttccttaatgttatgactcgtgggtggggagaaaggaatttttctttaacattttaggttcttgctaaagttggaatctcagttcgtgttttgtgcgcctttccagatttccaggtttcgtggtgtgcagtttagagttgcactaactcttcaaaaacacaaacgtgcgcgcactcctttccccaaccagctatattgagaaattacccgggctctggggctttctgaccccacctccatccttaggaaagcgttagataaaacttggctacctcagcccattcaatttagaatagagagcttttagaggcaaaaaaaaaaaaaaaaaaaaaacacagccagcccaaggaaactctatgcaaattaccttccttccttgaagagattagttttttgaggtgtgttcctttttctcaagtttctgaattcggataaagtattactcagttgcttatttaaaagagtcacttattctgaaagtattcttttggtttatatgcagtcagcctcttattttcaaaagtaaaaatctaaaattcttggaacctggcatcatcagctgtttctaacctcttggtcaccttgatgactcttagctgaaacccttccaagtcccgtggagtcccctgtgcagttctggaaagggattgacttatacagaagacaatggaggattgccccaaagagtgtccagaactgctgttggcccatggtcaggccaaattcagtcttttagagattaccacatctgatctcagtaggtagatggggaattagaggctttaccttaagaaaagggcataccactcatctccagagccagagtccgggatggtaggcagaatggaggttttcctaggatacagctttgagattaaaatacaaactattgaccgggcacagtggctcaggcctgtaatcccagcattttgggaggccgaggcaggcagatcacttgaggtcaggagtttgagaccagcccgggcaacatggagaaaccccatctctattaaaatgcaaaaagtagccaggcatggtgatggtgcacacctgtagtcccagccactctggaggctgagacaggagaatcacttgaacccagggaggcagagattgcagtgagggagatcgcgccactgcactccagcctgggcaacagagggagactccgtttcaaaaaataaaaaactatggtgactagaggcatctggcgttttatttttctccagtcccagttctataagtcaagcaagaagatgggcagtccctggaagagtattttgatgggacaggagtgggagagctcgtgggtttacattgctctcaactgtcacattgagcatgcttggcctctagtgtgttgataagcattggaagagtctgcctactcagcagcattgtgcctggagtggcagacttttggaatgggggaagcaaatttgagcagaggaaactgtcgttagaaactagtttagaggcagtggttaaaaatgcagcctatgtgtgagggttagcagaaggcctaccattttgttagatgaatggggtttgtttttctcttgggtgtatcaggacccaaagatgtaagaaccccatggcttcctagctgagcacagcatttttctttgtctcttgcaaattgtgaggatatttccaatgggaatactattttgtcttgttttgttgacttcagtatccccagcccttagaacaatgcctggtacataatagagactcatgaatttgttgaatgaagaaattcgttttaaaaatttattttctttgcttccttcattgtctggccttcctactttggttaatgcttatgttttcctgagccttactaacacgaggccgctcttaaaaaagagagagcgctgggtgctgtggctcacgcctgtaatcccagtactttgggaggccgaggtgggcagatcacctgaggtcaggagttcgagaccagcctgaccaccatggtgaaaccccatctctagtaaaaatgcaaaattagccagttgtggtggcgcatgcctgtaatcccagctactcgggaggctgaggcaggagaatcacttgaacccgggaggtggaggttgcagttagctgagatcgcagcattgcattccagcctggacaacaaaagcgaaactccatctcaaaaaaaaaaaaaaaaaaaaaaaaagggagagggagcttgctgagtctagtaagtgacagctggaaacgggctaggtaataagttggtgtcactgtctggtgaatgatcctagcttctaggaaataacactgagtgtagacccagtcgactttgatttgggtgagagggatttggatttgccccatgtctcagcatttcttggttttgattttttgagccaactttatggaattgtgtacttttgcagatattactgtgaagttccttttgaccttgagcctctttctggcggtttgatgtctgttagtgttttttccaaatatgatggtctttatgcttggcattcctttggtactatggaatgccctggcatcagtaggtttagcctataaggagggtagcaccaatgattctgcttcgttgtccccaggcttgcttggtagaacttaaggcctccctgagcctcaagggaggttgtctggcttacttaattccctggaaagttagcttatgctttactctatactgttaatcatggtgaccattaataccatgtgccaggtattatgttaagcattttacattcattatctcccttaagacaataagcctctgagataagtattatattccttcttttatagaggaggacatcaaagttcagaggttaggtaacttgcccaagatcacaattaagcagtggcataattggaattcagacccaatgggtctgactatagagttcctgctcttaaccactcttctgtaagtctaagactatttttatttctctaacaactattcagcctccatttctattatgtcttcttcttaggccattattttctgaccctggggcaggatcactcacttggggccttatagctgggacactgacgctcaaaataccaggagctgctggaatgggtattgtaatatgtatggtagatactgctcctcgtgaccttggctgcctttccttcatctgagctttctggtctagggacagcttcatctattcactgtttctttcctaagtatgagttttagagactggcgaggcgcttggggcaggagtatctactgactccatttcctccttctagttcaaaaggtgatgacctatcaacagccattctcaaacagaagaaccgtcccaatcggttaattgttgatgaagccatcaatgaggacaacagtgtggtgtccttgtcccaggtaagctgtggccacagactagtctttccttactgcacttacttgagggattttcccaggtttcttttctcatttttcttgcagtgactgcagatagagtggggtttactgggaatcccaatctccagggctgctgcttactccccgtcagcccaatgacccaaaggccttaactttctttcctcagcccaagatggatgaattgcagttgttccgaggtgacacagtgttgctgaaaggaaagaagagacgagaagctgtttgcatcgtcctttctgatgatacttgttctgatgagaagattcggatgaatagagttgttcggaataaccttcgtgtacgcctaggggatgtcatcaggtgtgtgtggggtttttggcttcacagggatgggaggccagagatagcctgcattacaggcagg
